United States Patent Application Publication US 2011/0183924 A1 - sequence listing, part 19

SEQ ID NO: 47138 - DNA, 5718 bp, Homo sapiens
  misc_feature (5616)..(5616): n is a, c, g, or t
  misc_feature (5622)..(5622): n is a, c, g, or t
  misc_feature (5625)..(5625): n is a, c, g, or t
atgcgcagtcgtgagtcctcttgtccttgagcgtcaaccttctttccctgaagtggctggggttcctgtttccttctttgattgacaacttgtgttaaccctcgcacatctctgggccaatttttgcttgtaagtctttccggagacccctggaatttaaatcattagcaccgcgcccttccccgaagagtcttcgaagggttgccgcttttcggtggcgcagttctcgcgagaaggtgactttctttctcggtatttcctggtttccagaatccttagcgcgaggcggaaaaaatatttctcccagcttgtgttgatgccgcgattttgactgagacttcttcccacgatttctgtttttgcttctccaaggaaaatggcagctcccgagcagccgcttgcgatatcaaggggatgcacgagctcctcctcgctttccccgcctcggggcgaccgaacccttctggtcaggcacctgccggctgagcttactgctgaggagaaagaggacttgctgaagtacttcggggctcagtctgtgcgggtcctgtcagataaggggcgactgaaacatacagcttttgccacattccctaatgaaaaagcagctataaaggcattgacaagactccatcaactgaaacttttaggtcatactttagtcgttgaatttgcaaaagagcaagatcgagttcactccccatgtcccacttcaggttctgaaaaaaaaaaaaggtctgatgaccctgtcgaagatgataaagaaaaaaaagaactgggttatttaacagtagaaaagggaatggcaccaaaccatgggctgacttttcctttaaattcatgcctcaagtatatgtacccaccaccttccagcacaatcctagcaaacattgtaaatgccttggcaagcgtgcctaagttctatgtacaggtccttcatcttatgaataaaatgaatttgcccacaccttttggaccaattactgcgcgacctcccatgtatgaagactatatgccattgcatgcacctcttccacccacatctcctcagccacctgaggaacctcctttgccagacgaggatgaggaattatctagtgaagaatcagaatatgaaagcactgatgatgaggaccgacagagaatgaacaaattaatggaactagcaaatcttcagcccaaaagacctaaaacaataaagcagcgccatgtgagaaaaaagagaaaaataaaggatatgttgaatacacctttgtgtccttcacacagcagtttacatccagtgctgttaccttcagatgtatttgaccaaccacaacctgtaggtaacaaaagaattgaattccatatatctaccgacatgccagctgcatttaagaaagatttagaaaaggaacaaaattgtgaggaaaaaaatcatgatttacctgctactgaagttgatgcatccaatataggatttggaaaaatcttccccaaacctaatttggacatcacagaggagattaaagaagactctgatgaaatgccttcagaatgtatttctagaagggaattggaaaagggcagaatttctagagaagaaatggaaacactttcagttttcagaagttatgaaccgggtgaaccaaactgtagaatttatgtaaagaatttagctaaacatgttcaagaaaaggaccttaaatatatttttggaagatatgttgacttttcatcagaaacacagcggatcatgtttgatatacgtttgatgaaagaaggtcgtatgaaaggacaagctttcattggacttcctaatgaaaaagcagcagcaaaagccttaaaggaagctaatggatatgtgctttttggaaaacccatggtggttcagtttgctcgatctgctagaccaaaacaagatcctaaggaaggaaaaagaaagtgttaaaaattaataaagaagcattcctgcgtaaatactgctgtaatactgtcatgcaaagtgtatcctttcttgtcgtatcctttttggggcagtgtttttttgtttttttcctagaaatgtttgtccttcccccacctgttgatccaggttaaggaatacttttttacactttattcaaatgaaatatttctaaaattatttgtatagactgaacagatcttttatgtgtttttagatttgttgttgaattttctgtgctgtcctttatataattttttgagggaaagttagtgaatcaggtcaacttacttagagaatgtgttcatttactttaacccagaatacagtcttgtttcttctatttgtatgtttcctaaacctaattcaataacatatgctttctgttgtgtaatatatctggtttaggtatttataatgtgtttaaaatttgggcaaaggaaatgtttttcttttaaaaagtacttacattgaaaattaagatgtctggattactatgtaaattctagagagtagcagacctctcatctgaagtcttagtgaatctcttttgacatagatagcaatagaagtatctttcttctttcccctttctttttctaaacaagagaagaaaagcgtaatagaggggagaacacataatgcccactaagggtagtgcattaaggaaaaacagtcttggcaggtatataggaatagtggtttccagactggttgatgaccgtaatcaccaagaacagtggttctcagtcttggctgcacattgcagtgatctggaacttaaatactaattttaaaagggtgcagtggctcatacctgtaatcccagcactttgcaagtccgagatgggagaatcacttgagcccaggagtttgagaccagcctgggcaatgtagggagaccctgtccctacaaaaaatacaaaaattagccaagtgtggtggcttgcacctctggtctcagctacttgggatgctaaggcaggaggattacttgagccccagaggttgaggttgcagtgaaccatgatcacaccactgcattctagcctgggtgacagagtgagaccctctccctcctaaaaaaatccttaagaaatatattgatgcttggttcctttggtcagaattttgatttaaggtgttgggagtgtagcacagatgttggaataaacctctcaaactgattttaatatacaaacaaggtcgagaaccaccaaggaagagtttttatgcataaagattcctgtactctaccctagaactaatacatctgaatctctgggaatggagtataacaatcagatttgaaaaggtttctttagtaattttaaggactgaccagtttagacactgctttgttagagtaaaatgattaggtacctagtatcaacctagccatccaaccttatattaataactaggaaaataaagggttggagcctctgtgtttctttgttgaaaaatctgctactattattagatctgtgaaaacaattgaaaattcggttattatcaccttaaaagtacaaaacctatagattttgaaaatgtaattatttttctgtaggcatagttaaaaagattttgtaaatgttataaatcagtttctttataagcggtttatttagataaattttgttatactgacatgattcactaattttctaaatataaatggttcagctcttagttatttttaaactaatgacctgtgttatacttcctatttttaatgggcttttatgatgttttaggtttttttgaatcccgtgtccttcaagtgctttctaactttgagaggaagaaattgaccacctggactatggaactttggttgaatctggcgatgtggaacccatggatatggagggctgactatatacaccatgttttttcctggcacatcactcaactactattagctggcgagtcaactcacgttgttggaatgactagggacaactagacttcaagtgatctttcatcccaggaatataaatagtttctggaaaggacactgacaacttcaaagcaaaatgaagttctttctgttgcttttcaccattgggttctgctgggctcagtattccccaaatacacaacaaggacggacatctattgttcatctgtttgaatggcgatgggttgatattgctcttgaatgtgagcgatatttagctcccaagggatttggaggggttcaggtctctccaccaaatgaaaatgttgcaattcacaaccctttcagaccttggtgggaaagataccaaccagttagctataaattatgcacaagatctggaaatgaagatgaatttagaaacatggtgactagatgtaacaatgttggggttcgtatttatgtggatgctgtaattaatcatatgtctggtaatgctgtgagtgcaggaacaagcagtacctgtggaagttacttcaaccctggaagtagggactttccagcagtcccatattctggatgggatttcaatgatggtaaatgtaaaactggaagtggagatatcgagaactacaatgatgctactcaggtcagagattgtcgtctgactggtcttcttgatcttgcactggagaaggattacgtgcgttctaagattgccgaatatatgaaccatctcattgacattggtgttgcagggttcagacttgatgcttccaagcacatgtggcctggagacataaaggcaattttggacaaactgcataatctaaacagtaactggttccctgcaggaagtaaacctttcatttaccaggaggtaattgatctgggtggtgagccaattaaaagcagtgactactttggtaatggccgggtgacagaattcaagtatggtgcaaaactcggcacagttattcgcaagtggaatggagagaagatgtcttacttaaagaactggggagaaggttggggtttcgtaccttctgacagagcgcttgtctttgtggataaccatgacaatcaacgaggacatggggctggaggagcctctattcttaccttctgggatgctaggctgtacaaaatggcagttggatttatgcttgctcatccttacggatttacacgagtaatgtcaagctaccgttggccaagacagtttcaaaatggaaacgatgttaatgattgggttgggccaccaaataataatggagtaattaaagaagttactattaatccagacactacttgtggcaatgactgggtctgtgaacatcgatggcgccaaataaggaacatggttattttccgcaatgtagtggatggccagccttttacaaattggtatgataatgggagcaaccaagtggcttttgggagaggaaacagaggattcattgttttcaacaatgatgactggtcattttctttaactttgcaaactggtcttcctgctggcacatactgtgatgtcatttctggagataaaattaatggcaattgcacaggcattaaaatttacgtttctgatgatggcaaagctcatttttctattagtaactctgctgaagatccatttattgcaattcatgctgaatctaaattgtaaaatttaaaattaaatgcatgtcctcaaaacaataaaaaaaaaaaaaaaaaaaaaaaaactgttgggggcgcgcgccttgggccccaggaaaagatnttaaanccncctccgtgtggggcggcgcgggcccattgtaggggacaccggcccacaggggcccggaaaccccggccgaagggtgggtttcccccaaaaaac

SEQ ID NO: 47139 - DNA, 5054 bp, Homo sapiens
atgcgcagtcgtgagtcctcttgtccttgagcgtcaaccttctttccctgaagtggctggggttcctgtttccttctttgattgacaacttgtgttaaccctcgcacatctctgggccaatttttgcttgtaagtctttccggagacccctggaatttaaatcattagcaccgcgcccttccccgaagagtcttcgaagggttgccgcttttcggtggcgcagttctcgcgagaaggtgactttctttctcggtatttcctggtttccagaatccttagcgcgaggcggaaaaaatatttctcccagcttgtgttgatgccgcgattttgactgagacttcttcccacgatttctgtttttgcttctccaaggaaaatggcagctcccgagcagccgcttgcgatatcaaggggatgcacgagctcctcctcgctttccccgcctcggggcgaccgaacccttctggtcaggcacctgccggctgagcttactgctgaggagaaagaggacttgctgaagtacttcggggctcagtctgtgcgggtcctgtcagataaggggcgactgaaacatacagcttttgccacattccctaatgaaaaagcagctataaaggcattgacaagactccatcaactgaaacttttaggtcatactttagtcgttgaatttgcaaaagagcaagatcgagttcactccccatgtcccacttcaggttctgaaaaaaaaaaaaggtctgatgaccctgtcgaagatgataaagaaaaaaaagaactgggttatttaacagtagaaaagggaatggcaccaaaccatgggctgacttttcctttaaattcatgcctcaagtatatgtacccaccaccttccagcacaatcctagcaaacattgtaaatgccttggcaagcgtgcctaagttctatgtacaggtccttcatcttatgaataaaatgaatttgcccacaccttttggaccaattactgcgcgacctcccatgtatgaagactatatgccattgcatgcacctcttccacccacatctcctcagccacctgaggaacctcctttgccagacgaggatgaggaattatctagtgaagaatcagaatatgaaagcactgatgatgaggaccgacagagaatgaacaaattaatggaactagcaaatcttcagcccaaaagacctaaaacaataaagcagcgccatgtgagaaaaaagagaaaaataaaggatatgttgaatacacctttgtgtccttcacacagcagtttacatccagtgctgttaccttcagatgtatttgaccaaccacaacctgtaggtaacaaaagaattgaattccatatatctaccgacatgccagctgcatttaagaaagatttagaaaaggaacaaaattgtgaggaaaaaaatcatgatttacctgctactgaagttgatgcatccaatataggatttggaaaaatcttccccaaacctaatttggacatcacagaggagattaaagaagactctgatgaaatgccttcagaatgtatttctagaagggaattggaaaagggcagaatttctagagaaggtaatgtcacgaaataaactaagcacatattccattttacatatctttgactctatagaaacaaaacaaatctgtcatgccatttaccttaatttaaggcacatactttaaaacatctctccaattaatgtttgtaatcacttcttctgttttttttaaatactcatactttatagtggagggaacgttcctttccatacagtgtttccagtctatatttaggaaaaaattttgttttcattcctaaaactttcatgtggcatttaaaataagtcagtgtgtcccacaagtctggagttatattttccaaatgcagctgatagactgtcacaaatactgtgtctgagatacatacaaagcgatttaaaaaaaaatggtgattagaaatacatgattttaggattttatatcctaacatgataattttctacttctcaaagacttttactgttttggtacattgtcagaaaatatttagaggctttagattgatgtgtagcacataatttttcctacggtaatgggaaatagacttctagctaggatttttacacaaaacatctatctgattttctagaacagattactgacattaaatgagaggagctatacaagggttcttaggccatggtttgtctgagatgcctgatactgtgtttacttcattcttgcatttaaatatggaggtggctgatggtttgggaaattcactttaagcaaaataagtacccaaatcaattaacatatatactttgctcttttttataacatgactcatcttaacggacctttaatagtagatattttattggacaaattgtagttactctagaagtctgaaatttttaaaacaaaagttatatatatataaagttttttatataatcaattcagattttcagtgagtatatttaaacccatttgtaatattgttactaattttgttactaattttatgtaatattgttactaattagttcatatgaaaatgaactaattttcattttatgttaaagtgaaaattttaacattttcataaagcttattttgtctatttaacaattaggtttcaaaattgtaattatctttaaaaacttgcttaaaatattttaattttatatctttgttttttgttttttaataagaaatggaaacactttcagttttcagaagttatgaaccgggtgaaccaaactgtagaatttatgtaaagaatttagctaaacatgttcaagaaaaggtaggtataaattgattttttttcatgtaaatgaaaataatttgaaggttttatagttgatgtgttaaagtctgtttgaaactacctttaagaatgtggttttcttactgtgcttcagggcatgacaaattattgtttagtattttcaggttaattttttattaaaataatactctcatagcttgggttctctggcagtaaatactgagacagagtttgtggtatgtattaatttcctagggctaagtggctgaaacaacagagatgtgttgtctcacagttctggaggcaaactgaagtcaaaagtgtggcaggattggttcattctgagggctttgagtgaaggatctgttctgtgcctctcccatagcttctgctggtatgcagaagctggcgaactttcaccttccttggcttgtggaagcatcaccacaatttctgcctttgtacatagcatactccctttgtgagtatctgtccaaatttccccttttgaaaggccaccagtcatattagattaaagcctaccttagtccagtatgacctcttctactgatgcattgatgtatttatttatttattaagtttttttcccctggctttgttatttgtctttttcttattgaaattctaggaccttaaatatatttttggaagatatgttgacttttcatcagaaacacagcggatcatgtttgatatacgtttgatgaaagaaggtcgtatgaaaggacaagctttcattggacttcctaatgaaaaagcagcagcaaaagccttaaaggaagctaatggatatgtgctttttggaaaacccatggtggttcagtttgctcgatctgctagaccaaaacaagatcctaaggaaggaaaaagaaagtgttaaaaattaataaaggtaagtgtgaataaaacataataaaaagacaagactaattcttgagataaaattaagaataaaagtttgacaaggtagtaattcaggtatctctttttttttttttttgaggaaatacctatctgtgcagttaagtcccattaaacgtcaaaactataactacagattaaaacccatttatatgtgaaaattaagtttggagaatgaatcttataaggggagtgtgcctgttactctttttttaactttttctgcctatagtaaagcaatggttcttaaaccctaatatgtatcatatcacttggagagcctaataaaacacagattcgtaggttccttccttccctgaaagagttgatttggtaggtctgatgtggggacctagggaaactgtttataccagttttccttttaatgaggggatttccaggatgctggacatttagtgctgaaatggggaatgtgtctggtaagccaagacaggtcggtcacccttgttggcacctgaaaatttgcgagattaatgaggtttcaggtaatgatgaggcatcttatccagagaccacagcttgaaaactcctggaataaacacttacagatacattttctaactcttaaaattaacctaaagtaaatgttaaaataaaagttaaaaaaaaaaagtcaaactgtcattaaaaataattctggctgagcacggtggctcacccctgtaatctcagcaatttgggaagtggaggtgggcggatcacaaggtccagagatcaagaccatcctggccaacatggtgaaaccgactctctactaaaaatacaaaaattagctgggtgtggtggcgcctacctgtagtcccagctacgtgggcggctgaggcaggagaatcgcctgaacctgcgaggtggaggttgcagtgagccgagatcaagatcacgccactgcactccacactggcaacagagcaagactccatctcaaaaaaaaaaaaatctacagtgctgagtatataaaattattaacacatttcacaacaatatgtgtttgtggagttaaatattttttgtctttaaaacaggtaattttagtgcatacttaatttgatgattaaatatggtagaattaagcattttaaatgttaatgtatgttacattgttcaagaaataagtagaaatatattcctttgttttttatttaaatttttgttcctctgtaaactaaaagaacacgaagtaattggtcacaattactggtgtttaactgccaaatatgggtaaataagggaaaattttgtttaatatttagtccttctgagatggcttgaatatttgaattttg

SEQ ID NO: 47140 - DNA, 5817 bp, Homo sapiens
atgcgcagtcgtgagtcctcttgtccttgagcgtcaaccttctttccctgaagtggctggggttcctgtttccttctttgattgacaacttgtgttaaccctcgcacatctctgggccaatttttgcttgtaagtctttccggagacccctggaatttaaatcattagcaccgcgcccttccccgaagagtcttcgaagggttgccgcttttcggtggcgcagttctcgcgagaaggtgactttctttctcggtatttcctggtttccagaatccttagcgcgaggcggaaaaaatatttctcccagcttgtgttgatgccgcgattttgactgagacttcttcccacgatttctgtttttgcttctccaaggaaaatggcagctcccgagcagccgcttgcgatatcaaggggatgcacgagctcctcctcgctttccccgcctcggggcgaccgaacccttctggtcaggcacctgccggctgagcttactgctgaggagaaagaggacttgctgaagtacttcggggctcagtctgtgcgggtcctgtcagataaggggcgactgaaacatacagcttttgccacattccctaatgaaaaagcagctataaaggcattgacaagactccatcaactgaaacttttaggtcatactttagtcgttgaatttgcaaaagagcaagatcgagttcactccccatgtcccacttcaggttctgaaaaaaaaaaaaggtctgatgaccctgtcgaagatgataaagaaaaaaaagaactgggttatttaacagtagaaaagggaatggcaccaaaccatgggctgacttttcctttaaattcatgcctcaagtatatgtacccaccaccttccagcacaatcctagcaaacattgtaaatgccttggcaagcgtgcctaagttctatgtacaggtccttcatcttatgaataaaatgaatttgcccacaccttttggaccaattactgcgcgacctcccatgtatgaagactatatgccattgcatgcacctcttccacccacatctcctcagccacctgaggaacctcctttgccagacgaggatgaggaattatctagtgaagaatcagaatatgaaagcactgatgatgaggaccgacagagaatgaacaaattaatggaactagcaaatcttcagcccaaaagacctaaaacaataaagcagcgccatgtgagaaaaaagagaaaaataaaggatatgttgaatacacctttgtgtccttcacacagcagtttacatccagtgctgttaccttcagatgtatttgaccaaccacaacctgtaggtaacaaaagaattgaattccatatatctaccgacatgccagctgcatttaagaaagatttagaaaaggaacaaaattgtgaggaaaaaaatcatgatttacctgctactgaagttgatgcatccaatataggatttggaaaaatcttccccaaacctaatttggacatcacagaggagattaaagaagactctgatgaaatgccttcagaatgtatttctagaagggaattggaaaagggcagaatttctagagaagaaatggaaacactttcagttttcagaagttatgaaccgggtgaaccaaactgtagaatttatgtaaagaatttagctaaacatgttcaagaaaaggaccttaaatatatttttggaagatatgttgacttttcatcagaaacacagcggatcatgtttgatatacgtttgatgaaagaaggtcgtatgaaaggacaagctttcattggacttcctaatgaaaaagcagcagcaaaagccttaaaggaagctaatggatatgtgctttttggaaaacccatggtggttcagtttgctcgatctgctagaccaaaacaagatcctaaggaaggaaaaagaaagtgttaaaaattaataaagaagcattcctgcgtaaatactgctgtaatactgtcatgcaaagtgtatcctttcttgtcgtatcctttttggggcagtgtttttttgtttttttcctagaaatgtttgtccttcccccacctgttgatccaggttaaggaatacttttttacactttattcaaatgaaatatttctaaaattatttgtatagactgaacagatcttttatgtgtttttagatttgttgttgaattttctgtgctgtcctttatataattttttgagggaaagttagtgaatcaggtcaacttacttagagaatgtgttcatttactttaacccagaatacagtcttgtttcttctatttgtatgtttcctaaacctaattcaataacatatgctttctgttgtgtaatatatctggtttaggtatttataatgtgtttaaaatttgggcaaaggaaatgtttttcttttaaaaagtacttacattgaaaattaagatgtctggattactatgtaaattctagagagtagcagacctctcatctgaagtcttagtgaatctcttttgacatagatagcaatagaagtatctttcttctttcccctttctttttctaaacaagagaagaaaagcgtaatagaggggagaacacataatgcccactaagggtagtgcattaaggaaaaacagtcttggcaggtatataggaatagtggtttccagactggttgatgaccgtaatcaccaagaacagtggttctcagtcttggctgcacattgcagtgatctggaacttaaatactaattttaaaagggtgcagtggctcatacctgtaatcccagcactttgcaagtccgagatgggagaatcacttgagcccaggagtttgagaccagcctgggcaatgtagggagaccctgtccctacaaaaaatacaaaaattagccaagtgtggtggcttgcacctctggtctcagctacttgggatgctaaggcaggaggattacttgagccccagaggttgaggttgcagtgaaccatgatcacaccactgcattctagcctgggtgacagagtgagaccctctccctcctaaaaaaatccttaagaaatatattgatgcttggttcctttggtcagaattttgatttaaggtgttgggagtgtagcacagatgttggaataaacctctcaaactgattttaatatacaaacaaggtcgagaaccaccaaggaagagtttttatgcataaagattcctgtactctaccctagaactaatacatctgaatctctgggaatggagtataacaatcagatttgaaaaggtttctttagtaattttaaggactgaccagtttagacactgctttgttagagtaaaatgattaggtacctagtatcaacctagccatccaaccttatattaataactaggaaaataaagggttggagcctctgtgtttctttgttgaaaaatctgctactattattagatctgtgaaaacaattgaaaattcggttattatcaccttaaaagtacaaaacctatagattttgaaaatgtaattatttttctgtaggcatagttaaaaagattttgtaaatgttataaatcagtttctttataagcggtttatttagataaattttgttatactgacatgattcactaattttctaaatataaatggttcagctcttagttatttttaaactaatgacctgtgttatacttcctatttttaatgggcttttatgatgttttaggtttttttgaatcccgtgtccttcaagtgctttctaactttgagaggaagaaattgaccacctggactatggaactttggttgaatctggcgatgtggaacccatggatatggagggctgactatatacaccatgttttttcctggcacatcactcaactactattagctggcgagtcaactcacgttgttggaatgactagggacaactagacttcaagtgatctttcatcccaggaatataaatagtttctggaaaggacactgacaacttcaaagcaaaatgaagttctttctgttgcttttcaccattgggttctgctgggctcagtattccccaaatacacaacaaggacggacatctattgttcatctgtttgaatggcgatgggttgatattgctcttgaatgtgagcgatatttagctcccaagggatttggaggggttcaggtctctccaccaaatgaaaatgttgcaattcacaaccctttcagaccttggtgggaaagataccaaccagttagctataaattatgcacaagatctggaaatgaagatgaatttagaaacatggtgactagatgtaacaatgttggggttcgtatttatgtggatgctgtaattaatcatatgtctggtaatgctgtgagtgcaggaacaagcagtacctgtggaagttacttcaaccctggaagtagggactttccagcagtcccatattctggatgggatttcaatgatggtaaatgtaaaactggaagtggagatatcgagaactacaatgatgctactcaggtcagagattgtcgtctgactggtcttcttgatcttgcactggagaaggattacgtgcgttctaagattgccgaatatatgaaccatctcattgacattggtgttgcagggttcagacttgatgcttccaagcacatgtggcctggagacataaaggcaattttggacaaactgcataatctaaacagtaactggttccctgcaggaagtaaacctttcatttaccaggaggtaattgatctgggtggtgagccaattaaaagcagtgactactttggaaatggccgggtgacagaattcaagtatggtgcaaaactcggcacagttattcgcaagtggaatggagagaagatgtcttacctaaagaactggggagaaggttggggtttcatgccttctgacagagcacttgtctttgtggataaccatgacaatcaacgaggacatggggctggaggagcctctattcttaccttctgggatgctaggtagaaaaccaagttctctattttttttaacacatcttttaatgatggtaatgatattctgatattctgtgataatataattatgtaactttcaggctgtataaaatggcagttggatttatgcttgctcatccttatggttttacacgagtaatgtcaagctaccgttggccaagacagtttcaaaatggaaacgatgttaatgattgggttgggccaccaaataataatggagtaattaaagaagttactattaatccagacactacttgtggcaatgactgggtctgtgaacatcgatggcgccaaatacaggaacatggttaatttccgcaatgtagtggatggccagccttttacaaactggtatgataatgggagcaaccaagtggcttttgggagaggaaacagaggattcattgttttcaacaatgatgactgatggagtttcactcttgttgcccaggctgtggtgcaatggcacgatcctggctcactgcaatttccgcttcccgggttcaagggatcctgagatggggtttcttcgtgttaatcaggctggtctcaaactctcgacctcagttgatacgtctgcctcaggctcccaaagtgctgggattacaggcgtttctttggattcccatgtccttcaagtgctttgcaactttgagaagaagaaattgaccacctggactatggaactgtgcataacagctttgaaagtgtatttaaaaattaaatccatacgcctttaaatcagtaaattggaaatatattacatgtattgtaatgactttcctcagatataataaattgttttctttccaatgga

SEQ ID NO: 47141 - DNA, 5291 bp, Homo sapiens
atgcgcagtcgtgagtcctcttgtccttgagcgtcaaccttctttccctgaagtggctggggttcctgtttccttctttgattgacaacttgtgttaaccctcgcacatctctgggccaatttttgcttgtaagtctttccggagacccctggaatttaaatcattagcaccgcgcccttccccgaagagtcttcgaagggttgccgcttttcggtggcgcagttctcgcgagaaggtgactttctttctcggtatttcctggtttccagaatccttagcgcgaggcggaaaaaatatttctcccagcttgtgttgatgccgcgattttgactgagacttcttcccacgatttctgtttttgcttctccaaggaaaatggcagctcccgagcagccgcttgcgatatcaaggggatgcacgagctcctcctcgctttccccgcctcggggcgaccgaacccttctggtcaggcacctgccggctgagcttactgctgaggagaaagaggacttgctgaagtacttcggggctcagtctgtgcgggtcctgtcagataaggggcgactgaaacatacagcttttgccacattccctaatgaaaaagcagctataaaggcattgacaagactccatcaactgaaacttttaggtcatactttagtcgttgaatttgcaaaagagcaagatcgagttcactccccatgtcccacttcaggttctgaaaaaaaaaaaaggtctgatgaccctgtcgaagatgataaagaaaaaaaagaactgggttatttaacagtagaaaagggaatggcaccaaaccatgggctgacttttcctttaaattcatgcctcaagtatatgtacccaccaccttccagcacaatcctagcaaacattgtaaatgccttggcaagcgtgcctaagttctatgtacaggtccttcatcttatgaataaaatgaatttgcccacaccttttggaccaattactgcgcgacctcccatgtatgaagactatatgccattgcatgcacctcttccacccacatctcctcagccacctgaggaacctcctttgccagacgaggatgaggaattatctagtgaagaatcagaatatgaaagcactgatgatgaggaccgacagagaatgaacaaattaatggaactagcaaatcttcagcccaaaagacctaaaacaataaagcagcgccatgtgagaaaaaagagaaaaataaaggatatgttgaatacacctttgtgtccttcacacagcagtttacatccagtgctgttaccttcagatgtatttgaccaaccacaacctgtaggtaacaaaagaattgaattccatatatctaccgacatgccagctgcatttaagaaagatttagaaaaggaacaaaattgtgaggaaaaaaatcatgatttacctgctactgaagttgatgcatccaatataggatttggaaaaatcttccccaaacctaatttggacatcacagaggagattaaagaagactctgatgaaatgccttcagaatgtatttctagaagggaattggaaaagggcagaatttctagagaagaaatggaaacactttcagttttcagaagttatgaaccgggtgaaccaaactgtagaatttatgtaaagaatttagctaaacatgttcaagaaaaggaccttaaatatatttttggaagatatgttgacttttcatcagaaacacagcggatcatgtttgatatacgtttgatgaaagaaggtcgtatgaaaggacaagctttcattggacttcctaatgaaaaagcagcagcaaaagccttaaaggaagctaatggatatgtgctttttggaaaacccatggtggttcagtttgctcgatctgctagaccaaaacaagatcctaaggaaggaaaaagaaagtgttaaaaattaataaagaagcattcctgcgtaaatactgctgtaatactgtcatgcaaagtgtatcctttcttgtcgtatcctttttggggcagtgtttttttgtttttttcctagaaatgtttgtccttcccccacctgttgatccaggttaaggaatacttttttacactttattcaaatgaaatatttctaaaattatttgtatagactgaacagatcttttatgtgtttttagatttgttgttgaattttctgtgctgtcctttatataattttttgagggaaagttagtgaatcaggtcaacttacttagagaatgtgttcatttactttaacccagaatacagtcttgtttcttctatttgtatgtttcctaaacctaattcaataacatatgctttctgttgtgtaatatatctggtttaggtatttataatgtgtttaaaatttgggcaaaggaaatgtttttcttttaaaaagtacttacattgaaaattaagatgtctggattactatgtaaattctagagagtagcagacctctcatctgaagtcttagtgaatctcttttgacatagatagcaatagaagtatctttcttctttcccctttctttttctaaacaagagaagaaaagcgtaatagaggggagaacacataatgcccactaagggtagtgcattaaggaaaaacagtcttggcaggtatataggaatagtggtttccagactggttgatgaccgtaatcaccaagaacagtggttctcagtcttggctgcacattgcagtgatctggaacttaaatactaattttaaaagggtgcagtggctcatacctgtaatcccagcactttgcaagtccgagatgggagaatcacttgagcccaggagtttgagaccagcctgggcaatgtagggagaccctgtccctacaaaaaatacaaaaattagccaagtgtggtggcttgcacctctggtctcagctacttgggatgctaaggcaggaggattacttgagccccagaggttgaggttgcagtgaaccatgatcacaccactgcattctagcctgggtgacagagtgagaccctctccctcctaaaaaaatccttaagaaatatattgatgcttggttcctttggtcagaattttgatttaaggtgttgggagtgtagcacagatgttggaataaacctctcaaactgattttaatatacaaacaaggtcgagaaccaccaaggaagagtttttatgcataaagattcctgtactctaccctagaactaatacatctgaatctctgggaatggagtataacaatcagatttgaaaaggtttctttagtaattttaaggactgaccagtttagacactgctttgttagagtaaaatgattaggtacctagtatcaacctagccatccaaccttatattaataactaggaaaataaagggttggagcctctgtgtttctttgttgaaaaatctgctactattattagatctgtgaaaacaattgaaaattcggttattatcaccttaaaagtacaaaacctatagattttgaaaatgtaattatttttctgtaggcatagttaaaaagattttgtaaatgttataaatcagtttctttataagcggtttatttagataaattttgttatactgacatgattcactaattttctaaatataaatggttcagctcttagttatttttaaactaatgacctgtgttatacttcctatttttaatgggcttttatgatgttttaggtttttttgaatcccgtgtccttcaagtgctttctaactttgagaggaagaaattgaccacctggactatggaactttggttgaatctggcgatgtggaacccatggatatggagggctgactatatacaccatgttttttcctggcacatcactcaactactattagctggcgagtcaactcacgttgttggaatgactagggacaactagacttcaagtgatctttcatcccaggaatataaatagtttctggaaaggacactgacaacttcaaagcaaaatgaagttctttctgttgcttttcaccattgggttctgctgggctcagtattccccaaatacacaacaaggacggacatctattgttcatctgtttgaatggcgatgggttgatattgctcttgaatgtgagcgatatttagctcccaagggatttggaggggttcaggtctctccaccaaatgaaaatgttgcaattcacaaccctttcagaccttggtgggaaagataccaaccagttagctataaattatgcacaagatctggaaatgaagatgaatttagaaacatggtgactagatgtaacaatgttggggttcgtatttatgtggatgctgtaattaatcatatgtctggtaatgctgtgagtgcaggaacaagcagtacctgtggaagttacttcaaccctggaagtagggactttccagcagtcccatattctggatgggatttcaatgatggtaaatgtaaaactggaagtggagatatcgagaactacaatgatgctactcaggtcagagattgtcgtctgactggtcttcttgatcttgcactggagaaggattacgtgcgttctaagattgccgaatatatgaaccatctcattgacattggtgttgcagggttcagacttgatgcttccaagcacatgtggcctggagacataaaggcaattttggacaaactgcataatctaaacagtaactggttccctgcaggaagtaaacctttcatttaccaggaggtaattgatctgggtggtgagccaattaaaagcagtgactactttggaaatggccgggtgacagaattcaagtatggtgcaaaactcggcacagttattcgcaagtggaatggagagaagatgtcttacctaaagaactggggagaaggttggggtttcatgccttctgacagagcacttgtctttgtggataaccatgacaatcaacgaggacatggggctggaggagcctctattcttaccttctgggatgctaggctgtataaaatggcagttggatttatgcttgctcatccttatggttttacacgagtaatgtcaagctaccgttggccaagacagtttcaaaatggaaacgtttctttggattcccatgtccttcaagtgctttgcaactttgagaagaagaaattgaccacctggactatggaactgtgcataacagctttgaaagtgtatttaaaaattaaatccatacgcctttaaatcagtaaattggaaatatattacatgtattgtaatgactttcctcagatataataaattgttttctttccaatgga

SEQ ID NO: 47142 - DNA, 5423 bp, Homo sapiens
atgcgcagtcgtgagtcctcttgtccttgagcgtcaaccttctttccctgaagtggctggggttcctgtttccttctttgattgacaacttgtgttaaccctcgcacatctctgggccaatttttgcttgtaagtctttccggagacccctggaatttaaatcattagcaccgcgcccttccccgaagagtcttcgaagggttgccgcttttcggtggcgcagttctcgcgagaaggtgactttctttctcggtatttcctggtttccagaatccttagcgcgaggcggaaaaaatatttctcccagcttgtgttgatgccgcgattttgactgagacttcttcccacgatttctgtttttgcttctccaaggaaaatggcagctcccgagcagccgcttgcgatatcaaggggatgcacgagctcctcctcgctttccccgcctcggggcgaccgaacccttctggtcaggcacctgccggctgagcttactgctgaggagaaagaggacttgctgaagtacttcggggctcagtctgtgcgggtcctgtcagataaggggcgactgaaacatacagcttttgccacattccctaatgaaaaagcagctataaaggcattgacaagactccatcaactgaaacttttaggtcatactttagtcgttgaatttgcaaaagagcaagatcgagttcactccccatgtcccacttcaggttctgaaaaaaaaaaaaggtctgatgaccctgtcgaagatgataaagaaaaaaaagaactgggttatttaacagtagaaaagggaatggcaccaaaccatgggctgacttttcctttaaattcatgcctcaagtatatgtacccaccaccttccagcacaatcctagcaaacattgtaaatgccttggcaagcgtgcctaagttctatgtacaggtccttcatcttatgaataaaatgaatttgcccacaccttttggaccaattactgcgcgacctcccatgtatgaagactatatgccattgcatgcacctcttccacccacatctcctcagccacctgaggaacctcctttgccagacgaggatgaggaattatctagtgaagaatcagaatatgaaagcactgatgatgaggaccgacagagaatgaacaaattaatggaactagcaaatcttcagcccaaaagacctaaaacaataaagcagcgccatgtgagaaaaaagagaaaaataaaggatatgttgaatacacctttgtgtccttcacacagcagtttacatccagtgctgttaccttcagatgtatttgaccaaccacaacctgtaggtaacaaaagaattgaattccatatatctaccgacatgccagctgcatttaagaaagatttagaaaaggaacaaaattgtgaggaaaaaaatcatgatttacctgctactgaagttgatgcatccaatataggatttggaaaaatcttccccaaacctaatttggacatcacagaggagattaaagaagactctgatgaaatgccttcagaatgtatttctagaagggaattggaaaagggcagaatttctagagaagaaatggaaacactttcagttttcagaagttatgaaccgggtgaaccaaactgtagaatttatgtaaagaatttagctaaacatgttcaagaaaaggaccttaaatatatttttggaagatatgttgacttttcatcagaaacacagcggatcatgtttgatatacgtttgatgaaagaaggtcgtatgaaaggacaagctttcattggacttcctaatgaaaaagcagcagcaaaagccttaaaggaagctaatggatatgtgctttttggaaaacccatggtggttcagtttgctcgatctgctagaccaaaacaagatcctaaggaaggaaaaagaaagtgttaaaaattaataaagaagcattcctgcgtaaatactgctgtaatactgtcatgcaaagtgtatcctttcttgtcgtatcctttttggggcagtgtttttttgtttttttcctagaaatgtttgtccttcccccacctgttgatccaggttaaggaatacttttttacactttattcaaatgaaatatttctaaaattatttgtatagactgaacagatcttttatgtgtttttagatttgttgttgaattttctgtgctgtcctttatataattttttgagggaaagttagtgaatcaggtcaacttacttagagaatgtgttcatttactttaacccagaatacagtcttgtttcttctatttgtatgtttcctaaacctaattcaataacatatgctttctgttgtgtaatatatctggtttaggtatttataatgtgtttaaaatttgggcaaaggaaatgtttttcttttaaaaagtacttacattgaaaattaagatgtctggattactatgtaaattctagagagtagcagacctctcatctgaagtcttagtgaatctcttttgacatagatagcaatagaagtatctttcttctttcccctttctttttctaaacaagagaagaaaagcgtaatagaggggagaacacataatgcccactaagggtagtgcattaaggaaaaacagtcttggcaggtatataggaatagtggtttccagactggttgatgaccgtaatcaccaagaacagtggttctcagtcttggctgcacattgcagtgatctggaacttaaatactaattttaaaagggtgcagtggctcatacctgtaatcccagcactttgcaagtccgagatgggagaatcacttgagcccaggagtttgagaccagcctgggcaatgtagggagaccctgtccctacaaaaaatacaaaaattagccaagtgtggtggcttgcacctctggtctcagctacttgggatgctaaggcaggaggattacttgagccccagaggttgaggttgcagtgaaccatgatcacaccactgcattctagcctgggtgacagagtgagaccctctccctcctaaaaaaatccttaagaaatatattgatgcttggttcctttggtcagaattttgatttaaggtgttgggagtgtagcacagatgttggaataaacctctcaaactgattttaatatacaaacaaggtcgagaaccaccaaggaagagtttttatgcataaagattcctgtactctaccctagaactaatacatctgaatctctgggaatggagtataacaatcagatttgaaaaggtttctttagtaattttaaggactgaccagtttagacactgctttgttagagtaaaatgattaggtacctagtatcaacctagccatccaaccttatattaataactaggaaaataaagggttggagcctctgtgtttctttgttgaaaaatctgctactattattagatctgtgaaaacaattgaaaattcggttattatcaccttaaaagtacaaaacctatagattttgaaaatgtaattatttttctgtaggcatagttaaaaagattttgtaaatgttataaatcagtttctttataagcggtttatttagataaattttgttatactgacatgattcactaattttctaaatataaatggttcagctcttagttatttttaaactaatgacctgtgttatacttcctatttttaatgggcttttatgatgttttaggtttttttgaatcccgtgtccttcaagtgctttctaactttgagaggaagaaattgaccacctggactatggaactttggttgaatctggcgatgtggaacccatggatatggagggctgactatatacaccatgttttttcctggcacatcactcaactactattagctggcgagtcaactcacgttgttggaatgactagggacaactagacttcaagtgatctttcatcccaggaatataaatagtttctggaaaggacactgacaacttcaaagcaaaatgaagttctttctgttgcttttcaccattgggttctgctgggctcagtattccccaaatacacaacaaggacggacatctattgttcatctgtttgaatggcgatgggttgatattgctcttgaatgtgagcgatatttagctcccaagggatttggaggggttcaggtctctccaccaaatgaaaatgttgcaattcacaaccctttcagaccttggtgggaaagataccaaccagttagctataaattatgcacaagatctggaaatgaagatgaatttagaaacatggtgactagatgtaacaatgttggggttcgtatttatgtggatgctgtaattaatcatatgtctggtaatgctgtgagtgcaggaacaagcagtacctgtggaagttacttcaaccctggaagtagggactttccagcagtcccatattctggatgggatttcaatgatggtaaatgtaaaactggaagtggagatatcgagaactacaatgatgctactcaggtcagagattgtcgtctgactggtcttcttgatcttgcactggagaaggattacgtgcgttctaagattgccgaatatatgaaccatctcattgacattggtgttgcagggttcagacttgatgcttccaagcacatgtggcctggagacataaaggcaattttggacaaactgcataatctaaacagtaactggttccctgcaggaagtaaacctttcatttaccaggaggtaattgatctgggtggtgagccaattaaaagcagtgactactttggaaatggccgggtgacagaattcaagtatggtgcaaaactcggcacagttattcgcaagtggaatggagagaagatgtcttacctaaagaactggggagaaggttggggtttcatgccttctgacagagcacttgtctttgtggataaccatgacaatcaacgaggacatggggctggaggagcctctattcttaccttctgggatgctaggtagaaaaccaagttctctattttttttaacacatcttttaatgatggtaatgatattctgatattctgtgataatataattatgtaactttcaggctgtataaaatggcagttggatttatgcttgctcatccttatggttttacacgagtaatgtcaagctaccgttggccaagacagtttcaaaatggaaacgtaagttttgaaattgttcaaactatccttttctcaagaaacagaaggcaatcttgttctaacttaatatgacaactattaattatatattcaacaaataattgattagaaacctgatatagggctgcgattttagtaatgcaggttatattaaaggagtaaaatatatattttccattgacaaagagtatgcaagccttttcagacatatgataaacatccccctagcccacaggaaaaaaa

SEQ ID NO: 47143 - DNA, 4101 bp, Homo sapiens
atgcgcagtcgtgagtcctcttgtccttgagcgtcaaccttctttccctgaagtggctggggttcctgtttccttctttgattgacaacttgtgttaaccctcgcacatctctgggccaatttttgcttgtaagtctttccggagacccctggaatttaaatcattagcaccgcgcccttccccgaagagtcttcgaagggttgccgcttttcggtggcgcagttctcgcgagaaggtgactttctttctcggtatttcctggtttccagaatccttagcgcgaggcggaaaaaatatttctcccagcttgtgttgatgccgcgattttgactgagacttcttcccacgatttctgtttttgcttctccaaggaaaatggcagctcccgagcagccgcttgcgatatcaaggggatgcacgagctcctcctcgctttccccgcctcggggcgaccgaacccttctggtcaggcacctgccggctgagcttactgctgaggagaaagaggacttgctgaagtacttcggggctcagtctgtgcgggtcctgtcagataaggggcgactgaaacatacagcttttgccacattccctaatgaaaaagcagctataaaggcattgacaagactccatcaactgaaacttttaggtcatactttagtcgttgaatttgcaaaagagcaagatcgagttcactccccatgtcccacttcaggttctgaaaaaaaaaaaaggtctgatgaccctgtcgaagatgataaagaaaaaaaagaactgggttatttaacagtagaaaagggaatggcaccaaaccatgggctgacttttcctttaaattcatgcctcaagtatatgtacccaccaccttccagcacaatcctagcaaacattgtaaatgccttggcaagcgtgcctaagttctatgtacaggtccttcatcttatgaataaaatgaatttgcccacaccttttggaccaattactgcgcgacctcccatgtatgaagactatatgccattgcatgcacctcttccacccacatctcctcagccacctgaggaacctcctttgccagacgaggatgaggaattatctagtgaagaatcagaatatgaaagcactgatgatgaggaccgacagagaatgaacaaattaatggaactagcaaatcttcagcccaaaagacctaaaacaataaagcagcgccatgtgagaaaaaagagaaaaataaaggatatgttgaatacacctttgtgtccttcacacagcagtttacatccagtgctgttaccttcagatgtatttgaccaaccacaacctgtaggtaacaaaagaattgaattccatatatctaccgacatgccagctgcatttaagaaagatttagaaaaggaacaaaattgtgaggaaaaaaatcatgatttacctgctactgaagttgatgcatccaatataggatttggaaaaatcttccccaaacctaatttggacatcacagaggagattaaagaagactctgatgaaatgccttcagaatgtatttctagaagggaattggaaaagggcagaatttctagagaagaaatggaaacactttcagttttcagaagttatgaaccgggtgaaccaaactgtagaatttatgtaaagaatttagctaaacatgttcaagaaaaggaccttaaatatatttttggaagatatgttgacttttcatcagaaacacagcggatcatgtttgatatacgtttgatgaaagaaggtcgtatgaaaggacaagctttcattggacttcctaatgaaaaagcagcagcaaaagccttaaaggaagctaatggatatgtgctttttggaaaacccatggtggttcagtttgctcgatctgctagaccaaaacaagatcctaaggaaggaaaaagaaagtgttaaaaattaataaagaagcattcctgcgtaaatactgctgtaatactgtcatgcaaagtgtatcctttcttgtcgtatcctttttggggcagtgtttttttgtttttttcctagaaatgtttgtccttcccccacctgttgatccaggttaaggaatacttttttacactttattcaaatgaaatatttctaaaattatttgtatagactgaacagatcttttatgtgtttttagatttgttgttgaattttctgtgctgtcctttatataattttttgagggaaagttagtgaatcaggtcaacttacttagagaatgtgttcatttactttaacccagaatacagtcttgtttcttctatttgtatgtttcctaaacctaattcaataacatatgctttctgttgtgtaatatatctggtttaggtatttataatgtgtttaaaatttgggcaaaggaaatgtttttcttttaaaaagtacttacattgaaaattaagatgtctggattactatgtaaattctagagagtagcagacctctcatctgaagtcttagtgaatctcttttgacatagatagcaatagaagtatctttcttctttcccctttctttttctaaacaagagaagaaaagcgtaatagaggggagaacacataatgcccactaagggtagtgcattaaggaaaaacagtcttggcaggtatataggaatagtggtttccagactggttgatgaccgtaatcaccaagaacagtggttctcagtcttggctgcacattgcagtgatctggaacttaaatactaattttaaaagggtgcagtggctcatacctgtaatcccagcactttgcaagtccgagatgggagaatcacttgagcccaggagtttgagaccagcctgggcaatgtagggagaccctgtccctacaaaaaatacaaaaattagccaagtgtggtggcttgcacctctggtctcagctacttgggatgctaaggcaggaggattacttgagccccagaggttgaggttgcagtgaaccatgatcacaccactgcattctagcctgggtgacagagtgagaccctctccctcctaaaaaaatccttaagaaatatattgatgcttggttcctttggtcagaattttgatttaaggtgttgggagtgtagcacagatgttggaataaacctctcaaactgattttaatatacaaacaaggtcgagaaccaccaaggaagagtttttatgcataaagattcctgtactctaccctagaactaatacatctgaatctctgggaatggagtataacaatcagatttgaaaaggtttctttagtaattttaaggactgaccagtttagacactgctttgttagagtaaaatgattaggtacctagtatcaacctagccatccaaccttatattaataactaggaaaataaagggttggagcctctgtgtttctttgttgaaaaatctgctactattattagatctgtgaaaacaattgaaaattcggttattatcaccttaaaagtacaaaacctatagattttgaaaatgtaattatttttctgtaggcatagttaaaaagattttgtaaatgttataaatcagtttctttataagcggtttatttagataaattttgttatactgacatgattcactaattttctaaatataaatggttcagctcttagttatttttaaactaatgacctgtgttatacttcctatttttaatgggcttttatgatgttttaggtttttttgaatcccgtgtccttcaagtgctttctaactttgagaggaagaaattgaccacctggactatggaactgtgcgtaacagctttgaaagtgtatttaaaaattaaatctatatgcctttaaatcagtgaattggaaacatattacatgtattttaatgattttcctcaaatataataaattgtttcctttccaataaaaaaaaaacacacgaacacattcgcaccacacgcacgaacaacaaaaaatcggtgcgcggggcgggccgaaaagttcaagaaccctctgggggggcggccccagaaggaaaagggcaacgggccaaggaacgcggcgaaggggggtccccaaaaaaccggggcggcctaccccggggggccggtaacaggcgcga

SEQ ID NO: 47144 - DNA, 4227 bp, Homo sapiens
atgcgcagtcgtgagtcctcttgtccttgagcgtcaaccttctttccctgaagtggctggggttcctgtttccttctttgattgacaacttgtgttaaccctcgcacatctctgggccaatttttgcttgtaagtctttccggagacccctggaatttaaatcattagcaccgcgcccttccccgaagagtcttcgaagggttgccgcttttcggtggcgcagttctcgcgagaaggtgactttctttctcggtatttcctggtttccagaatccttagcgcgaggcggaaaaaatatttctcccagcttgtgttgatgccgcgattttgactgagacttcttcccacgatttctgtttttgcttctccaaggaaaatggcagctcccgagcagccgcttgcgatatcaaggggatgcacgagctcctcctcgctttccccgcctcggggcgaccgaacccttctggtcaggcacctgccggctgagcttactgctgaggagaaagaggacttgctgaagtacttcggggctcagtctgtgcgggtcctgtcagataaggggcgactgaaacatacagcttttgccacattccctaatgaaaaagcagctataaaggcattgacaagactccatcaactgaaacttttaggtcatactttagtcgttgaatttgcaaaagagcaagatcgagttcactccccatgtcccacttcaggttctgaaaaaaaaaaaaggtctgatgaccctgtcgaagatgataaagaaaaaaaagaactgggttatttaacagtagaaaagggaatggcaccaaaccatgggctgacttttcctttaaattcatgcctcaagtatatgtacccaccaccttccagcacaatcctagcaaacattgtaaatgccttggcaagcgtgcctaagttctatgtacaggtccttcatcttatgaataaaatgaatttgcccacaccttttggaccaattactgcgcgacctcccatgtatgaagactatatgccattgcatgcacctcttccacccacatctcctcagccacctgaggaacctcctttgccagacgaggatgaggaattatctagtgaagaatcagaatatgaaagcactgatgatgaggaccgacagagaatgaacaaattaatggaactagcaaatcttcagcccaaaagacctaaaacaataaagcagcgccatgtgagaaaaaagagaaaaataaaggatatgttgaatacacctttgtgtccttcacacagcagtttacatccagtgctgttaccttcagatgtatttgaccaaccacaacctgtaggtaacaaaagaattgaattccatatatctaccgacatgccagctgcatttaagaaagatttagaaaaggaacaaaattgtgaggaaaaaaatcatgatttacctgctactgaagttgatgcatccaatataggatttggaaaaatcttccccaaacctaatttggacatcacagaggagattaaagaagactctgatgaaatgccttcagaatgtatttctagaagggaattggaaaagggcagaatttctagagaagaaatggaaacactttcagttttcagaagttatgaaccgggtgaaccaaactgtagaatttatgtaaagaatttagctaaacatgttcaagaaaaggaccttaaatatatttttggaagatatgttgacttttcatcagaaacacagcggatcatgtttgatatacgtttgatgaaagaaggtcgtatgaaaggacaagctttcattggacttcctaatgaaaaagcagcagcaaaagccttaaaggaagctaatggatatgtgctttttggaaaacccatggtggttcagtttgctcgatctgctagaccaaaacaagatcctaaggaaggaaaaagaaagtgttaaaaattaataaagaagcattcctgcgtaaatactgctgtaatactgtcatgcaaagtgtatcctttcttgtcgtatcctttttggggcagtgtttttttgtttttttcctagaaatgtttgtccttcccccacctgttgatccaggttaaggaatacttttttacactttattcaaatgaaatatttctaaaattatttgtatagactgaacagatcttttatgtgtttttagatttgttgttgaattttctgtgctgtcctttatataattttttgagggaaagttagtgaatcaggtcaacttacttagagaatgtgttcatttactttaacccagaatacagtcttgtttcttctatttgtatgtttcctaaacctaattcaataacatatgctttctgttgtgtaatatatctggtttaggtatttataatgtgtttaaaatttgggcaaaggaaatgtttttcttttaaaaagtacttacattgaaaattaagatgtctggattactatgtaaattctagagagtagcagacctctcatctgaagtcttagtgaatctcttttgacatagatagcaatagaagtatctttcttctttcccctttctttttctaaacaagagaagaaaagcgtaatagaggggagaacacataatgcccactaagggtagtgcattaaggaaaaacagtcttggcaggtatataggaatagtggtttccagactggttgatgaccgtaatcaccaagaacagtggttctcagtcttggctgcacattgcagtgatctggaacttaaatactaattttaaaagggtgcagtggctcatacctgtaatcccagcactttgcaagtccgagatgggagaatcacttgagcccaggagtttgagaccagcctgggcaatgtagggagaccctgtccctacaaaaaatacaaaaattagccaagtgtggtggcttgcacctctggtctcagctacttgggatgctaaggcaggaggattacttgagccccagaggttgaggttgcagtgaaccatgatcacaccactgcattctagcctgggtgacagagtgagaccctctccctcctaaaaaaatccttaagaaatatattgatgcttggttcctttggtcagaattttgatttaaggtgttgggagtgtagcacagatgttggaataaacctctcaaactgattttaatatacaaacaaggtcgagaaccaccaaggaagagtttttatgcataaagattcctgtactctaccctagaactaatacatctgaatctctgggaatggagtataacaatcagatttgaaaaggtttctttagtaattttaaggactgaccagtttagacactgctttgttagagtaaaatgattaggtacctagtatcaacctagccatccaaccttatattaataactaggaaaataaagggttggagcctctgtgtttctttgttgaaaaatctgctactattattagatctgtgaaaacaattgaaaattcggttattatcaccttaaaagtacaaaacctatagattttgaaaatgtaattatttttctgtaggcatagttaaaaagattttgtaaatgttataaatcagtttctttataagcggtttatttagataaattttgttatactgacatgattcactaattttctaaatataaatggttcagctcttagttatttttaaactaatgacctgtgttatacttcctatttttaatgggcttttatgatgttttaggtttttttgaatcccgtgtccttcaagtgctttctaactttgagaggaagaaattgaccacctggactatggaactttggttgaatctggcgatgtggaacccatggatatggagggctgactatatacaccatgttttttcctggcacatcactcaactactattagctggcgagtcaactcacgttgttggaatgactagggacaactagacttcaagtgatctttcatcccaggaatataaatagtttctggaaaggacactgacaacttcaaagcaaaatgaagttctttctgttgcttttcaccattgggttctgctgggctcagtattccccaaatacacaacaaggacggacatctattgttcatctgtttgaatggcgatgggttgatattgctcttgaatgtgagcgatatttagctcccaagggatttggaggggttcaggtggataccaaccagttagctataaattatgcacaagatctggaaatgaagatgaatttagaaacatggtgacta

SEQ ID NO: 47145 - DNA, 2694 bp, Homo sapiens
atgcgcagtcgtgagtcctcttgtccttgagcgtcaaccttctttccctgaagtggctggggttcctgtttccttctttgattgacaacttgtgttaaccctcgcacatctctgggccaatttttgcttgtaagtctttccggagacccctggaatttaaatcattagcaccgcgcccttccccgaagagtcttcgaagggttgccgcttttcggtggcgcagttctcgcgagaaggtgactttctttctcggtatttcctggtttccagaatccttagcgcgaggcggaaaaaatatttctcccagcttgtgttgatgccgcgattttgactgagacttcttcccacgatttctgtttttgcttctccaaggaaaatggcagctcccgagcagccgcttgcgatatcaaggggatgcacgagctcctcctcgctttccccgcctcggggcgaccgaacccttctggtcaggcacctgccggctgagcttactgctgaggagaaagaggacttgctgaagtacttcggggctcagtctgtgcgggtcctgtcagataaggggcgactgaaacatacagcttttgccacattccctaatgaaaaagcagctataaaggcattgacaagactccatcaactgaaacttttaggtcatactttagtcgttgaatttgcaaaagagcaagatcgagttcactccccatgtcccacttcaggttctgaaaaaaaaaaaaggtctgatgaccctgtcgaagatgataaagaaaaaaaagaactgggttatttaacagtagaaaagggaatggcaccaaaccatgggctgacttttcctttaaattcatgcctcaagtatatgtacccaccaccttccagcacaatcctagcaaacattgtaaatgccttggcaagcgtgcctaagttctatgtacaggtccttcatcttatgaataaaatgaatttgcccacaccttttggaccaattactgcgcgacctcccatgtatgaagactatatgccattgcatgcacctcttccacccacatctcctcagccacctgaggaacctcctttgccagacgaggatgaggaattatctagtgaagaatcagaatatgaaagcactgatgatgaggaccgacagagaatgaacaaattaatggaactagcaaatcttcagcccaaaagacctaaaacaataaagcagcgccatgtgagaaaaaagagaaaaataaaggatatgttgaatacacctttgtgtccttcacacagcagtttacatccagtgctgttaccttcagatgtatttgaccaaccacaacctgtaggtaacaaaagaattgaattccatatatctaccgacatgccagctgcatttaagaaagatttagaaaaggaacaaaattgtgaggaaaaaaatcatgatttacctgctactgaagttgatgcatccaatataggatttggaaaaatcttccccaaacctaatttggacatcacagaggagattaaagaagactctgatgaaatgccttcagaatgtatttctagaagggaattggaaaagggcagaatttctagagaagaaatggaaacactttcagttttcagaagttatgaaccgggtgaaccaaactgtagaatttatgtaaagaatttagctaaacatgttcaagaaaaggtaggtataaattgattttttttcatgtaaatgaaaataatttgaaggttttatagttgatgtgttaaagtctgtttgaaactacctttaagaatgtggttttcttactgtgcttcagggcatgacaaattattgtttagtattttcaggttaattttttattaaaataatactctcatagcttgggttctctggcagtaaatactgagacagagtttgtggtatgtattaatttcctagggctaagtggctgaaacaacagagatgtgttgtctcacagttctggaggcaaactgaagtcaaaagtgtggcaggattggttcattctgagggctttgagtgaaggatctgttctgtgcctctcccatagcttctgctggtatgcagaagctggcgaactttcaccttccttggcttgtggaagcatcaccacaatttctgcctttgtacatagcatactccctttgtgagtatctgtccaaatttccccttttgaaaggccaccagtcatattagattaaagcctaccttagtccagtatgacctcttctactgatgcattgatgtatttatttatttattaagtttttttcccctggctttgttatttgtctttttcttattgaaattctaggaccttaaatatatttttggaagatatgttgacttttcatcagaaacacagcggatcatgtttgatatacgtttgatgaaagaaggtcgtatgaaaggacaagctttcattggacttcctaatgaaaaagcagcagcaaaagccttaaaggaagctaatggatatgtgctttttggaaaacccatggtggttgtatcctttaaatccatctatttcaaaactatataatttttagaaggatataactgaaattaattttcatgttaccctttagaaatttccacaattggcattctagcagtagatattcattcgttacaattaaacccaccttactgagtcagatgacagtgttatttagatttttaataaaagagcttca

SEQ ID NO: 47146 - DNA, 1525 bp, Homo sapiens
ggtacaattgtgaaatgtttactcttgttcttttaactgaaggcattgacaagactccatcaactgaaacttttaggtcatactttagtcgttgaatttgcaaaagagcaagatcgagttcactccccatgtcccacttcaggttcattgctgggcataattagtcatgcttgtaatcccaacaacttgggaggctgaggagggaggaccacttaagctcaggaatttgaggctgcagtgaaccgtgattgcatctctgcactccagcctgggtgacatagggagaccccaactcaacaggtcagagattgtcgtctggttggtcttcttgatcttgcactggagaaagattatgtgcgttccaagattgccgaatatatgaatcatctcattgacattggtgttgcagggttcagacttgatgcttccaagcacatgtggcctggagacataaaggcaattttggacaaactgcataatctaaacagtaactggttccctgcaggaagtaaacctttcatttaccaggaggtaattgatctgggtggtgagccaattaaaagcagtgactactttggaaatggccgggtgacagaattcaagtatggtgcaaaactcggcacagttattcgcaagtggaatggagagaagatgtcttacctaaagaactggggagaaggttggggtttcatgccttctgacagagcacttgtctttgtggataaccatgacaatcaacgaggacatggggctggaggagcctctattcttaccttctgggatgctaggctgtataaaatggcagttggatttatgcttgctcatccttatggttttacacgagtaatgtcaagctaccgttggccaagacagtttcaaaatggaaacgatgttaatgattgggttgggccaccaaataataatggagtaattaaagaagttactattaatccagacactacttgtggcaatgactgggtctgtgaacatcgatggcgccaaatacaggaacatggttaatttccgcaatgtagtggatggccagccttttacaaactggtatgataatgggagcaaccaagtggcttttgggagaggaaacagaggattcattgttttcaacaatgatgactgatggagtttcactcttgttgcccaggctgtggtgcaatggcacgatcctggctcactgcaatttccgcttcccgggttcaagggatcctgagatggggtttcttcgtgttaatcaggctggtctcaaactctcgacctcagttgatacgtctgcctcaggctcccaaagtgctgggattacaggcgtttctttggattcccatgtccttcaagtgctttgcaactttgagaagaagaaattgaccacctggactatggaactgtgcataacagctttgaaagtgtatttaaaaattaaatccatacgcctttaaatcagtaaattggaaatatattacatgtattgtaatgactttcctcagatataataaattgttttctttccaatgga

SEQ ID NO: 47147 - DNA, 758 bp, Homo sapiens
tgtattggtggtgctctctgtattggtgggctttggtaatgataggttgggtttggtttaaaggagaaggaagaggtaaatatatgtatgttaaaatttggcttttcaccccctaattaaggatgttaatgattgggttgggccaccaaataataatggagtaattaaagaagttactattaatccagacactacttgtggcaatgactgggtctgtgaacatcgatggcgccaaatacaggaacatggttaatttccgcaatgtagtggatggccagccttttacaaactggtatgataatgggagcaaccaagtggcttttgggagaggaaacagaggattcattgttttcaacaatgatgactgatggagtttcactcttgttgcccaggctgtggtgcaatggcacgatcctggctcactgcaatttccgcttcccgggttcaagggatcctgagatggggtttcttcgtgttaatcaggctggtctcaaactctcgacctcagttgatacgtctgcctcaggctcccaaagtgctgggattacaggcgtttctttggattcccatgtccttcaagtgctttgcaactttgagaagaagaaattgaccacctggactatggaactgtgcataacagctttgaaagtgtatttaaaaattaaatccatacgcctttaaatcagtaaattggaaatatattacatgtattgtaatgactttcctcagatataataaattgttttctttccaatgga

SEQ ID NO: 47148 - DNA, 1335 bp, Homo sapiens
atgcgcagtcgtgagtcctcttgtccttgagcgtcaaccttctttccctgaagtggctggggttcctgtttccttctttgattgacaacttgtgttaaccctcgcacatctctgggccaatttttgcttgtaagtctttccggagacccctggaatttaaatcattagcaccgcgcccttccccgaagagtcttcgaagggttgccgcttttcggtggcgcagttctcgcgagaaggtgactttctttctcggtatttcctggtttccagaatccttagcgcgaggcggaaaaaatatttctcccagcttgtgttgatgccgcgattttgactgagacttcttcccacgatttctgtttttgcttctccaaggaaaatggcagctcccgagcagccgcttgcgatatcaaggggatgcacgagctcctcctcgctttccccgcctcggggcgaccgaacccttctggtcaggcacctgccggctgagcttactgctgaggagaaagaggacttgctgaagtacttcggggctcagtctgtgcgggtcctgtcagataaggggcgactggtaagggcgcgcccctccggagtctcccgggaaggcatttgggaagtgaccggggagggggagcgctgacaagagtaaaatggaaacgagtggggaagatggacttgtgtgatgagagctcccccatcctacctcttttttatcaaaatatctgctctgcgaagtggagttttaatcggctcgagtctggattagtcatagcactgcagaaaagggcaagtgagaacgacaaagcagaagaatggaaattagcttagttatattgagttttcggatccatcctgagagcctcacaacttttttgaatttggggttatttctcctggactcaagagtattcttacaaatgtgcatcaagggattttttaaagtcctacttcatttataagccaatgttaaatcgttcattaaaatagaggagaagctacattggtgacttgcgtaaattaaatgcagaatttcaactagaaaaagaggcttttcataaaaatttcccgatgacatcttttagggaacaattttttagggctgttaagagtacctgtgtaggaatttacacaattactttgttttgctttatatccaaagatattttagatttctcttcattaaaataggaatagcgatggtgcaagactcagtggttttaaagtttccctaggtgattttaatgttaatgtgcagcccaagttgagagttactgaattagaagaaagaccaattttgatcagtttaaatgtcacttatgcctgcaaattaaaaaaaaa

SEQ ID NO: 47149 - DNA, 721 bp, Homo sapiens
tgcttaggaaacagaagtgtggtgatcaacctgttgtaatactggagttcagagaagattccttgtacaaatctgatttggagaattggagtaggactctagggccacatattgaaagtaagaggttatagaaaatctataagattctaaattcagcaattttttttccaactgaagaaaaagcaaaaccagaactgtgagatttttattttatgattgtaaaacactcaactgtgggtttgggagattgctgattgagagaagttaatgtgttggttgaatctggcgatgtggaacccatggatatggagggctgactatatacaccatgttttttcctggcacatcactcaactactattagctggcgagtcaactcacgttgttggaatgactagggacaactagacttcaagtgatctttcatcccaggaatataaatagtttctggaaaggacactgacaacttcaaagcaaaatgaagttctttctgttgcttttcaccattgggttctgctgggctcagtattccccaaatacacaacaaggacggacatctattgttcatctgtttgaatggcgatgggttgatattgctcttgaatgtgagcgatatttagctcccaagggatttggaggggttcaggtggataccaaccagttagctataaattatgcacaagatctggaaatgaagatgaatttagaaacatggtgacta

SEQ ID NO: 47150 - DNA, 609 bp, Homo sapiens
tttgggaggctgcggcagggggattgcttgaggccaggagtttgggaccatcctggacgacatagcaagaccctgtctctaaaaaacaaaacaaaacaagacaaaaagaaataataaatagcttaatttattaataaataacaaatagcataaagctatttttatataatattaacttattggttaaaatgctttaaagtccttacacaaaatgttattgtttcctaaatttctactaggtaattgatctgggtggtgagccaattaaaagcagtgactactttggtaatggccgggtgacagaattcaagtatggtgcaaaactcggcacagttattcgcaagtggaatggagagaagatgtcttacttaaagtaaataaatacaacttttccctgaagtatttcatggatctattagtcatactacctcagtgtgacttatcttctggaacattcttattcagacaactatcaaagagtcaattgtgaatgataagtattctagtgccctaaactctaatcaatcatcttttgtatttagagtgtctgtcacaaggcaatatgcctaggaacgctaaacataccctaggagttttcatctaagtacg

SEQ ID NO: 47151 - DNA, 2148 bp, Homo sapiens
atgcgcagtcgtgagtcctcttgtccttgagcgtcaaccttctttccctgaagtggctggggttcctgtttccttctttgattgacaacttgtgttaaccctcgcacatctctgggccaatttttgcttgtaagtctttccggagacccctggaatttaaatcattagcaccgcgcccttccccgaagagtcttcgaagggttgccgcttttcggtggcgcagttctcgcgagaaggtgactttctttctcggtatttcctggtttccagaatccttagcgcgaggcggaaaaaatatttctcccagcttgtgttgatgccgcgattttgactgagacttcttcccacgatttctgtttttgcttctccaaggaaaatggcagctcccgagcagccgcttgcgatatcaaggggatgcacgagctcctcctcgctttccccgcctcggggcgaccgaacccttctggtcaggcacctgccggctgagcttactgctgaggagaaagaggacttgctgaagtacttcggggctcagtctgtgcgggtcctgtcagataaggggcgactgaaacatacagcttttgccacattccctaatgaaaaagcagctataaaggcattgacaagactccatcaactgaaacttttaggtcatactttagtcgttgaatttgcaaaagagcaagatcgagttcactccccatgtcccacttcaggttctgaaaaaaaaaaaaggtctgatgaccctgtcgaagatgataaagaaaaaaaagaactgggttatttaacagtagaaaagggaatggcaccaaaccatgggctgacttttcctttaaattcatgcctcaagtatatgtacccaccaccttccagcacaatcctagcaaacattgtaaatgccttggcaagcgtgcctaagttctatgtacaggtccttcatcttatgaataaaatgaatttgcccacaccttttggaccaattactgcgcgacctcccatgtatgaagactatatgccattgcatgcacctcttccacccacatctcctcagccacctgaggaacctcctttgccagacgaggatgaggaattatctagtgaagaatcagaatatgaaagcactgatgatgaggaccgacagagaatgaacaaattaatggaactagcaaatcttcagcccaaaagacctaaaacaataaagcagcgccatgtgagaaaaaagagaaaaataaaggatatgttgaatacacctttgtgtccttcacacagcagtttacatccagtgctgttaccttcagatgtatttgaccaaccacaacctgtaggtaacaaaagaattgaattccatatatctaccgacatgccagctgcatttaagaaagatttagaaaaggaacaaaattgtgaggaaaaaaatcatgatttacctgctactgaagttgatgcatccaatataggatttggaaaaatcttccccaaacctaatttggacatcacagaggagattaaagaagactctgatgaaatgccttcagaatgtatttctagaagggaattggaaaagggcagaatttctagagaagaaatggaaacactttcagttttcagaagttatgaaccgggtgaaccaaactgtagaatttatgtaaagaatttagctaaacatgttcaagaaaaggaccttaaatatatttttggaagatatgttgacttttcatcagaaacacagcggatcatgtttgatatacgtttgatgaaagaaggtcgtatgaaaggacaagctttcattggacttcctaatgaaaaagcagcagcaaaagccttaaaggaagctaatggatatgtgctttttggaaaacccatggtggttcagtttgctcgatctgctagaccaaaacaagatcctaaggaaggaaaaagaaagtgttaaaaattaataaaggtttttttgaatcccgtgtccttcaagtgctttctaactttgagaggaagaaattgaccacctggactatggaactgtgcgtaacagctttgaaagtgtatttaaaaattaaatctatatgcctttaaatcagtgaattggaaacatattacatgtattttaatgattttcctcaaatataataaattgtttcctttccaataaaa

SEQ ID NO: 47152 - DNA, 5530 bp, Homo sapiens
atgcgcagtcgtgagtcctcttgtccttgagcgtcaaccttctttccctgaagtggctggggttcctgtttccttctttgattgacaacttgtgttaaccctcgcacatctctgggccaatttttgcttgtaagtctttccggagacccctggaatttaaatcattagcaccgcgcccttccccgaagagtcttcgaagggttgccgcttttcggtggcgcagttctcgcgagaaggtgactttctttctcggtatttcctggtttccagaatccttagcgcgaggcggaaaaaatatttctcccagcttgtgttgatgccgcgattttgactgagacttcttcccacgatttctgtttttgcttctccaaggaaaatggcagctcccgagcagccgcttgcgatatcaaggggatgcacgagctcctcctcgctttccccgcctcggggcgaccgaacccttctggtcaggcacctgccggctgagcttactgctgaggagaaagaggacttgctgaagtacttcggggctcagtctgtgcgggtcctgtcagataaggggcgactgaaacatacagcttttgccacattccctaatgaaaaagcagctataaaggcattgacaagactccatcaactgaaacttttaggtcatactttagtcgttgaatttgcaaaagagcaagatcgagttcactccccatgtcccacttcaggttctgaaaaaaaaaaaaggtctgatgaccctgtcgaagatgataaagaaaaaaaagaactgggttatttaacagtagaaaagggaatggcaccaaaccatgggctgacttttcctttaaattcatgcctcaagtatatgtacccaccaccttccagcacaatcctagcaaacattgtaaatgccttggcaagcgtgcctaagttctatgtacaggtccttcatcttatgaataaaatgaatttgcccacaccttttggaccaattactgcgcgacctcccatgtatgaagactatatgccattgcatgcacctcttccacccacatctcctcagccacctgaggaacctcctttgccagacgaggatgaggaattatctagtgaagaatcagaatatgaaagcactgatgatgaggaccgacagagaatgaacaaattaatggaactagcaaatcttcagcccaaaagacctaaaacaataaagcagcgccatgtgagaaaaaagagaaaaataaaggatatgttgaatacacctttgtgtccttcacacagcagtttacatccagtgctgttaccttcagatgtatttgaccaaccacaacctgtaggtaacaaaagaattgaattccatatatctaccgacatgccagctgcatttaagaaagatttagaaaaggaacaaaattgtgaggaaaaaaatcatgatttacctgctactgaagttgatgcatccaatataggatttggaaaaatcttccccaaacctaatttggacatcacagaggagattaaagaagactctgatgaaatgccttcagaatgtatttctagaagggaattggaaaagggcagaatttctagagaagaaatggaaacactttcagttttcagaagttatgaaccgggtgaaccaaactgtagaatttatgtaaagaatttagctaaacatgttcaagaaaaggaccttaaatatatttttggaagatatgttgacttttcatcagaaacacagcggatcatgtttgatatacgtttgatgaaagaaggtcgtatgaaaggacaagctttcattggacttcctaatgaaaaagcagcagcaaaagccttaaaggaagctaatggatatgtgctttttggaaaacccatggtggttcagtttgctcgatctgctagaccaaaacaagatcctaaggaaggaaaaagaaagtgttaaaaattaataaagaagcattcctgcgtaaatactgctgtaatactgtcatgcaaagtgtatcctttcttgtcgtatcctttttggggcagtgtttttttgtttttttcctagaaatgtttgtccttcccccacctgttgatccaggttaaggaatacttttttacactttattcaaatgaaatatttctaaaattatttgtatagactgaacagatcttttatgtgtttttagatttgttgttgaattttctgtgctgtcctttatataattttttgagggaaagttagtgaatcaggtcaacttacttagagaatgtgttcatttactttaacccagaatacagtcttgtttcttctatttgtatgtttcctaaacctaattcaataacatatgctttctgttgtgtaatatatctggtttaggtatttataatgtgtttaaaatttgggcaaaggaaatgtttttcttttaaaaagtacttacattgaaaattaagatgtctggattactatgtaaattctagagagtagcagacctctcatctgaagtcttagtgaatctcttttgacatagatagcaatagaagtatctttcttctttcccctttctttttctaaacaagagaagaaaagcgtaatagaggggagaacacataatgcccactaagggtagtgcattaaggaaaaacagtcttggcaggtatataggaatagtggtttccagactggttgatgaccgtaatcaccaagaacagtggttctcagtcttggctgcacattgcagtgatctggaacttaaatactaattttaaaagggtgcagtggctcatacctgtaatcccagcactttgcaagtccgagatgggagaatcacttgagcccaggagtttgagaccagcctgggcaatgtagggagaccctgtccctacaaaaaatacaaaaattagccaagtgtggtggcttgcacctctggtctcagctacttgggatgctaaggcaggaggattacttgagccccagaggttgaggttgcagtgaaccatgatcacaccactgcattctagcctgggtgacagagtgagaccctctccctcctaaaaaaatccttaagaaatatattgatgcttggttcctttggtcagaattttgatttaaggtgttgggagtgtagcacagatgttggaataaacctctcaaactgattttaatatacaaacaaggtcgagaaccaccaaggaagagtttttatgcataaagattcctgtactctaccctagaactaatacatctgaatctctgggaatggagtataacaatcagatttgaaaaggtttctttagtaattttaaggactgaccagtttagacactgctttgttagagtaaaatgattaggtacctagtatcaacctagccatccaaccttatattaataactaggaaaataaagggttggagcctctgtgtttctttgttgaaaaatctgctactattattagatctgtgaaaacaattgaaaattcggttattatcaccttaaaagtacaaaacctatagattttgaaaatgtaattatttttctgtaggcatagttaaaaagattttgtaaatgttataaatcagtttctttataagcggtttatttagataaattttgttatactgacatgattcactaattttctaaatataaatggttcagctcttagttatttttaaactaatgacctgtgttatacttcctatttttaatgggcttttatgatgttttaggtttttttgaatcccgtgtccttcaagtgctttctaactttgagaggaagaaattgaccacctggactatggaactttggttgaatctggcgatgtggaacccatggatatggagggctgactatatacaccatgttttttcctggcacatcactcaactactattagctggcgagtcaactcacgttgttggaatgactagggacaactagacttcaagtgatctttcatcccaggaatataaatagtttctggaaaggacactgacaacttcaaagcaaaatgaagttctttctgttgcttttcaccattgggttctgctgggctcagtattccccaaatacacaacaaggacggacatctattgttcatctgtttgaatggcgatgggttgatattgctcttgaatgtgagcgatatttagctcccaagggatttggaggggttcaggtctctccaccaaatgaaaatgttgcaattcacaaccctttcagaccttggtgggaaagataccaaccagttagctataaattatgcacaagatctggaaatgaagatgaatttagaaacatggtgactagatgtaacaatgttggggttcgtatttatgtggatgctgtaattaatcatatgtctggtaatgctgtgagtgcaggaacaagcagtacctgtggaagttacttcaaccctggaagtagggactttccagcagtcccatattctggatgggatttcaatgatggtaaatgtaaaactggaagtggagatatcgagaactacaatgatgctactcaggtcagagattgtcgtctgactggtcttcttgatcttgcactggagaaggattacgtgcgttctaagattgccgaatatatgaaccatctcattgacattggtgttgcagggttcagacttgatgcttccaagcacatgtggcctggagacataaaggcaattttggacaaactgcataatctaaacagtaactggttccctgcaggaagtaaacctttcatttaccaggaggtaattgatctgggtggtgagccaattaaaagcagtgactactttggaaatggccgggtgacagaattcaagtatggtgcaaaactcggcacagttattcgcaagtggaatggagagaagatgtcttacctaaagaactggggagaaggttggggtttcatgccttctgacagagcacttgtctttgtggataaccatgacaatcaacgaggacatggggctggaggagcctctattcttaccttctgggatgctaggtagaaaaccaagttctctattttttttaacacatcttttaatgatggtaatgatattctgatattctgtgataatataattatgtaactttcaggctgtataaaatggcagttggatttatgcttgctcatccttatggttttacacgagtaatgtcaagctaccgttggccaagacagtttcaaaatggaaacgaacatggttaatttccgcaatgtagtggatggccagccttttacaaactggtatgataatgggagcaaccaagtggcttttgggagaggaaacagaggattcattgttttcaacaatgatgactggacattttctttaactttgcaaactggtcttcctgctggcacatactgtgatgtcatttctggagataaaattaatggcaattgcacaggcattaaaatctacgtttctgacgatggcaaagctcatttttctattagtaactctgctgaggatccatttattgcaattcatgctgaatctaaattataaaatttaaaattaaatgcatatcctcaaaacaata

SEQ ID NO: 47153 - DNA, 3696 bp, Homo sapiens
atgcgcagtcgtgagtcctcttgtccttgagcgtcaaccttctttccctgaagtggctggggttcctgtttccttctttgattgacaacttgtgttaaccctcgcacatctctgggccaatttttgcttgtaagtctttccggagacccctggaatttaaatcattagcaccgcgcccttccccgaagagtcttcgaagggttgccgcttttcggtggcgcagttctcgcgagaaggtgactttctttctcggtatttcctggtttccagaatccttagcgcgaggcggaaaaaatatttctcccagcttgtgttgatgccgcgattttgactgagacttcttcccacgatttctgtttttgcttctccaaggaaaatggcagctcccgagcagccgcttgcgatatcaaggggatgcacgagctcctcctcgctttccccgcctcggggcgaccgaacccttctggtcaggcacctgccggctgagcttactgctgaggagaaagaggacttgctgaagtacttcggggctcagtctgtgcgggtcctgtcagataaggggcgactgaaacatacagcttttgccacattccctaatgaaaaagcagctataaaggcattgacaagactccatcaactgaaacttttaggtcatactttagtcgttgaatttgcaaaagagcaagatcgagttcactccccatgtcccacttcaggttctgaaaaaaaaaaaaggtctgatgaccctgtcgaagatgataaagaaaaaaaagaactgggttatttaacagtagaaaagggaatggcaccaaaccatgggctgacttttcctttaaattcatgcctcaagtatatgtacccaccaccttccagcacaatcctagcaaacattgtaaatgccttggcaagcgtgcctaagttctatgtacaggtccttcatcttatgaataaaatgaatttgcccacaccttttggaccaattactgcgcgacctcccatgtatgaagactatatgccattgcatgcacctcttccacccacatctcctcagccacctgaggaacctcctttgccagacgaggatgaggaattatctagtgaagaatcagaatatgaaagcactgatgatgaggaccgacagagaatgaacaaattaatggaactagcaaatcttcagcccaaaagacctaaaacaataaagcagcgccatgtgagaaaaaagagaaaaataaaggatatgttgaatacacctttgtgtccttcacacagcagtttacatccagtgctgttaccttcagatgtatttgaccaaccacaacctgtaggtaacaaaagaattgaattccatatatctaccgacatgccagctgcatttaagaaagatttagaaaaggaacaaaattgtgaggaaaaaaatcatgatttacctgctactgaagttgatgcatccaatataggatttggaaaaatcttccccaaacctaatttggacatcacagaggagattaaagaagactctgatgaaatgccttcagaatgtatttctagaagggaattggaaaagggcagaatttctagagaagaaatggaaacactttcagttttcagaagttatgaaccgggtgaaccaaactgtagaatttatgtaaagaatttagctaaacatgttcaagaaaaggaccttaaatatatttttggaagatatgttgacttttcatcagaaacacagcggatcatgtttgatatacgtttgatgaaagaaggtcgtatgaaaggacaagctttcattggacttcctaatgaaaaagcagcagcaaaagccttaaaggaagctaatggatatgtgctttttggaaaacccatggtggttcagtttgctcgatctgctagaccaaaacaagatcctaaggaaggaaaaagaaagtgttaaaaattaataaagaagcattcctgcgtaaatactgctgtaatactgtcatgcaaagtgtatcctttcttgtcgtatcctttttggggcagtgtttttttgtttttttcctagaaatgtttgtccttcccccacctgttgatccaggttaaggaatacttttttacactttattcaaatgaaatatttctaaaattatttgtatagactgaacagatcttttatgtgtttttagatttgttgttgaattttctgtgctgtcctttatataattttttgagggaaagttagtgaatcaggtcaacttacttagagaatgtgttcatttactttaacccagaatacagtcttgtttcttctatttgtatgtttcctaaacctaattcaataacatatgctttctgttgtgtaatatatctggtttaggtatttataatgtgtttaaaatttgggcaaaggaaatgtttttcttttaaaaagtacttacattgaaaattaagatgtctggattactatgtaaattctagagagtagcagacctctcatctgaagtcttagtgaatctcttttgacatagatagcaatagaagtatctttcttctttcccctttctttttctaaacaagagaagaaaagcgtaatagaggggagaacacataatgcccactaagggtagtgcattaaggaaaaacagtcttggcaggtatataggaatagtggtttccagactggttgatgaccgtaatcaccaagaacagtggttctcagtcttggctgcacattgcagtgatctggaacttaaatactaattttaaaagggtgcagtggctcatacctgtaatcccagcactttgcaagtccgagatgggagaatcacttgagcccaggagtttgagaccagcctgggcaatgtagggagaccctgtccctacaaaaaatacaaaaattagccaagtgtggtggcttgcacctctggtctcagctacttgggatgctaaggcaggaggattacttgagccccagaggttgaggttgcagtgaaccatgatcacaccactgcattctagcctgggtgacagagtgagaccctctccctcctaaaaaaatccttaagaaatatattgatgcttggttcctttggtcagaattttgatttaaggtgttgggagtgtagcacagatgttggaataaacctctcaaactgattttaatatacaaacaaggtcgagaaccaccaaggaagagtttttatgcataaagattcctgtactctaccctagaactaatacatctgaatctctgggaatggagtataacaatcagatttgaaaaggtttctttagtaattttaaggactgaccagtttagacactgctttgttagagtaaaatgattaggtacctagtatcaacctagccatccaaccttatattaataactaggaaaataaagggttggagcctctgtgtttctttgttgaaaaatctgctactattattagatctgtgaaaacaattgaaaattcggttattatcaccttaaaagtacaaaacctatagattttgaaaatgtaattatttttctgtaggcatagttaaaaagattttgtaaatgttataaatcagtttctttataagcggtttatttagataaattttgttatactgacatgattcactaattttctaaatataaatggttcagctcttagttatttttaaactaatgaccgatatcgtgggtaccagctcgattcgtatcatgtctaa

SEQ ID NO: 47154 - DNA, 2099 bp, Homo sapiens
atgcgcagtcgtgagtcctcttgtccttgagcgtcaaccttctttccctgaagtggctggggttcctgtttccttctttgattgacaacttgtgttaaccctcgcacatctctgggccaatttttgcttgtaagtctttccggagacccctggaatttaaatcattagcaccgcgcccttccccgaagagtcttcgaagggttgccgcttttcggtggcgcagttctcgcgagaaggtgactttctttctcggtatttcctggtttccagaatccttagcgcgaggcggaaaaaatatttctcccagcttgtgttgatgccgcgattttgactgagacttcttcccacgatttctgtttttgcttctccaaggaaaatggcagctcccgagcagccgcttgcgatatcaaggggatgcacgagctcctcctcgctttccccgcctcggggcgaccgaacccttctggtcaggcacctgccggctgagcttactgctgaggagaaagaggacttgctgaagtacttcggggctcagtctgtgcgggtcctgtcagataaggggcgactgaaacatacagcttttgccacattccctaatgaaaaagcagctataaaggcattgacaagactccatcaactgaaacttttaggtcatactttagtcgttgaatttgcaaaagagcaagatcgagttcactccccatgtcccacttcaggttcattgctgggcataattagtcatgcttgtaatcccaacaacttgggaggctgaggagggaggaccacttaagctcaggaatttgaggctgcagtgaaccgtgattgcatctctgcactccagcctgggtgacatagggagaccccaactcaacaggtcagagattgtcgtctggttggtcttcttgatcttgcactggagaaagattatgtgcgttccaagattgccgaatatatgaatcatctcattgacattggtgttgcagggttcagacttgatgcttccaagcacatgtggcctggagacataaaggcaattttggacaaactgcataatctaaacagtaactggttccctgcaggaagtaaacctttcatttaccaggaggtaattgatctgggtggtgagccaattaaaagcagtgactactttggaaatggccgggtgacagaattcaagtatggtgcaaaactcggcacagttattcgcaagtggaatggagagaagatgtcttacctaaagaactggggagaaggttggggtttcatgccttctgacagagcacttgtctttgtggataaccatgacaatcaacgaggacatggggctggaggagcctctattcttaccttctgggatgctaggctgtataaaatggcagttggatttatgcttgctcatccttatggttttacacgagtaatgtcaagctaccgttggccaagacagtttcaaaatggaaacgatgttaatgattgggttgggccaccaaataataatggagtaattaaagaagttactattaatccagacactacttgtggcaatgactgggtctgtgaacatcgatggcgccaaatacaggaacatggttaatttccgcaatgtagtggatggccagccttttacaaactggtatgataatgggagcaaccaagtggcttttgggagaggaaacagaggattcattgttttcaacaatgatgactgatggagtttcactcttgttgcccaggctgtggtgcaatggcacgatcctggctcactgcaatttccgcttcccgggttcaagggatcctgagatggggtttcttcgtgttaatcaggctggtctcaaactctcgacctcagttgatacgtctgcctcaggctcccaaagtgctgggattacaggcgtttctttggattcccatgtccttcaagtgctttgcaactttgagaagaagaaattgaccacctggactatggaactgtgcataacagctttgaaagtgtatttaaaaattaaatccatacgcctttaaatcagtaaattggaaatatattacatgtattgtaatgactttcctcagatataataaattgttttctttccaatgga

SEQ ID NO: 47155 - DNA, 460 bp, Homo sapiens
agacagttcttgagtttgaaaactgccgttgttgatcaaacttcaattttataaagaatgcaaatttgggagaagtgacttgtctagggccatatgccagttagtgattgacatggggctgcaactcagatcttaagcttagaggcaaagattttaaacagggctggaaaaagatcaggtttacatatcttaaaagattgaactgagacaatggatgagggcaggaggggctgagactggcacctgcaggatcagtaggagactatgtgagatcctgaacccaggcgctagaaaggagggctgtcactaaatagccattatcaaataggtaggtttgataagacttggtcacctctagaagtgggaagaatatgggaggtcgaggcaggagaatcgcttgagcccaggagttcaagtccagccctggcaacttagtgagaccccgccgtctctacaatta

SEQ ID NO: 47156 - DNA, 771 bp, Homo sapiens
aggggcacttacattttgtgaagtcgtaggtaccattattaggtaactctgaacgctggagaagtcttatgttcaatcaaaaatccacctcattgcaccttccaatgattggtcccagtcctgccctgtactttctctaagctctaaacttgggagaaggggagaattcctcttttataaagagatgaaaagatgtttgagctggactttgtaaaatgtttagaatttttagggagtggtgtcaccacaccaccagatcctcggaaaaatacattgcatattccttctttatgcagattctagagtaggaagttttcgtctctctcatccaaatatgccaaggaatttagcaaattttcagtctttcagggacatctgccaacaattaccaataaatcaacgttagcataccttatgggaggagagagaaggaactagaagtttcatggttttatttccttctctgatggtgtggtaggaaggaagattaactggtttgatctgaagccttactgggtataaatctcttagatacctggcccagattaactgaattatcccagtattgagcatacaggttgtcaagggtacttgtatcacattgatttgcctaataaccctaatctgactgcaacctcctccaactgtaattaggaggttccattgtccttctcttgcaagttctaacatgttatgttcccatcttcattcgaaacggcctgagttgcatgataatatctcaagctgccaaaggccacagcttctttatta

SEQ ID NO: 47157 - DNA, 2288 bp, Homo sapiens
tagctgatcactgatctcctctgcactctcaatatggacacactgatgactagaccagctcaggcattggaaataattggacccggactcagtttacagagggtgcacgatcattcagaatttaagagacttgttttgcttggagcaaaaagcagtatcctccctttacagatacgtctttggcattcatagtagcgaatttctggggccagagaggtgcacacagcttgccaagtgataatgtggttttggtgacagcctttactgcaacactcactggcctcatttgatgaatcactttttaaaccaagtttcagggtgttgtgcttaatgtatacagcttaagagttaagagaccaagaatatatactgtcttcagctttctcacttgattttgtttttattttgcaaagttggtgtaaggctgccctctaaatataaagtacatctttttttttttttgtaaatagctaaattatatgcaatttcagtgtaatttttctgatagcactaaaatatgttgtggccagctctgaatttctgaaatattgtttttataaaatcagcacacccacgctctttctcctttcctttttactgtatgtcttgtttaccgggtttggggaaggtataggaacttaaagtatttttaactagagaagttaaatgtaaaagtgcatcaaaacaaatgggggtgactgaaattttaagcattgatggaggcatggggaaaacatgactttatctgtctaaaggacattccctgatgaaggactgtttggacagggattgtaaatttcagcaagctttttagaaagatgctttacaatgcaagggtaaagagaggtcattatgtatgaacatgaaaagagaacataatgttgttaaatgaaaaatggagtttacaggataacataggttgattcctttttgtaagtatttttcttacagcttttaaaatattcaagcaaggagttagtgactggtgtctctggctgttttggcggtgggatgtatttatatggactctaacagaatgtcagatgtgtggcaagggctcagaatggtggtggtgcttgttgatagagattttagcagaatcactaacaggctacgaagaagtaaatcttggttgtcttttgttcatggagatgttttttatttgccaatattcgtagtttgattactctgtgattctcctgcattttgcatttacatagagaggataggagtagttctcagggtgtatactgtcttgtttttctgttggaacagagttcttgatttgccttaattagtcctctaacaatctgcaaaggtcagtgccaattgcctgttcatttacatttgtaattgtgatggcttctgattacatattccttgtcttagtccatcctaagtatatgctagtgtgtcctccccactacccgctacacacacacacacacacacacacacacacacacacacacacacacacacacacacacacacaccccagagtggtgtgaaggccaaaaatctgactcctcatagaagaaacctttgtagcgactgcccagcctcactggcacttcagtgtctgttctggaaagccatcttggagacgctattgcttctaagttagggatataatgaagccagagtcagggaaattacgtcgataccaggcaagaaatctgagagccattatctaggagccttgttgaactgagtaattaagggcaattaaacttttctgcttgctctctgcaaaatatgctaatgatctggtctgctggaaggtggacatatgcagtgctgtttcactgctgtcagacgctgctgccctggaaggtccccctggagaaggtgtggcatcaccaggatggtcaggtgggcagtgggttgagcgtgcagcctcgtacccagcctcctgtgtcctggctggctgttccaggacttgcaccttttcagcagttatctagacctggccgcagtggcctgagttgcagtgattcgtattcactcattctttgatgttctagatccaccattcattcgttgcgttatttttctgggatgatgaagctaccagggttttgtgcgtgttgtttcagcatatgacacgtggcaccagctgtacactgcccttctggttagtgttgttcttggtcaagggctccaggctgtcttccatgctatcttcatgagtgggtggcagcacgtgcccaacgctgcccactgggagaagcattgatactgtggccactcactgcagagagggttttttttggcacagcaaaaaa

SEQ ID NO: 47158 - DNA, 420 bp, Homo sapiens
ctcaactgttaccttactaattcagtgtttctataaaaattttagtttatgagatgacattatcaaagtgatctaataaataagtatgccaattagactggtgagctatagattcttcattttcactttaacattaaaaatataattttcagtatggcttggtgctatggactgaatatttgtatcctccccaaattcctatgttgaaatcataccccaaggtgcagttattaggaggtgaggcctttgggaggtgattaggtcttgaaggcagagcagggtaacattagtggccttgtaagagagaccacagagagctagccagcttcttctaccatgtaaggacacagcaacagggcaccttctatgaggaacaggccctcaccagacactgaatctaccagcaccctgatcttggac

SEQ ID NO: 47159 - DNA, 111 bp, Homo sapiens
tccagtaaccaacctcaaagaaatggagatctgcgaattgctagacaaataatttaattgttttaagaaagctcagtgcgtgaacccgggaggcggagcttgcagtgagcc

SEQ ID NO: 47160 - DNA, 859 bp, Homo sapiens
gggagaggataaacatcaaattcagagtgctggttacttctgaggaggcggagagggaagtggatcaggaggatgcatccagggtactgcagtgttttaattctcaagctggatgctggacacacagatgtttattatcttattttctagatatttttatgtgactgaaatatttcgtaaataaacagaacttttgttattgtaggctaattcatctcaattttggcatgtttttctgtgatttcacatccggttatttcccaagccttatttactccttattgcattgcattgtccatccatcatccgccgtttttccatttttacacaagttattcttttgtaatgtcctcctacctggtcttcctccctatgtgcttcccacccttcagtctatatcagtcctccagaatgacagctttgatggtatcagtaactggccagaagtcgtcagtagctctgtttatttacagaatattgttctcttcattagcatggaattcaggagcctctgtggtttggcttccaccctgcatttccatatttcccatgattctcccttgccacagtatgagaacttcccctgctttcccatcttgatatccttgcttatgttcctctttcagggagtgcccttccacccttacctgtttccagtcctgcccaggcatgttcatgagcagagtttgggagaacttttttcaaagttgagtaatatctggatccctaataaaacagttcttatggattcctaatattgatttaaatgtattgcaaaatcacttcaatatacaaaactatgaaaacatataattaagtagaaaaatgtttctcacttctagataaccacaaagccaaa

SEQ ID NO: 47161 - DNA, 448 bp, Homo sapiens
attcggcaccgaagaagatggcacaatagaagatgacttgttcttcatcgtccttgtcagccgacggctgcagcgtttgagaacatcaaaactggagtcaaatgatcagaatcacacactctagtagccagataggaccaagtaagtgacgacccattctgccacggagatatcagggagggtccagaggcaatgagtccatctgaggacccccttttctttcagtcaccatgaggtctcgtaagctgcactcttactgctgactgctattcacttgatacacgtggtctggccatactggtaatttatgacaaaagtctcttctagttaataccagttgttaaatattagcattgtgaatattgttcctccatgtatcccatattccctgaagctctcttagagggaaagcctgaactctcaaacacagagaattttattcaaagag

SEQ ID NO: 47162 - DNA, 317 bp, Homo sapiens
ctaaggtcatggggtgagggactgtgaagcactgataaaattcacagtccagggctcaggctcaccaaaatctgagacctaatcatagaatgagtccttcccgtttcaccttaccaacacatagctaagggcttattaaaaaaaaacaaaacatagtttcttttacccagtgcatcatgttcacctttcaacacaaaattaaaaggcatactgcaaggaaaagaaactacagtttaaagagactgaataagcatcaaaccagagtcagatatggcagaaaggttggaattatcattctaggaatttttcaaactatg

SEQ ID NO: 47163 - DNA, 169 bp, Homo sapiens
agactcctctgagagaatggcatgagagcaggtctcttgtgattgggacgagaatagaagagaggcataatacacggtacattagccttcttttccttaaggaagtgtcatactgagggtcctggcaagcattagaaccggagggatagggtgccaaatggaaatggag

SEQ ID NO: 47164 - DNA, 636 bp, Homo sapiens
caatcccatatttcattaaattctcctgaagtaaataggatttgtaggtagcctcatgagatgattttatcgttaagcttatgtataaatcagtagttggatttccaagtaaaatggagactgttgtaattgtagtaaacatggccctttttcctgtgtgcgtgttgctgttggaattcagagtctctcctcccaccctgggacctcagagatggtctgtccgtgcagcctccacaccccagtgttcgcaacggtagtggcaatatgaatcaatatctccttcggggtggtttgatttaatcagggacgtgaataaattaaactccctgaagacctagtaaaatgccataaaaattacttttggtcataatgatgtgcaattaattgtaaaatacttctttaatttatttagctttatgaggccaaatcaataaatgttttgcaacagacagatgatgtcagaatgtttttcacaaagataactttattaaaaattctatgtacatttattttttcaacattatattttctttccttggataaattgttgtcccttcaccaatgtctttgttgtggtactactatattatgaaagcctttcattttattaaaaacgaaatgaggcagcagattctt

SEQ ID NO: 47165 - DNA, 1080 bp, Homo sapiens
gaaagggctcctcatctcctgattgctaattaactttatctccttgaatcaagggagctaaaggaagtctctgaattagaaacctttgtggtgaggggtaaaggaactttggtaagaggatataatcaaaaatatgatgattaaagaaagatgattaaagcttggaaagcaagtcactaacttattaacagtggctatctttaagggatgggattagtaaagattttcatttccattttatacatttctatattgccaaattttacaacaagcttatagtacttagaaagttggaagaaaaaccggccgtgcacgatggctcacgcctttaatcccagcactctgggaggccgaggtgggcagatcacctgaggtcaggagttcgagaccagcctggccaacatgatgaaactccatctctactaaaaaatacaaaaattagctggtggcgggtgcctgtaatcccagcaacctgggaggctgaggcaggagaagtgctagaacctggaaggcagaggctgcagtgagccgagatcatgccactgcactccagcctgggcgacacagcgagaatccatcgcaaaaaaaaaaaaaagaaaaaaaaagaaagaaagaaagttagaagaaaaaaccaaaaagatgacctggggagaggggaagaacttctggaataatgaagtgagaagcttggcaaaacctctcctcaaaaagtaacaacaaaactagacaagtcggtcaaaaacaaccaccacagggttggaaatcaaccaaagacatacaaaaaattgaaaaatgtttattcaagaaaaactacgcagctgggcatggtggctcccacctgcaattgtagcactttgggaggccgaggcaggaggattgcttgaggctgggagtcagagaccagcctgggcaacatatcaagaccccgtctcaacgaaaaacaaaaaagtcagcctggcgtggtgatgcacacctgtagtctcagccactcaggaggctgaggtgggaaaatctcttgagcctgggagcttgaggttacagtgaactatgattgtgccactgcacgccagcttgagtgac

SEQ ID NO: 47166 - DNA, 412 bp, Homo sapiens
gggattacaggcgtggccccgttgccaggccaaaatatagttatttaatttaacaaatacttccttaagcataatagtccattaaagcaaataataaattaagtactaattattacctacttctccaaacttgtaatcaaataatttctttgtaatcaaacattactgactcttccattttaagtggtcctttatgttctgccatctggatagggcttatctttagttgtccttccaaatgagattattttatgaattgcatctttactttgtccttttgcttctagccaaatcttcagcctggggttttctctaaactgtttctcaaccactgcgtctatgctcagccctaccattacttctgcttccctcactaccatcaataacttggctcccactgaagtatattttg

SEQ ID NO: 47167 - DNA, 317 bp, Homo sapiens
gttcaagtgaaccaatggaatgcaaagaactttccaggactgtcacatctctaaaagtaccctgcagtcataaaataaaatcgatatgtatatatgtatttcctgggtcattcagtgctcaagttacatgcactcctacttagacaggtggctccttaagaacatgatgggagtacaccaggtgcaaatatttctacttttgtagcctgctgagaaggaggcataacacagtccacaattgcaatctctctctagtcagccattccacagggactcaacaacaaaagccgcacgtggttatggatggcagcaaagga

SEQ ID NO: 47168 - DNA, 482 bp, Homo sapiens
cttgagtttttaccagttgttctttttatattctaggatcccatttgtcataccacattacacttagttgtcataagacaataaaatttctatttagcaaatgtttattgggtacctcctttgtattgggaactgttttaatagtgtaagggatctgtccagtaaacagacccaaaaaatccctgccttcatatgaagcttgcattttgtttcctttaatatgctcaagaaatttctaatgaaaagtgaaacaaataggagatcatatataccaagggtgtgattattggcctgtaattttgcctccttctttgaattttctttttttaaaatctaggctgggcacagtggcctgtgcctgtaatttcagcactttggaaggctgaggtgggaggattgcttgaggccaggagttcaataccagcctgggcaacatagggagaacctgcttgtatttaaaattaaataaatgaaaaaggaaa

SEQ ID NO: 47169 - DNA, 321 bp, Homo sapiens
gaaggcagagttgaaataatttaatattagggactgtgacacagagaggtaagatggcctcatcaaggacacacaacaagatacttgtagagctgagatttgaactttccagcccagtgctcttccaaagacacctacttggaggaggctgttcttcagcctgttctcctattgaagtgtctgtgggaatctcctggtggaagaggtcaaggtgagataatagtgtagtgctggacagccctttcctggcctcccttggcagatctcttccttgtgaaccacttttaccttggaaccacaagcagcaagcagtcctggtgc

SEQ ID NO: 47170 - DNA, 851 bp, Homo sapiens
tgtattcacggctgaacattaattttgaaatagcctttttatatttaaagacattaccaagttacgactttcccaacccatcttagaagttgacctctcaagtgcacctgtgtaagacttcactcgttaacaataagagatgcatggaattgccccgtgtatagccagtgcatggatgtatattttgtagggaccaaatataagctataagagcatataggttccaaaccaagtatggactgggagtggcgagttgcagacacaactctggaatcctgctgttgaggacagaagcaggcacatggggaggagcagtttgaagactagaaaattgagattttgttttgtagtatctttaaactccaggtgaacttggttggtgaatagagcttctgtgagggcaatttactgttttatagaattgatttcctaaaagatttgccattaactgaactgtcttctgctaaccataacttctccttgattattaatggacccctgttactcattaaaacctttaaaattacttgagaatgcctgcttctagtcccagttcattcgcaataggtgctatccaaattggtacccaaatattttctaaacaacatgaagtggaatcacatctgaggggtaggatctgagtgaaaagttggattaatagaattctggaccaaaagcagtacttgtggacttaagcagttttttaactacagcagatataagagaacatggctgggatcaaaaaatgcctttatcttgaatacacactagctgagacagagcaacagtgggtgtggggaaaccttggtttgccttgtagaactacctgctccaccccaccaataaatttc

SEQ ID NO: 47171 - DNA, 663 bp, Homo sapiens
caagcagctgggactacaggcacccgccaccacgcccggctgattttttgtattttagtggagacggggtttcaccatgttagccaggatggtctcgatctcctgaccttgcgtgagccaccgcgcccggctaagatgtaaaagtcttagaacgtcacactacagcgtgtgtttctgtgatgcctgtttccccaggctcgagacctccgtgtgcagtgcttccccgagcacagggaaccagaccagtgggagcaggaaggacctctgcgaggtgttggcaccttagaaatttctctatctatcattttaagaaaatccaccggcctgctgcgtcgccatgcttctgcagctggtccagggacagagcttcgagtgggctggcccagcctcatttcccccatcaaccccattaatttttttgtatgggtttgcagaaacgcggtttttatggaggcatggcacagcactgtaggagaaatggcaacctgtgttgctttgaactctcttaccttgttattcgtaggtgactgttagttacacttgcaaaagccaaatgaaacactgtcatgattttatagttccatctcttgttaaaattggaaaaccactaaactctacctattgaaagtaagtaaaggtaattttttgagttgaaaaagaaag

SEQ ID NO: 47172 - DNA, 412 bp, Homo sapiens
cccagctacatttgatatctttgaggatgaggaaaaagtgtttatgctgtgtaaataaactaaattgagtcctgccttcaagtagtggagataaacatgtactagctataatctgaggcagagttgagaggagttgggaggagcaaataatatccaactgaagccttcaaagtcaccctcttttaagaagtgacacttgacctacgcctcaaggctaactaggattttgattggtggagaagtcctggaaggacattcctggaagagaatgcaccttttacaaaaatatgcaggcatggaagcatgtgacctgggtggcaaatagtcagtggtttgcagctacaacattttaatacgtggaaagaaatttaatgaaatgggtcaagaaagtaaaattgaggaatgctttgtg

SEQ ID NO: 47173 - DNA, 422 bp, Homo sapiens
tgtcctcgccatgctgtcctgggccccgcaggcacggactcaaaagaggctgcagccacagtcaggaaaaaggccgcttggaggaggccctcggagagccccaggcgctgagccgggaaatgggcagctttgccttcaggttggcttctcctccctccccgtcccccgtgcctgcctctcttccacagacccactcggcatcccacgccggggcacacgcaggctggccgcggggcctgtcacagcagcaggggctctggtttaccccagtgctcataattgcccaatttcagaaacaccctactctgaggaaggaccttgccggggggattttgagaagggtgtgtggtgatgtggaggggctcctgtgcggccagctgtccctgtggtggtccctggcccggattccctttgggctgcag

SEQ ID NO: 47174 - DNA, 395 bp, Homo sapiens
gatgttttgtttcttcttttcaattaaaagtaagactttagttttcaaccagattttgtcaacagagatgtttattttcacaaatgcttcacttactcaaactttaacaatctctcaatcaactagaaaagtaatatcctgttgttagttactcttttagtagttacaagaaatactttatagtttttagattgatagcagaatacccagtggatactgacacaaaaattattttttgttttctctactatccataccataagagaaagaagaaaaaagaatttacattccttagcttacataattgccttatattgctatgattattcattggaaactaagatgagtggatataacttggaacaatatagttaatctctggagaagttgctacc

SEQ ID NO: 47175 - DNA, 399 bp, Homo sapiens
gctgcagagctgctaagtgtcaggttggaaagcagccctggctgttctaaagcccaagttctctcatgaccccactactctgtgcccgctcgccttcagaggtagaactctccaagcatctcggaaggctcggttctaaaagctgagaggctatctaggccgcatgcggtggctcaggcctgtaatctcagccctttgggaggctgaggcaggtgaattgcttgagcccaggagtttgagaccatcctgggcaacatagcgagacaccttctctacaaaaaagagccgggcatggtggtgcgcctgtagtcccagctactcgtgggggtcgaggctgcagtgagctgtgattgcgccactgctctccagcctggtgacagagtgagaccctgtctcaaa

SEQ ID NO: 47176 - DNA, 309 bp, Homo sapiens
ctctcatttcacctctttgtgttatgtcacatggtgttacttaagccaagctgaaattcagcagtggaaagagagcgcagaggagcatttttctgggctgagttatgtttagcgtggaatcgctcttaggcaaatgtgcagcctgatgaatggaaattggaagccatgaatagattctccaggaactttcatacccaagaggactccaggcaggctggatttttggtttctaggcctgggcgactcactgccgcagcctgcttcctggatggaactctgggtcttgctgctgcaaaactgggtcagggg

SEQ ID NO: 47177 - DNA, 595 bp, Homo sapiens
ggagttatttgtatcctgctgctcaaggtcatcgccaaggtccgatttttcacaaaaaaaccttataacctccagcataaatgggttaatttaatcatttcttattgatttcgtctgtcctaatagttcttaatctactttgggtcttggacctctaaaaatctgatgaaaacagtgctcagaaattgtaatatctacagaaagtttatataccaatccaggttgtttacaaaccctttgaatcctatctatgacacccaggttaagaactcttgtgctttatctccatgctggtctcaagtaacatcctacagtaattcaccaccactataaaattttatcactaattagaaaaagggtggaaaagatggaatgctttaaaaattttaagaaccatagatttgttagaatcattaaaaatgtgttggaaataaaagcaaaaggaacatccttcagtctactttcaaaattttaagtatgttttacaggccaagcattgtggctgtcctgtaatcccagcactttgggaggccgagctgggcggatcgcttgaggccaggagtttgagaccagcctgggcaacatggcaaaaccc

SEQ ID NO: 47178 - DNA, 1045 bp, Homo sapiens
gttcccctgaaggcagtaggaagtttaggaaattgttctataaaggtgggacttgggagcagtttcagactttccatattcttcagcagtccctccccaaggcctccaaataaacctgcattctaagaaaagacagaggcttgctctgcagcttcaaagtaaatgcccaaactcaaaacacccccaccccatgagactgctgccccctcactctcaaggtcctgagtgatctgacccctcctgagcagccttacactgtacttccccacccctctggagtcccagcagaagtgaggggtgactgcccctcgcacagccaacaccttggcattctctgcgttaccctctcccacttcagtcctttgtgtggccaagtcctgctcctcctgcagactcaccccagtcctcaatcgccaggagggaatgggagcagggtaggctgaggagcagtcatcgggccattgaaaaacacaaaccacacaacctgccccaagcacagttaatagcctcatttttccccctgtatagtgtacatacagcaaccagctctgccctgttttctgggacttccctggttttagaatgaataatctccaagcagtgttcttgcaactgttgcaaggaccatgttaaattgctttaaatgttgagacctgcacctggcacctagtaagcgattgttagttgttttaaaggaagaggaaataacagtctcttctaacgctgattgtgttggacaaactgtcctaataaatgctgtcttcacctggaaaatttctgagggcagttctgggtatttgagcttctataaccatccatgcctacttaagcaaggtgttattctttctttctgaactttgaggtgcttggtgattggaaaagtctagaaccccaccactaaatccattcatttatatatgcatgcatttactcatgcattcagtgaatatttattgagtacctactatgtgctagatactaaactggaggctgcacttgttcattctatataataaagtctagcacccacttgaacttgctacgg

SEQ ID NO: 47179 - DNA, 738 bp, Homo sapiens
tacattgaaaagtattttttgttatatttacctaatatttgtaggcatttgtaaagtgatggatttaaaggttatattcattatctgctggaagtctaaggtataacgaagtgatgaatgtgtgatagccattgaataaatataggaccaacttaggctacaattgaccaacttatttttctgcttaggaataccttagataatttcagataatggagttctagtgtagatcactgaagaaattgtaggaagataaaattagtcatttttcttctttcccaaatgcttacatgtatttatacatacaggcagatgagcaattgttatcttagaaagcaaccttgtattaccaaaacaaaatatagatttattcatgggggattttatgtgtggaggtggtgttttaaaattttagtaattaagtgaattttcctgccgggtgcggttgctcatgcctatagtcccgacactttgggaggctcaggtgggaggactgcttgaggccaggagttcaagaccacccagggcaacatagtgagatcctatatctacaaaaaaacaaaaaaatcaggtctacgtggtagtgtgtgcctgtagtcctacccactggagatggtgaggtggcaggatcacgtgagcccaggagtttgagactgtagcgaactatgattatgccactgtactctatcctggggcgacagaatgagactatctctcttttttttttttttttgagac

SEQ ID NO: 47180 - DNA, 265 bp, Homo sapiens
tcatattgtgtgttggaatgtaaattctaatgacctttggaagcattagtagtaaaatttacttagctggctattcctaagcttactagtgagttggagttgcatgcgtgaatcatacctctgaccagttgtgatgatacaaattaagttgagtttaaggaagagactaaattaattgccatcctgtcaccacactgtccacttagcactgtacagctaagatcctttcagttttttaaaaaatacttttttaataccacagata

SEQ ID NO: 47181 - DNA, 508 bp, Homo sapiens
accagcgtataaaaatcttttggtgggtaggggttggggataaaaaatgttgccatgagctacttgtaagcatcagtagatggcccagcatggccatcctctcagtccacccaggatcggtgatggaaatcacactctgcctcctttgggccctacttagcaagatgctttaaaccaagagtgcacattaacagtgacttcctgtgcaagtctttaaagagctgtcccagttaaagcctgtccaaaatctccacagtacaaaaaaatggtgagtaaaacatttcttcccatactgtttccttgactggagaagttgtcccagatctgttcatgtcatgacacactaagccatcagccacacattcttgactatacatatttatcaagacaccaagaagaaaaaatccaccaaacaaatattagcaatattttatatcaccaatctttttactagggttatttacataaccaaaaattaatcacttcctgtccttcctctgttcatggt

SEQ ID NO: 47182 - DNA, 211 bp, Homo sapiens
aggaccattttcatgtcttaactaagagatgaaggagaggtagaaatatatctctgttgacatgatagcagataaaacaaaaatatgtggagctatcccatgatgaatattcagctgaggggaacgtgctcgtgccagcctgcatctccactcccaatcctcactgcaccgagactcacgaggaatttattgctcattttaatcacaccca

SEQ ID NO: 47183 - DNA, 739 bp, Homo sapiens
gaaacacttgcagggccacaccttaggaataaggaccacatcttagaatttaggtctataccctaggaataaggacaaaactgaaagagatccactccaataaaggctaaaactaagcttccacaggactaagattgtctgtcaacgatttagccatctgctagggcaaaactcaatgcctttcaaagaaagatagtaaactccagagactctagagtgtgttacatagaataaacatatagtataagccagacacaatggcacatgtctgtaatcccagctactggggaacctaaggcaggaggattgtttgagcccaggagttcaagaccagcctggacaatatagtgagcccttggctcaatttctttttaattacttggcatatgatatggtttcaatatttgtcccatccaaatcacatgttgaaatgtaatccccagtgttggagttggggcctggtgggaggtgtttgagtcatgggggtggatccctcatggcttcgtgctgtcctcacaatagtgagtaagtttttgagagatcttgttaagaatgtgtggcacctcccccgcactctctcttgctcccactcttgcagtatgagacacctgttcccccttcactttctgccacaattgttaagattcctgagccccaccctaccagaagccaagcagatgctggcaccatgattgtacagcctgcagaaccatgagccaattaaatctcttttctttat

SEQ ID NO: 47184 - DNA, 366 bp, Homo sapiens
tcagctcactgcagctgcctcctcctggattcaagcaattctcgggcttcccctctctagtagatgggactacaggcatgcaccaccacacctggccgatttttgtactttttgtagagatggggtttttgccatgttggccaggctggtctcgaactcccgggctcaagtgatcctcctgcctcagcctcccaaagtgctgggattacagccactgcacctggcctcccatttcaatttgttaatgcagcagaccaacccataaggggaggggcatctattgaagcattgaacatttttgcgctccacaccttgcctgtctagaaagattgagggagaccagtcagaaattgagcattgggcctg

SEQ ID NO: 47185 - DNA, 465 bp, Homo sapiens
gtggatctctctgattcatagcaggcttacagctggttatggaggccacagaattcaagatcaaggccccaggaggaaaaggtcaggaaaaggtgagcaaaagctagccagggagtcagaacccagctatatgaactgaagttaagtcaggactccagtgaggtatatgcaaatatccataggctcagtggggaacactgtagaatctggaacatgaatgatgagaactcactgagcaagtgttgcaggtagcaagaataactcatagccacagccactggtggaagaggctttgtctggattaaccaaacaactttggaacccacagttgaaagccttcaaggctgagaaagactgaatagaacccaaactaaaattgggatgtatgaatgtgaacttgtaatatgaaagttttccgaacttctaacctaaattcccttatctgagtgtaatggtatatattaa

SEQ ID NO: 47186 - DNA, 396 bp, Homo sapiens
ctcaaatgggtatttctgcaaattccagttctgcttatatactatttcctgatgaccctttctatctggacttcctgttggcagttcaaattaaacacataatcaaaatatttaatccaagactaaactcatcgtcatccctccaaaacctttcttggactcaacagtttctcttcctgctctcatcactattccgatcacccaggctcaaaacctagggtgcattcttccagcttctgctcaggtttttgagcccagcatccttcactgccctccattcctccctcactggtcttgctgccaccaccttcttaactcttccctaggggaattcattcacctgctccagtttctccgcactccagtttatcttatactttgtgatgatttaattaa

SEQ ID NO: 47187 - DNA, 438 bp, Homo sapiens
agctcacactttctattgtcagtcttggatatcatcccaaatgtcactttctcaagaatcgtttaagataaacagttgtattatcagccacaaagaagattaaaaaaaaaaattgcccaagatcatacagtttagaaatggcagagtcagatccaaacttgggcagttttgctccagaagtctttatcgccactgatttatgcttcccctacattgtaattgcctgttcaacagtttgccccactatgagcacctttggggtattgtttgcttgtttgtttgtgacggagtcttgctctgtagcccaggctggagtgccatggcgcgatctcagctcactgcaacctccacctcccgggttcaagcgattctcctgcctcagcctcccgagcagctgggattacaggcacgcaccaccacgtccagctaatttttgta

SEQ ID NO: 47188 - DNA, 398 bp, Homo sapiens
taggatgcttctggttgtcacccattttgggccttccatacatagtacactgtaaatgctttcattgtagtacttgccacaccatattctaattcagagcttgccaacagtttctcaactcagatgtgccaggaaacccattctctttcctgctggagagtggaactgggcctctgtcctacatgggttgaccagggctgtgagcaacttcctttgtgcatcccagtaccataagtgtcatttcagtgtgtggaaatagtgagaattgccctctaatcaatagtacatttgactatttccccagcaagacgactttgaaggcaggctaattagctggaaattgaacttgtcacccaggcctctggctcagtgttcttggtcgttttcttacctcactg

SEQ ID NO: 47189 - DNA, 303 bp, Homo sapiens
gtggagacggagttttgcttttgttgcccatgctggagtgcagtggtgtgatctcggctcactgcaatctccacctcccaggttcaagcgatcctcctgctcaacctcccaagtagctgggattacaggcatgtgccaccacatttggctaatttggtatttttagtagagacagggtttcaccacgttggtcaggctggttttgaactcctgacctcaattgatccacctgcctcagcctccaaaagtgctgtttacatgcctaagccactacacctggctggcagttgaagttttgacccc

SEQ ID NO: 47190 - DNA, 301 bp, Homo sapiens
gctcgctgtaaggcaagaatgcctgaaatgtttagctggcattctttgtgtttctagataaagcaaaacatgtgctatgcatgctggacacgccccgtgccgtcttctgtaataaaagcagcaaccatatggtactgccggaaccttccagtatctcctataaacctcaagagccttgcagatctaaaactgcatagagagcacagatgctctggctggggtggcacaggtacacaggtggaagacaaaggtcaggccttatcgtgctagagcttacatcaggctaattcctctaccattg

SEQ ID NO: 47191 - DNA, 414 bp, Homo sapiens
ctgaaacagtttccacttccagtcaagacggagtaatagggaccagatttactgtcctaccttaaagtaccagaaagctgaacaaaacatacaaagtttcagacactcaacaatagttataagaaaaggaaggcaaaggaggtgactccaacaactgccccagcttactgccgagtttccagactatggcacagggaggggatgcccaaacagctcgggaagtcgccctgagcagctgagatgggagtgagaatttagggaggccacactggctgaattcacagcaggagtacctgagaagagagtgctgcagaccagcaggggctccctcaaattttcagctggcactgaacagcacatgcgtatgagaaaactatccaaatcccggagaaaaaacattgaaaaggaataggt

SEQ ID NO: 47192 - DNA, 1287 bp, Homo sapiens
ttgacagcctagtactagtagttaccacttacatgtttattttcagaatttaggtatgaaagcaagaaatgtatagtttatatcagtggacctgaaatgaaaaacgttgttaagatgcattaactttttaaattctttccttttgagcatcaaactttaaatttccctggaagaaggtgaaattgatagtacttaagtgtaagtgtggagtataatgtgcagatgtgtaagagtctgaaataatttcttgtgtgttttttttttttctgtttgtttcggacaaaaaaaaacaccgtggtcttcccatgcacagttagctagacaagatcactaactaggttttcaggtaagcatgctgacttttccatgtttgtgggacattcaggtagaaatactcaatatgtggagttcagaagagaggtctgtgctggaaataaagatttgagagttctcatattgggaattattggagggttattatgagaataagaagagaagaaggtaaaaggaagccctgaagaacattgtcatttaagaagaagacagagttttggaaccagtctgggcaaaacagtgagatcacgtctctgttatttaaataaataaataaataggtgacagaggaagaagagtttgtaagtttaaatgagagaggagccaggagtgactgggttgcctcagaaagtacagggatattggctgggtgcagtggctcatgcctataattctagctctttgggagggcagggtgggagatttgcttgagctcgggagtttcagtctacagtgagctgggatcatgccactctagtccagcctgggtgacagagtaagactctttctcacacaaaaaaaaaaagaaaaaaagaaaaaagtagtcaggggtgtcaaattcaacatggcagtcaagaaaagtattacggtccgcattgggattacaggcgtgagccacagccactggcctaaatattctcctttagtagaatcctcattatgcattttaagtaggttcatttggaatcaggtgttccacttaattttcaatagtctttcattgttaaagacgtacagtaaaatgcttctaggtcaaagtttaatgccttgtagtgttttaatatacgttcagcctggctgttgacaaaaacccttgatttcttcttattatttttaactcctccacccccaactcttgatttcttttgtggaaatataattcagtttttttgtgacaattttgtcctggtcattcaaaatctattaagatatagggaactatgtagactgact

SEQ ID NO: 47193 - DNA, 178 bp, Homo sapiens
ggaaattctactctcagacttctggtttgaataactataaagtggtgccatttattgttgatgtttataaataaatgttttggtaattttaaggattagaaaacagacacttggccattcgaaataagtatacttatatcctggttaagatttaggtggcaggccagacacagggctc

SEQ ID NO: 47194 - DNA, 220 bp, Homo sapiens
gatgtatagcagaaaaagtctgtaacactaattcctcttatggatgtggagactgaggtccagaggctgtggtcatactcaaagttatacgcagaattcgaggcaaaaactcagtcccaaatctgatatttctcccttaattctgtgcactccattcattacactttgaagattctcagcacttgaaaagcaggaactttatatctctcacatgcctcac

SEQ ID NO: 47195 - DNA, 404 bp, Homo sapiens
  misc_feature (356)..(356): n is a, c, g, or t
agtagtagaagtggcagcagttagcatctactgtagttgcaggattcagtaaatggtaagtatgtgctaacacctaattaaggactttagcatgcattattattttttaaattctcacagcagtatcaagatatagaaactattatctcttttacgattgaggaaactgaggccgagcaaagttaatcagcttgcctagacagtggcaaaataaggatatgaactaaaataatctgagtacagacctttgctgttgatcactctgtcatacaaactccttatgtttctctccccctcccccgttaagatcaagcttctcattgacatgttcatcacagtgtctcagtctgggtccnttacatactaggggaacttgtttatattcttttgcagttatctttttt

SEQ ID NO: 47196 - DNA, 649 bp, Homo sapiens
ctcagaacctgctgaccggtactagttatgctgtcttgccatagtagtgcagttctttaaaatgttgatacttgctctcttatcaaaggttggtttttttgtttttttgtcaagacagggtctcactatgtcacccatactggagtacaatggtgtaatcttggcttactgcaacctccaccttctgggctcaagctggcctctcacctcagccttccaagtagctgggaccacacccagtcaattttttattttttattttttaatttatttttattattactttttttgtagagagagggtttcgccatgtagcccatgctggtcttgaactcctgggctcaagctgtctgcccacctggacctcccaaagtgctgagattacaggcatgagccaccgcacccagcccaaataaagttttaagaaattacttggccaggcatagtggggcctttgtagaaaaacatagcttttctatgagaagatgatcaatattttcttttcctttgaatttggaattaccattttggaactgttgtcaacaatgcataataatatatcagaatgcttcctagtatattattggagaaagaacaaacaaaagtttaaattgatataaaatgcatataatggaacaagcaaccctgc

SEQ ID NO: 47197 - DNA, 801 bp, Homo sapiens
ctcagaacctgctgaccggtactagttatgctgtcttgccatagtagtgcagttctttaaaatgttgatacttgctctcttatcaaaggttggtttttttgtttttttgtcaagacagggtctcactatgtcacccatactggagtacaatggtgtaatcttggcttactgcaacctccaccttctgggctcaagctggcctctcacctcagccttccaagtagctgggaccacacccagtcaattttttattttttattttttaatttatttttattattactttttttgtagagagagggtttcgccatgtagcccatgctggtcttgaactcctgggctcaagctgtctgcccacctggacctcccaaagtgctgagattacaggcatgagccaccgcacccagcccaaataaagttttaagaaattacttggccaggcatagtggggcctttgtagaaaaacatagcttttctatgagaagatgatcaatattttcttttcctttgaatttggaattaccattttggaactgttgtcaacaatgcataataatatatcagaatgcttcctagtatattattggagaaagaacaaacaaaagtttaaattgatataaaatgcatataatggaacaagcaaccctgcaaaaaaaaaaatatatatatatatataccatctgggaatttctgataataacattgaaatctgttcacacagtctaaaattcttttgatgtatcgtagttttgaaaaaaaggtaacagtttactatatataacaaatataaggaaaatatta

SEQ ID NO: 47198 - DNA, 385 bp, Homo sapiens
cctcaccctagtcccagctctgcttttcctcatcacttctttcttcccctgcaatcaccttaattcaattatttattactatttatacctgggtatttcaacaattttctaatttgtcagtctaattgcaatttttcccttctctaacctatcaatacatatccaagtcttctttaaaataactctctctgtatccaaaatctgtgaagagtcttactgattacctaatatagttcatatctcccagaagaagaaatagtcatataataccatattaaggcttattgtctataagcaatagaaactgattctggggctaacttaagcagaaaaaaaaaagtttatttaaaagatgagtggtagatcccaaaatttaaagaaaaac

SEQ ID NO: 47199 - DNA, 162 bp, Homo sapiens
ctgtctccagcacccctgaaaggggacccttccctcttagcttagataccctcagtggtagggcacccactcctgcacgaggcagccctgctgctgttagtaagtcttttccttacattgaactcatctgcctccctgacgctgatctttcatctgccctgt

SEQ ID NO: 47200 - DNA, 475 bp, Homo sapiens
gtctctgcaggttggtggtagatgggggtacccccgtatcaggctttggatttcgatgtcctcaagaaatgttccagaggatggaagacacatttcgattctgtgctcactgtagagcactccctagtgggctttcagactccaaggttctccggcactgtaagaggtgacttgttgggggctaatagggagacattcagaaatgatcctgtattagccgggcatgatgactcatgcctgtaattccagcaccttgggaggccgaggcaggtggatcacatgaggccaacctggccaacacagcaaaaccctgtctctactaaaaatacaaaaattagcctggtgtggtggcacacacctgtagtctcagctactcgagaggctgaggtgggagaattgcttgaacccaggaggcagaggttgcagtgagccaagattgcacactgcactccagcctggatgacagagcgagact

SEQ ID NO: 47201 - DNA, 429 bp, Homo sapiens
gtctctgcaggttggtggtagatgggggtacccccgtatcaggctttggatttcgatgtcctcaagaaatgttccagaggatggaagacacatttcgattctgtgctcactgtagagcactccctagtgggctttcagactccaaggttctccggcactgtaagaggtgcagaaatgtctattactgtggtccagagtgccagaagtcagactggcccgcacacaggagggtttgtcaagagcttcgtcttgtggctgtggaccgtctcatggaatggcttctggtcacaggtgattttgttctaccctcaggaccttggccatggccacctgaagctgtacaggactgggactcctggttttctatgaaggggttacacctagatgctacattggatgctgtgctagttagtcatgctgtgaccacct

SEQ ID NO: 47202 - DNA, 274 bp, Homo sapiens
ctgattttttgtagtatactagtttaattccattctttctttttctgtgtatttttaagttgttttctcagtggttaccttggttaacccagctactggttacctcagttagcatcttaagcttaaaagaacctggctttatgaataaagccaacctcttttcaataatatacactctgctactatgtatttctgtctcttcttctttatattgttgtagactgcatctttatacattgtgtacctgttaatacagacttaaattatatagggt

SEQ ID NO: 47203 - DNA, 848 bp, Homo sapiens
attgcttgtgccagaagtttgagaccagcctgggcaatatggcgagaccctgtctctataaaaaaattttttttaattagacgggcatggtggtgtacgcctgtggtcccagatacttgggaggctgagactgaggcaggaaagttgcttgagcccagatggctgaggctgcagtaagccatgttaatgccactgcactctggcctaggcaatagagtaaaatcctgtctcaaaaagaaagtaagaaagaaagaataataaagccaacacccatccaagcaacataaggtcaaaacacagcagtaacctaaaagttctccatgtgtccttcaccaaacacatcctccatcctccctagggatgaccactatcttgactttgtataataatttccctacgctttataatagttttattgtcctgtatatcccctaaatactgaattcagttgtaccctggttttgttaccttatttggggtacagaccttcttaagagtgatggcattgttattaaatttcagagaagcataactggtcagtaggagggtggagacagatgtataagccaaaaatttttaaggaatttaaggagtggaacctagaaaaggtgttaggtagaaataaggtttctctgtttatacatgtattaaatgaaaatatgaggtttgactcatattttaaaatattttgtacattttgcttaatattaaaagcattttttctgtggcatgaccataaatatttataaggtaagacaaatatgacttatttatttttagtgtggcacagctgaactacatttcaaatgagaagtaacattgatagggagcagtaatgtgaaactatg

SEQ ID NO: 47204 - DNA, 399 bp, Homo sapiens
attcagggcttctctggaataacagctgaaacccagtgagtgctcaaatccagtaactcatgtcaccaccgtctgagtatcatataatgccatcatttgactctgagcctcttttagtgttcagaatgcagtgattttttctgcctcacaactggccatgggaatgctgcagaactttacagagacaactcactgctcggtgtgggaacttgataggattataattttcagatgatgctctgtaactgtagattttttcgatgtgacttatttgtgcttccatattattacattcgtagagagtagcagagtgacagtattttgtggttgctaagaagtccatgaaaagagtccagaaacagaattttattttgtctttcttctaaaatgatttagact

SEQ ID NO: 47205 - DNA, 367 bp, Homo sapiens
tttatttcacttattcattattcccttcctctgctttttaaaattttgtccactgctctgtctttaacttcttaagaagttaaattatatcattgattttcagaatttttatggtgaatgttaaatggtgcagctaagtttcacaagcttatttcacaaatgtagaattcagtaaagtggtgttgatagaggaaaatctgggtcctgagagggggctatgttagagatattttgtggaataccttttgcatgatattaataattctaacctaaattaagcccaattaattttcctatcctaatatatgcattaaagattataagtccccacctaacatggctttactgaatcttacaagttttaggt

SEQ ID NO: 47206 - DNA, 382 bp, Homo sapiens
gaacggaccagatcatactcagtggtatccttggggcccatgtcaggccttctaaggaatgaagaaatgatttaggaagctctacacctcccgtaggaatttgggaaagtgcctgaatcccaggtggccctaagtgtagagatggtggctgtgcaggctgcccctcctgtaccatctccccagtgcctggcatggtgccctgtgggtgctgaggtgggtgcctctcaccatgaaggcgggatggagtgttctgggcctgctggtgacccacttaccccatggcctggagttcaattgcaagcctgagggctagagagggcccagcatgggacaccccctggggagtatggggtgacgtggcttccttgtgagagttaaatca

SEQ ID NO: 47207 - DNA, 861 bp, Homo sapiens
atcattaaaacaacagggtagaagaagagtaatcaaaagtacaagaggaaaatgctacctctgtctaggaaaattagggagggcctcacatataaaccaacaactgggctagatctcaaaggacagacagggattaaccaggaagaataaaaacaagagaagctaatgtggagaaccagggaaaatacagtatgatgaatgtgggcccaatgagaaattcagcatagccagagcagagcacaagaagcgaggggctagagaagaggcaaggatattaaactgaagttatatagtaaagacccttttatactagaccaagaatattggggccaggcgtggtggctcacacctgtaatcccagactttgggaggccaaggcaggcggatcatgaggtcaggagatcgagaccatcctggctaacacagtgaaaccccatctctactaaaaatacaaaaaattagccgggcatggtggcgggcgcctgtagtcccagctactcaggaggctgaggcaggagaatagcatgaacccagggggcggagcttgcagtgaactgagatggtgccactgcactccagcctgggcgacagcacaggaaagaaaggtaagcagtagaaaggctgttacaacaggctaggcaagaaataatatggatctaaactagtgaaaatgagaagatggattacagaggcattttaaaaaggtaggctatagagaacatactaaagtactaaagtcattaagaaggacaggaacaaagcggatcttttgcatgggatgggggattatgaatatgattttttagacatacacattcccccatcccacctctacctgttttatttattctaaaaaaaaaa

SEQ ID NO: 47208 - DNA, 498 bp, Homo sapiens
gctcagctcctctgaggttgacactgaaaaagagtaactgcaggggccagaagcagagagaccaacaaaccctggcccctgccctggagattcatctttctcccgagactctccctctgatgattttggctccatcgaagcctccttgggtcatttcttccttcatatctgaggtacaggcaatgggatgacaaaaggcatttttcaacatctctccacaactaagtcaaagctgaaaagtttaaaggacttttctgaacatgagggcaatgtttcccaaccttttgaggtcatagaaactgctctggacaccagtttaaatatacagaatcttgggggacatggattttgaaggtctgcagtgggagcctgggaaaaggtattttaaagtaataccggttacccttaaatttctgcaagttctagtatcactgtgctggcaagtaacaaagagaaataaacacagtagcataaagcctggcatgtagcctggctcac

SEQ ID NO: 47209 - DNA, 850 bp, Homo sapiens
  misc_feature (778)..(778): n is a, c, g, or t
  misc_feature (824)..(824): n is a, c, g, or t
agtttcacttgaactcagcgttcattctgcagaggaaattgaagggaaggtgcaaggcatgaacgtctcaaagctcaggaacacaagggtgaatgtggacttccagaagcagacggtagatcctatgcaagtctcctttaacacatcagacaggtcccagacagttacagatctccttctaactattgatgtcacagaggtggttgaagtgggacacttttggggatacaggattgatgaaaacaactcagagattctgaaaaagcttactgctgaaatcaaccaactgacgctggtgcccttgcccactcacccacatccagacttggtctgtctggcaccttttgctgattttgataaacaacgctactttagagctcaagtcctttatgtttctggaaattctgctgaggtattctttgtagattatggcaataagtctcatgtagatctacatcttttgatggagattccctgtcaatttcttgaacttcctttccaggctttggaatttaagatttgcaaaatgagaccatcagcaaagtctcttgtttgtggcaagcactggagtgacggggccagccagtggttcgcctctctggtgagcggctgcaccctccttgtgaaggtcttctctgtggtgcacagcgtcctgcacgtggatgtgtaccagtactcaggggtccagggatgccatcaacataagagacgtcctcatccagcagggctatgccgaggctcacgggaggagtcctacggagtccaaggcaaagccatngaagtttttcaaggggcctctttttccaagttcagttaggaaaacntgacagtgggctctgtggccttttcc

SEQ ID NO: 47210 - DNA, 609 bp, Homo sapiens
aaaacaatacatatttactcttttacagaggccagacatgtaaaatcagtttcactgggccgagatcaaggttgcaacagggctgggctccctccagaggccctaggagacaatttgtaccttgcctcttctagcttgtggtagctactggcataccttgtcttgtagccacatcactctaatctgcctccatggtcacactgccttcttattttctgtggacaaatctctgtctccctcttataaggatacatgtgattgcacttagtgaccacccagaatccaggaaaatcttctcaagatccttaatttaatcacatcttcaaactcctttttggcacacaaggtagtattttcaggtttccagagattagaacatggaaatctttaagaagaccattattcagtctagaacatcttctattactaatttgttttattttgttcatgaaaagatgttggattttgtcaattgctttttctacattgattaagaaaattacgtgttttcaaattattaataattctgttaatattgtacattacattgattttgatatgttgaatcaatcctgcattcctggaataaatcccacttcatcatggtgt

SEQ ID NO: 47211 - DNA, 1071 bp, Homo sapiens
aatccataactttctgtaagaaccacactgtggatcataacatctgagctataaggattaagagtgtaactggggcccgttgggtgggggggcgggacagcattaggaaaaatagctaacgcatgccgggcttaatacctgatgagttgataggtacagcaaaccaccatggccacatgtttacctatgtaacctgcaaatcctgcacatgtaccctggaacttaaaataaaaattataattaaaaaaagaattgagtagctgcaccactagaaagatggcagagcaagacagaagaaaggaaaagggctcaggtttaagcgactggaatcattcctacatgattcctggcggcagaaacgtgacaaggtgcgtctcagacgactagaagtgaaacctcatgccttggaattgccagataaacattccttggcctttgttgtacgcatcgaaaggattgacggcgtgagtttactggtgcagagaaccattgcaagacttcgcctaaagaaaatttttagtggtgtctttgtaaaagtcaccccccagaatctaaaaatgctgcgtatagtggaaccttatgtgacctggggatttccaaatctgaagtctgtccgagaactcattttgaaacgtggacaagccaaggtcaagaataagaccatccctctgacagacaatacagtgattgaggagcacctggggaagtttggcgtcatttgcttggaagacctcattcatgaaattgccttcccagggaagcatttccaggagatctcatggttcttgtgccctttccacctctcagtggcccgtcatgctaccaaaaataagagtgggcttcctcaaggagatgggcacacctggctatcggggtgaacgcatcaatcagctcatccgtcagctgaactagacccaggtgacaaactgcggtaaattttttatcagtgaagtggaagcatgcgttttgttgttttgggaatttttatcaagtatcttcagagaagattatttcctgctttatcttcaaaaactggaaaggaagggtcaaagaaaagacagtagctggccg

SEQ ID NO: 47212 - DNA, 790 bp, Homo sapiens
tccctttggttccagaaaatctcctgaaaaagaggaaggcttatcaagccctcaaagccacccaggcaaagcaggcacttatggcagagcaagacagaagaaaggaaaagggctcaggtttaagcgactggaatcattcctacatgattcctggcggcagaaacgtgacaaggtgcgtctcagacgactagaagtgaaacctcatgccttggaattgccagataaacattccttggcctttgttgtacgcatcgaaaggattgacggcgtgagtttactggtgcagagaaccattgcaagacttcgcctaaagaaaatttttagtggtgtctttgtaaaagtcaccccccagaatctaaaaatgctgcgtatagtggaaccttatgtgacctggggatttccaaatctgaagtctgtccgagaactcattttgaaacgtggacaagccaaggtcaagaataagaccatccctctgacagacaatacagtgattgaggagcacctggggaagtttggcgtcatttgcttggaagacctcattcatgaaattgccttcccagggaagcatttccaggagatctcatggttcttgtgccctttccacctctcagtggcccgtcatgctaccaaaaataagagtgggcttcctcaaggagatgggcacacctggctatcggggtgaacgcatcaatcagctcatccgtcagctgaactagacccaggtgaggcagggctgaaaactgcccttgggctgacttttgataggccatgccttgccactttacaagtt

SEQ ID NO: 47213 - DNA, 334 bp, Homo sapiens
ttttgttttaggaaggacataagacctgtgaagagaacacatttgtggttttttttgttttaatccaggtattcaaatcagttcattttaatttggcaaacactgattctcttttactctctgtaaggtacttaatgggcactccttccctttgtcctcatggcctcattgtgtatatggttagtaatgatttgttatatggaaaatatcactagccaatttctcaacataaaaagtagctgcttgtttgttaacatcccttcctttagagaggcctttatacattgcatggaatatttacaattacttatattatgatcagtgttaaacttgt

SEQ ID NO: 47214 - DNA, 327 bp, Homo sapiens
ggtgtgggtcctgaaggatgaggagttactccttgcataataaaatactgagttttttttttttaaaaaaaactggtttaaataagtggtaaaattattggacatattttttgcaatagaaatgacattttgagtttctataacaaacctatgctaacaaaagtcttcaggtgacctttccaatctccaatttgtatttgaatctgcattttacctttttttctctgtctctggatgtaatccctttctgcttatttagtctttcagttttcttatgttctgatcctccgttccccacttactgtagagggttggtgggtttgtagc

SEQ ID NO: 47215 - DNA, 693 bp, Homo sapiens
aacagactgtcggaaacactgtgggttaatttactgccatgtggcctgcagctctggtttggaactgcttggagcaatgctaaggtggaagggtcatcgtccgcatcaacgtgggaatctagatcataaacaaatgtcttgtggggttccttgcaggggctccccaggtcagctgttttgcaggggggatactccttgaggctgctacttttaattccaggagaatatattccttcattcgagttcatgcaatctttataaccccatttggttatcactgatgggggttcaagtaacacttttcgcttctgtagctttcttagcccttccaaaatgtggctttccttgatacgagttggaggtagttcatttgtaggactagcaaagccacttgggagcgaagaatcaatacttagccttttatcccagttttgtgatgattgctaggaaagaaaagtagacatcagaaatgattgaaccatgtagatcacaaagatataaaaggaaaagtacatcatgggacttaatttgtgctagtggttggtaactattcacatataaatgcctacattaattagctaattaatttattcacaaactatgcagcaaacattgattttgccaggtcctgtgctaagaagcacagcgatctaaagaaacagaaggtaaaggccctgtcttcatgggaggaat

SEQ ID NO: 47216 - DNA, 353 bp, Homo sapiens
ctggaccccacttgctccagctttgcacatggcctaccctccccttactttccttcaggcgccttgcctaaaataccgtcctctcaatgaggcctaccctgagcaccctgtttaaaattgtaacctgccgttccctccccctacaagctttcaaatttcgtcatctttttttagtttttgctataacaattaatcactttctaatatactaattctaataagaatttacttatttatatatttattgcttaacgtctatatctgtctgtgagaatataaggcccatgaagtcagggatctttttctgttcttaacattgttgtattccaaatgggagactgttgcttggctca

SEQ ID NO: 47217 - DNA, 690 bp, Homo sapiens
catgaagagaagaatcactttccataaggaaatccaagaagtgcccattacaataaatgcatgctattacggattgaactgtgtccccctactgaaaggtatgttaagtcctcacctcctgtacctaagaacatggccttatttggaaatagggtggttgcagattaactagttagagtgagaccatactggagtaggctgggtcctaaatacagaatgcctggtgtccttataagaagagagggaggccccgggaaaagccggcccatctgaagatggtggcggagactggatgagggatctgtaagccaacgactgacaggtgtccctgagaacctccagaagctggaagaggcatgaaaggaatctcgccaggaggctgaagagggaacatggccttgcccacacagatttcagacatctggctccagaactgtgggaggacacatttctgttgtttagaactgcctgttttttatactttgttatggctgccctaggaaactaatacagatattattttccacttctgaacttagcaaaatatttttaaaatgaaaattcttaaatgttggcacagtttaaggtcaggggtgccccagcagtttggcaacatatatcaaaggctttaagacactttatcctctttcacttggtaattccatttttaagcctttatcctagggaaaa

SEQ ID NO: 47218 - DNA, 294 bp, Homo sapiens
ggtctcgatctcctgacctcatgatccgcccgcctcggcctcccagagtgctgggattacaggcgtgagccaccacgcccggccttcccacctcactttttaccttttatgtcatctcctgggtcatgtaaattaacacctacttcagatgggtatggatttctaaatatggattaaacatggatttttaaaataaaggaggactgaggaaatggtcacatcaattctggacgagaagacagtttttatgaaacagttccattttaaagacacgtctaatcagagttgggaatc

SEQ ID NO: 47219 - DNA, 995 bp, Homo sapiens
ctggccaagggcacctggtttttttcgctctggagatggttcttaaccacaggccacacacacttcacagcctcatctggccctcgggagccccagagggcacagctctgggcaggagacacagcaggtgggcccctcccttggcagggcgggctcgaatcaggcagggtgctcctagccttgtcaccggacaccgaagggcgtcacgggcagtggctggcggtgtccttctgagctaagctgggtcctgacctttcacacttccctcctaacttccatggctctgtcaccgccttacggaggagctgaagccacagacacagcaaggttggggtccgcaccggaagtatccagtggtagacggcggaacccttaagaaacggacgccttcatgcgggcggctggagaagcgggggctgggcactgcagcaaccacgcttcggctgacaccaggaaggaagcacgcctggagcggatccgaaactactgagaggggccagggctggccgtgggcgcaggccgatccttacattcgaggccggcccagctctgtagcttccccctctgggcctctcacccgcgcaggacctcggtgggagcgcgcacgtggcggggcggggggccgcgggcccgagcccggactggccaccgggggcgcccgcgagctgacgctctggcccgttgcggtctctgtggcccgcgcgaccttccggccctggagccggtggccgcggggctccagcgacgccgtgtggtccgtgctccgctctgtggctccagggggccgagaaactgctgagagtccggcccggccggcagtgctgggcgcgggccgagggccccgggaggcagcggccccgccctctttacctgcggcctcgcagagcatgctgggagccgcgggaggcagtggccccgctcccctcacctgcggtatcgcagagcatggtgggagccccgggaggcagtggccccgcccccttccctgcggccgc

SEQ ID NO: 47220 - DNA, 472 bp, Homo sapiens
ctaatttcaaatatcttttcatatgttcatgtccatttgtatatcctattccctgaaaagaaaaactattgtttttttatatttttcttcagattttgtttttatgtaataagcatttgtttgttaggtgtactgccaatatattcctccatcatgttgcttgtctttcatctttgcatgtgatgcttttgttatatagaagttttatatttttgatgtagccaggtttattgaccttttatctttatgacttttttgcctttaattttgctttacattgaggtgtttgtgtatccactgtttttcttttgaatggtatgagaaagggatttaacttaaaaaaagtaatacagctaggcatagtggctcacacctgtaatcttaacacttggggaggcagaagcaggaggattgcttgaatctaggagttcaagaccagcttgggcaacatagtaagaccctacctctgcaa

SEQ ID NO: 47221 - DNA, 494 bp, Homo sapiens
ttttagtctgtcacctggaagtggcttataatataaatttgaatagtgaagcacttaagatgggaaggcaatttaggaagttattggaattttccaactgagaaataatgaaggccatttggatctgtcatagattttgcctctggccacccaattattttctcactcgattattgctttttctctgcttccatcactgttgccatactattttctttgtgatccgaggagatctgacttaataacacattttgcttcatgcattgggggcctaatgtcatacaaagtggatactgctcagagagtaaagccgatttcgagagctgacaagttgtcataaacttcctgggtgtcctgcttccatatacctccattcccattaacataaatcaggtcacccagactagaagactcagtcacagtgtaagctttgtgaaccatcctttcctcagttatttaaaatgatctgatttaatggaaaattcagcatcaag

SEQ ID NO: 47222 - DNA, 461 bp, Homo sapiens
catggattagtttgtcacttcacttattaagtagtttttgagcccactggataattctgttatataagccttggacaagttagtagtggattaactaatacttatcccccccaaacattatcaaaataggggatattcttttcctttatgtattaccttaagggcaaactggggcacaatttcaatgactgactcatgcattaatgttgagatgcaatatgaagatgttttatgaacctactttccacttgcctaactagggctgagagactattaaattagaaaaagaaacaaatgtttgtttaaaaatgttctgcagaaaatcttatggacttccttaagtgtaatagttatgataacccgatttaaataagaaacatactgaataaccacactatttttctaaaactgttagaagtctaatgaatacaaatgaaaattaatctgttcctttccttaca

SEQ ID NO: 47223 - DNA, 664 bp, Homo sapiens
ctgtggtctcaactacttgggaggctgatgtgggaggtttgcttgagctcggattgcaccactgcactctagcctgggcgacagtgtgagaccctttttcaaaacaaacaagcaactttttttgagctacagtatatttaatggttttaaatatgagtgcagagtaagagggagtccagtccataagatgacccttgcttctaatactagttgcaagtttgggggttcccaagaccactcttttttttttttgagacagggcctctctctgtcaccccggtgagagtgcagtggcatgatcacggctcactgcgccctgaactcctccctcccaggttcaggcagtcctcctacctcagccacctgagttgctggatctgtgggcacacaccacctcgcctggctagtttttctatattttttagagacagtttcaccatattgccaggctggtctcaaactcctgagctgaagtgatccgcctgcctgggcctcccgaagtgctgggattacaggcttgagtcactgtgcctggccaagaccactcttaggttggatgatttgccaggaggactcactagaactcaaaaaaaaaaagacaagacataccttggaaaatggggggaatagacagatgatttctatggataggaggtttatttgt

SEQ ID NO: 47224 - DNA, 561 bp, Homo sapiens
taatattgcagagcaaatttattttttacttcaaagaaaaatgctaattagccgattcactacttttaaagttattgtgaagcatatggcgcccagtgtgagatacatccaactgctaaaatagagcgaagaggaaattagcgaagaatgggctgtttggggtgagagtgggggtgggggaggaggataggttctcaggcagattctctagccttttcagaatgattttatcgcccatcactgtttcccgcctcctcatttacccacttcccccactaccaacccctgggccaacctcttctgggcctctagctcccctcccccactttggctggattcaggtgcgcacctcaggctagccaccagttcacacctggttctaagcaggttccaacactgctgcagccatctccattcacaggacctgtttaggaagtagacttttagcgaggaagccttcaccacaacagccaaactccccagaaaacactagctagtggctctataatgtggtttgctgagaaatataaggaaactggaaaaggcgggaaggggagggcg

SEQ ID NO: 47225 - DNA, 915 bp, Homo sapiens
cacccaccttggcctcccaacgtggtgggattacaggcggctgccaccacgcccagctaatttttttgtacttttggtagagatggggtttcaccatgttggccagactggtcttgaactcctgacctcaggcgattctgcccaccttggcctcctaacgtgctgggattacaggcatgagccaccgcgcccagccctattaaagggttttaagacaagacatggatagatgtatgctttataaggctcattctgggtcacagtggatacaggtaggtcttcatggagccttatgaaatggttactcagctcgaacagtcactagacctttgctgagctgggcataagtttggttcttggccctgttttgtcttccaaaattctgtttattcaacaagattcaaagttggcttctgacaccttcccctgctttagagaagactgcattttttttttttgctattattgttagagccacctgttacctttgcaaggaagctatggaacaaaacaatttacaggtgttccaggctgcagaatggtccttgggcagggcctactgggcaagtagctctgtatcactatagtccaggggctggctctcagctatggtaatctggaaatcagttatttttcagcacatgtgtaaagtgattgaactctggggagcagattcttgttaacctaaatcatgagagactcatgtaactaaagtgccaggtggttaatgctgagtaaagacaagagctgggagggggtctagacaggagttctggaggcaagcctacatgggaaagacaaaggagaaactgacgtagcgagttggttagatctcccttaagggccatccctgcagacctgttcaaggggactgatacttgagtcactggatgttatcagatattgtacaggtta

SEQ ID NO: 47226 - DNA, 3777 bp, Homo sapiens
  misc_feature (585)..(585): n is a, c, g, or t
  misc_feature (624)..(624): n is a, c, g, or t
  misc_feature (786)..(786): n is a, c, g, or t
cagggagcctggaatggcttagatggtccctttggcagaaaagcctctagagataggtcaggagggacccaggacctgagctctcagcgaggcaagggacagagaggaggaaagaggtccctcggggagcaggggtccctggaggctgagaatggtgaggtccagggtcctggggccctaaaggaggatgaagggcagggagtggaagaggctgggaggtcaggcaggaggcctggctcactcaggagcaggtctcaggcacagtcaggggctgaggttggaggaggaaagagaaggggagcagacgaggctggaagcatggggtggcagcctatgggagagaactgggggtgcctggaggagatgctgaatgaagatcagagccgggagccccctggtcaccttggtagcaggagaagtggcaaagacggcaggttggacatctatggagagaggagagatgctacccggagttccacatccagatacaagcctggcactggcagtttctccaaggatgcccaaggccccatgggccacttctcccagggcctggctgacatggaagtgcagccgggggaggcngccacactctcctgtaccctcaccagtgacctgggaccnggcacctggtttaaggatggcgtcaagctcaccacccaggatggagtcatctttaagcaagacggtctcgtgcacagcctcttcatcacgcatgtgcaggggacccaagctgggaggtacacctttgtagctggtgaccagcagagcgaggccaccctgacngtccaggattcccctaccattgctccagatgtgacagagaaactgagagagccactggtggtcaaggctgggaagccggtgatagtgaagatccccttccagagccacctccccattcaggctgcctggaggaaggacggggctgaggtggtgggcagcagtgacagggaggcccaggtggacctgggggatggctacacgcggctgtgcctccccagcgcaggcaggaaggactgtggccagtacagcgtgacactgaggagtgagggaggctctgtgcaggccgagctcactctgcaagtcataggtaccagccctgtcttcccccaactaaggcctgagagtccctggggttctgggccctccctgccatcaagggcaggcctgggatatgatctctgctggctctgatcctcatttgcatgctgtttaagatccagacctaccactaactctgctcagactgcttaggaagaagcagttgagatgaacacagtgctgggctcctgctgggggggaggagccggttatgcttctctgaccccaatacactgggccctcaggaagttgctgggtaggatggtggtccccagccctgagtggtgccagcaagacaagcctgatcccccacaaggccccatggaggttcaggattgccatagggctggcgtctgcctccgctggcggcccccaagggacaatgggggccggactgtagagtgctacgtggtggagagacggcaggctggcaggagcacttggctgaaggtgggcgaggcccccgctgacagcaccaccttcacggatgcccatgtggagccaggcaggaagtataccttccgagtgcgggctgtgacctcagagggggctggcgaggccctggagtctgaggagatattggtggctcctgaggctctccccaaggccccttccgcgccagccatcctgtcggcctccagccagggcatcacactgacatggacagcacctcggggccccggcagcgcccacatcctgggctacctgatcgagaggcgtaagaaggggagcaacacctggacggcagtgaacgaccagccggtgcctgagaggaggtggacggtggcggacgtgcggcagggctgtcagtatgagttccgggtcacagctgtggctccctcaggtcccggagagcctggacctccatcggatgccgtctttgctcgggaccccatgagaccccctgggctggtgaggaatctccaagtcacagacagatcgaacaccagcatcactctgagctgggctgggccagacacccaggaaggggatgaagcccaggggtatgtggtggagctgtgcagctcagacagtctccagtggctcccgtgccatgtgggcaccgtgccagtcaccacctacacggccaaggggcttcggcctggagagggctacttcgtgcgggtgacagcagttaatgaaggaggccagagccagcccagtgccctggacacattagtgcaagccatgcctgttactgtctgtcccaagttcctcgtggactccagcaccaaggacttgctgacagtcaaggtcggggacacagttcgtgtgcccgtctcctttgaagccatgcccatgcctgaggtgacctggctgaaggatggcttgcccttgcccaaaagaagtgtgactgtcactaaggatggcctcacccagcttctgatccctgtggctggactctcagacagtggtctctacactgtggtgctgaggacctgcaggggaaggaggttgcccacagcttccgtatcagggtggcagcatgcccgcaggcccctgggcccatccacctgcaggagaacgtgcctgggacggtgacggccgagtgggaaccctctcctgacgaggcccaggatgtcccgctgcactacgcggtgttcacacgctcctcagcgcacggtccctggcacgaggcagccgaccgcatctacaccaaccgcttcaccctcctgggcatcctccccggccacgaataccacttcagggtggtggccaagaatgagctgggggccagcaaaccctcggacaccagccagccctggtgcatcccccggcagcgcgacaggttcacagtgaaggctccgtgctaccgggagcccgacctgagccagaagccccggttcctggtgggcctgcggtcccacctgctgccccagggctgcgagtgctgcatgagctgtgccgtgcagggctcgccccggccccacgtcacctggttcaagaatgaccgcagcctggaaggaaaccccgcggtgtacagcactgacctgctgggcgtgtgctccctcaccatccccagcgtatccccgaaggacagcggggagtacaaggctgtggctgagaacacgctgggccaggcagtcagcactgccaccctcattgtcatagaacccagcacctagcctcacctcaccctgggatggtcctggacccttgaagcttcacttccgacacctgcactggcccgggaagccaatcccaaggatggaggctgtgcccagagccccaggaaaatgggagtgagaagatgcctggcgaggttttggccaggaggacgtgaagtccttggggaagaaaaacaagggaggagggcattccacctcctggctccaagctaagtcactcaacagaatgacagcgaacctcctggacccttaccatatgggtttctttcttcttcgcttcaggagatccagagggcacctgcctgcaggatgggccggctccttattttcctgggctgagccgtttggagggagggtgggcacagctgggcctgctgtgaccactgggagggaagaggagaggaggtcagaggacctgggtgaggactagggcatcaaggtcgtgtgtgtgggtgggggcagcctccacctcctggattcaagagattccaggggtgcagcaagtgctttctatgcgtttcttcattaaaacattaggctaata

SEQ ID NO: 47227 - DNA, 3582 bp, Homo sapiens
  misc_feature (585)..(585): n is a, c, g, or t
  misc_feature (624)..(624): n is a, c, g, or t
  misc_feature (786)..(786): n is a, c, g, or t
cagggagcctggaatggcttagatggtccctttggcagaaaagcctctagagataggtcaggagggacccaggacctgagctctcagcgaggcaagggacagagaggaggaaagaggtccctcggggagcaggggtccctggaggctgagaatggtgaggtccagggtcctggggccctaaaggaggatgaagggcagggagtggaagaggctgggaggtcaggcaggaggcctggctcactcaggagcaggtctcaggcacagtcaggggctgaggttggaggaggaaagagaaggggagcagacgaggctggaagcatggggtggcagcctatgggagagaactgggggtgcctggaggagatgctgaatgaagatcagagccgggagccccctggtcaccttggtagcaggagaagtggcaaagacggcaggttggacatctatggagagaggagagatgctacccggagttccacatccagatacaagcctggcactggcagtttctccaaggatgcccaaggccccatgggccacttctcccagggcctggctgacatggaagtgcagccgggggaggcngccacactctcctgtaccctcaccagtgacctgggaccnggcacctggtttaaggatggcgtcaagctcaccacccaggatggagtcatctttaagcaagacggtctcgtgcacagcctcttcatcacgcatgtgcaggggacccaagctgggaggtacacctttgtagctggtgaccagcagagcgaggccaccctgacngtccaggattcccctaccattgctccagatgtgacagagaaactgagagagccactggtggtcaaggctgggaagccggtgatagtgaagatccccttccagagccacctccccattcaggctgcctggaggaaggacggggctgaggtggtgggcagcagtgacagggaggcccaggtggacctgggggatggctacacgcggctgtgcctccccagcgcaggcaggaaggactgtggccagtacagcgtgacactgaggagtgagggaggctctgtgcaggccgagctcactctgcaagtcataggtaccagccctgtcttcccccaactaaggcctgagagtccctggggttctgggccctccctgccatcaagggcaggcctgggatatgatctctgctggctctgatcctcatttgcatgctgtttaagatccagacctaccactaactctgctcagactgcttaggaagaagcagttgagatgaacacagtgctgggctcctgctgggggggaggagccggttatgcttctctgaccccaatacactgggccctcaggaagttgctgggtaggatggtggtccccagccctgagtggtgccagcaagacaagcctgatcccccacaaggccccatggaggttcaggattgccatagggctggcgtctgcctccgctggcggcccccaagggacaatgggggccggactgtagagtgctacgtggtggagagacggcaggctggcaggagcacttggctgaaggtgggcgaggcccccgctgacagcaccaccttcacggatgcccatgtggagccaggcaggaagtataccttccgagtgcgggctgtgacctcagagggggctggcgaggccctggagtctgaggagatattggtggctcctgaggctctccccaaggccccttccgcgccagccatcctgtcggcctccagccagggcatcacactgacatggacagcacctcggggccccggcagcgcccacatcctgggctacctgatcgagaggcgtaagaaggggagcaacacctggacggcagtgaacgaccagccggtgcctgagaggaggtggacggtggcggacgtgcggcagggctgtcagtatgagttccgggtcacagctgtggctccctcaggtcccggagagcctggacctccatcggatgccgtctttgctcgggaccccatgagaccccctgggctggtgaggaatctccaagtcacagacagatcgaacaccagcatcactctgagctgggctgggccagacacccaggaaggggatgaagcccaggggtatgtggtggagctgtgcagctcagacagtctccagtggctcccgtgccatgtgggcaccgtgccagtcaccacctacacggccaaggggcttcggcctggagagggctacttcgtgcgggtgacagcagttaatgaaggaggccagagccagcccagtgccctggacacattagtgcaagccatgcctgttactgtctgtcccaagttcctcgtggactccagcaccaaggacttgctgacagtcaaggtcggggacacagttcgtgtgcccgtctcctttgaacatgcccgcaggcccctgggcccatccacctgcaggagaacgtgcctgggacggtgacggccgagtgggaaccctctcctgacgaggcccaggatgtcccgctgcactacgcggtgttcacacgctcctcagcgcacggtccctggcacgaggcagccgaccgcatctacaccaaccgcttcaccctcctgggcatcctccccggccacgaataccacttcagggtggtggccaagaatgagctgggggccagcaaaccctcggacaccagccagccctggtgcatcccccggcagcgcgacaggttcacagtgaaggctccgtgctaccgggagcccgacctgagccagaagccccggttcctggtgggcctgcggtcccacctgctgccccagggctgcgagtgctgcatgagctgtgccgtgcagggctcgccccggccccacgtcacctggttcaagaatgaccgcagcctggaaggaaaccccgcggtgtacagcactgacctgctgggcgtgtgctccctcaccatccccagcgtatccccgaaggacagcggggagtacaaggctgtggctgagaacacgctgggccaggcagtcagcactgccaccctcattgtcatagaacccagcacctagcctcacctcaccctgggatggtcctggacccttgaagcttcacttccgacacctgcactggcccgggaagccaatcccaaggatggaggctgtgcccagagccccaggaaaatgggagtgagaagatgcctggcgaggttttggccaggaggacgtgaagtccttggggaagaaaaacaagggaggagggcattccacctcctggctccaagctaagtcactcaacagaatgacagcgaacctcctggacccttaccatatgggtttctttcttcttcgcttcaggagatccagagggcacctgcctgcaggatgggccggctccttattttcctgggctgagccgtttggagggagggtgggcacagctgggcctgctgtgaccactgggagggaagaggagaggaggtcagaggacctgggtgaggactagggcatcaaggtcgtgtgtgtgggtgggggcagcctccacctcctggattcaagagattccaggggtgcagcaagtgctttctatgcgtttcttcattaaaacattaggctaata

SEQ ID NO: 47228 - DNA, 4171 bp, Homo sapiens
  misc_feature (585)..(585): n is a, c, g, or t
  misc_feature (624)..(624): n is a, c, g, or t
  misc_feature (786)..(786): n is a, c, g, or t
cagggagcctggaatggcttagatggtccctttggcagaaaagcctctagagataggtcaggagggacccaggacctgagctctcagcgaggcaagggacagagaggaggaaagaggtccctcggggagcaggggtccctggaggctgagaatggtgaggtccagggtcctggggccctaaaggaggatgaagggcagggagtggaagaggctgggaggtcaggcaggaggcctggctcactcaggagcaggtctcaggcacagtcaggggctgaggttggaggaggaaagagaaggggagcagacgaggctggaagcatggggtggcagcctatgggagagaactgggggtgcctggaggagatgctgaatgaagatcagagccgggagccccctggtcaccttggtagcaggagaagtggcaaagacggcaggttggacatctatggagagaggagagatgctacccggagttccacatccagatacaagcctggcactggcagtttctccaaggatgcccaaggccccatgggccacttctcccagggcctggctgacatggaagtgcagccgggggaggcngccacactctcctgtaccctcaccagtgacctgggaccnggcacctggtttaaggatggcgtcaagctcaccacccaggatggagtcatctttaagcaagacggtctcgtgcacagcctcttcatcacgcatgtgcaggggacccaagctgggaggtacacctttgtagctggtgaccagcagagcgaggccaccctgacngtccaggattcccctaccattgctccagatgtgacagagaaactgagagagccactggtggtcaaggctgggaagccggtgatagtgaagatccccttccagagccacctccccattcaggctgcctggaggaaggacggggctgaggtggtgggcagcagtgacagggaggcccaggtggacctgggggatggctacacgcggctgtgcctccccagcgcaggcaggaaggactgtggccagtacagcgtgacactgaggagtgagggaggctctgtgcaggccgagctcactctgcaagtcataggtaccagccctgtcttcccccaactaaggcctgagagtccctggggttctgggccctccctgccatcaagggcaggcctgggatatgatctctgctggctctgatcctcatttgcatgctgtttaagatccagacctaccactaactctgctcagactgcttaggaagaagcagttgagatgaacacagtgctgggctcctgctgggggggaggagccggttatgcttctctgaccccaatacactgggccctcaggaagttgctgggtaggatggtggtccccagccctgagtggtgccagcaagacaagcctgatcccccacaaggccccatggaggttcaggattgccatagggctggcgtctgcctccgctggcggcccccaagggacaatgggggccggactgtagagtgctacgtggtggagagacggcaggctggcaggagcacttggctgaaggtgggcgaggcccccgctgacagcaccaccttcacggatgcccatgtggagccaggcaggaagtataccttccgagtgcgggctgtgacctcagagggggctggcgaggccctggagtctgaggagatattggtggctcctgaggctctccccaaggccccttccgcgccagccatcctgtcggcctccagccagggcatcacactgacatggacagcacctcggggccccggcagcgcccacatcctgggctacctgatcgagaggcgtaagaaggggagcaacacctggacggcagtgaacgaccagccggtgcctgagaggaggtggacggtggcggacgtgcggcagggctgtcagtatgagttccgggtcacagctgtggctccctcaggtcccggagagcctggacctccatcggatgccgtctttgctcgggaccccatgagaccccctgggctggtgaggaatctccaagtcacagacagatcgaacaccagcatcactctgagctgggctgggccagacacccaggaaggggatgaagcccaggggtatgtggtggagctgtgcagctcagacagtctccagtggctcccgtgccatgtgggcaccgtgccagtcaccacctacacggccaaggggcttcggcctggagagggctacttcgtgcgggtgacagcagttaatgaaggaggccagagccagcccagtgccctggacacattagtgcaagccatgcctgttactgtctgtcccaagttcctcgtggactccagcaccaaggacttgctgacagtcaaggtcggggacacagttcgtgtgcccgtctcctttgaacatgcccgcaggcccctgggcccatccacctgcaggagaacgtgcctgggacggtgacggccgagtgggaaccctctcctgacgaggcccaggatgtcccgctgcactacgcggtgttcacacgctcctcagcgcacggtccctggcacgaggcagccgaccgcatctacaccaaccgcttcaccctcctgggcatcctccccggccacgaataccacttcagggtggtggccaagaatgagctgggggccagcaaaccctcggacaccagccagccctggtgcatcccccggcagcgcgacaggttcacagtgaaggctccgtgctaccgggagcccgacctgagccagaagccccggttcctggtgggcctgcggtcccacctgctgccccagggctgcgagtgctgcatgagctgtgccgtgcagggctcgccccggccccacgtcacctggttcaagaatgaccgcagcctggaaggaaaccccgcggtgtacagcactgacctgctgggcgtgtgctccctcaccatccccagcgtatccccgaaggacagcggggagtacaaggctgtggctgagaacacgctgggccaggcagtcagcactgccaccctcattgtcatagaacccagcacctagcctcacctcaccctgggatggtcctggacccttgaagcttcacttccgacacctgcactggcccgggaagccaatcccaaggatggaggctgtgcccagagccccaggaaaatgggagtgagaagatgcctggcgaggttttggccaggaggacgtgaagtccttggggaagaaaaacaagggaggagggcattccacctcctggctccaagctaagtcactcaacagaatgacagcgaacctcctggacccttaccatatgggtttctttcttcttcgcttcaggagatccagagggcacctgcctgcaggatgggccggctccttattttcctgggctgagccgtttggagggagggtgggcacagctgggcctgctgtgaccactgggagggaagaggagaggaggtcagaggacctgggtgaggactagggcatcaaggtcgtgtgtgtgggtgggggcagcctccacctcctggattcaagagattccaggggtgcagcaagtgctttctatgcgtttcttcattaaaacattaggctaataaaaaaaaaaaaaaaaaaaaaaaaaaaagaaaagaaataaaaaaaaaaaaaacaaacaagaacaaaagaagagagggggggccgcgcgccgacgaaagattactgccctggcggaggagccccacgacagatgacggcgagccaccgcacgcttgtgtgtgtagtaacaagagcgggggcgcccacatagaggagagcgagcgcccttattaaaaaagaacgcacggcgacgcgcggcgcccgcgcagtgattaaaacaaacgcccgacgaggccgagtgggagcgaaaaaaaaccgcgctgctgcaatgctgagtggggagagatacacatctatttggtggttgaagaggggagcgaacccccatataactatctgtgtgtggggggggggtgtgagacaaaaataaatttagggggcgacagacagaaatattgtatctcacggaccgggaggaatatttagatgacaggctgctctgtaggaagggaggggagagatcattgctataacgaggagtattcttacagcggggcggctatattatacagtggggggtgaaaaacgaaagatgcgacgcaagatatctt

SEQ ID NO: 47229 - DNA, 598 bp, Homo sapiens
ccttgcagggacgggtccggaattcccggggtcgactactactactaaattcgcggccgcgtaaatgtttctggagctagttatgtctcacaattttgtagaatcttacagcatctttgataaacttctcagtgaaaatgttggctaggcaagttcagttaaaatatagtagaaatgtttatcctggtatctctaagtatacatttaattgtacagaaaatttacagtgtaacattgtgtcaacatttgcagattgactgtatatgaccttaatctttgtgcagcctgaaggatcagtgtagtaatgccaggaaagtgctttttacctaagacttccttctcagcttctcccataaagagaccctaatatgcattttgatttgtaattggaaatgtaactttcactgaaagtgtcatgtgatgtttgcattacttttaactgctatgtataaaggaaagtgtgtcttttgacttcatcagttatttctcttgtgcacagagaaaaatgcattaaaaatgactaaaaaaaataaaaaattaaaaaatggaaaaatcttttctttttgccttttggccctaggatcgtgtttaggaggat

SEQ ID NO: 47230 - DNA, 505 bp, Homo sapiens
aaaaaaaaaaaaaaaaattttttgggggggttttttttgggggggggcctttaaggcaagttcagttaaaatatagtagaaatgtttatcctggtatctctaagtatacatttaattgtacagaaaatttacagtgtaacattgtgtcaacatttgcagattgactgtatatgaccttaatctttgtgcagcctgaaggatcagtgtagtaatgccaggaaagtgctttttacctaagacttccttctcagcttctcccataaagagaccctaatatgcattttgatttgtaattggaaatgtaactttcactgaaagtgtcatgtgatgtttgcattacttttaactgctatgtataaaggaaagtgtgtcttttgacttcatcagttatttctcttgtgcacagagaaaaatgcattaaaaatgactaaaaaaaataaaaaattaaaaaatggaaaaatcttttctttttgccttttggccctaggatcgtgtttaggaggat

SEQ ID NO: 47231 - DNA, 3441 bp, Homo sapiens
ctttgtttctctctctcccttttttcttttcagtgcagaagtttttaattttgaccgagccaaatctatcaatctaggcctggcgccgcgtcagcagagggggcggggaggcgagcgcggaactgggggaggggaaggggcggggatcagcaggcggagcggctgccagagttgctgggagtgcgcgcggtcggatcacaaggcggcggcggaggaggcccagcccgctgcggcggtgcctccttccttcctccttccctcgcgctctctctttcgcccgcccgcgccttccctgcccgcctgcgtcaccgcggccgccatggctgagaatggcgagagcagcggccccccgcgcccctcccgcggccctgctgcggcccaaggctcggctgctgccccggctgagcctaaaatcatcaaagtcacggtgaagactcccaaagagaaagaggagttcgcggtgcccgagaacagctcggttcagcagtttaaggaagcgatttcgaaacgcttcaaatcccaaaccgatcagctagtgctgatttttgccggaaaaatcttaaaagatcaagataccttgatccagcatggcatccatgatgggctgactgttcaccttgtcatcaaaagccagaaccgacctcagggccagtccacgcagcctagcaatgccgcgggaactaacactacctcggcgtcgactcccaggagtaactccacacctatttccacaaatagcaacccgtttgggttggggagcctgggaggacttgcaggccttagcagcctgggcttgagctcgaccaacttctctgagctccagagccagatgcagcagcagcttatggccagccctgagatgatgatccaaataatggaaaatccctttgttcagagcatgctttcgaatcccgatctgatgaggcagctcattatggctaatccacagatgcagcaattgattcagagaaacccagaaatcagtcacctgctcaacaacccagacataatgaggcagacactcgaaattgccaggaatccagccatgatgcaagagatgatgagaaatcaagacctggctcttagcaatctagaaagcatcccaggtggctataatgctttacggcgcatgtacactgacattcaagagccgatgctgaatgccgcacaagagcagtttgggggtaatccatttgcctccgtggggagtagttcctcctctggggaaggtacgcagccttcccgcacagaaaatcgcgatccactacccaatccatgggcaccaccgccagctacccagagttctgcaactaccagcacgaccacaagcactggtagtgggtctggcaatagttccagcaatgctactgggaacaccgttgctgccgctaattatgtcgccagcatctttagtaccccaggcatgcagagcctgctgcaacagataactgaaaacccccagctgattcagaatatgctgtcggcgccctacatgagaagcatgatgcagtcgctgagccagaatccagatttggctgcacagatgatgctgaatagcccgctgtttactgcaaatcctcagctgcaggagcagatgcggccacagctcccagccttcctgcagcagatgcagaatccagacacactatcagccatgtcaaacccaagagcaatgcaggctttaatgcagatccagcaggggctacagacattagccactgaagcacctggcctgattccgagcttcactccaggtgtgggggtgggggtgctgggaaccgctataggccctgtaggcccagtcacccccataggccccataggccctatagtcccttttacccccataggccccattgggcccataggacccactggccctgcagccccccctggctccaccggctctggtggccccacggggcctactgtgtccagcgctgcacctagtgaaaccacgagtcctacatcagaatctggacccaaccagcagttcattcagcaaatggtgcaggccctggctggagcaaatgctccacagctgccgaatccagaagtcagatttcagcaacaactggaacagctcaacgcaatggggttcttaaaccgtgaagcaaacttgcaggccctaatagcaacaggaggcgacatcaatgcagccattgaaaggctgctgggctcccagccatcgtaatcacatttctgtacctggaaaaaaaatgtatcttatttttgataatggctcttaaatctttaaacacacacacaaaatcgttctttactttcattttgattcttttaaatctgtctagttgtaagtctaatatgatgcattttaagatggagtccctccctcctacttccctcactccctttctcctttgcttatttttcctaccttcccttcctcttgtctccccactccctccctctttgtttccttccttccttatttcctttagtttccttccttagccgttttgagtggtgggaatcaatgctgtttcactcaaaagtgttgcatgcaaacacttctctttattctgcatttattgtgatttttggaaacaggtatcaaccttcacagttgggtgaacaagtgttgtcctacagatgtccaatttatttgcatttttaaacattagcctatgatagtaatttaatgtagaatgaagatattaaaaacagaagcaaattatttgaagctctctaatttgtggtacgatattgcttattgtgactttggcatgtatttttgctagcaaaatgctgtaagatttataccattgatcttttttgctatatttgtatacagtacagtaagcacaattggcactgtacatctaaaaatattacagtagaatctgagtgtaatatgtgtaaccaaaatgagaaagaatacaagaaatgtttctggagctagttatgtctcacaattttgtagaatcttacagcatctttgataaacttctcagtgaaaatgttggctaggcaagttcagttaaaatatagtagaaatgtttatcctggtatctctaagtatacatttaattgtacagaaaatttacagtgtaacattgtgtcaacatttgcagattgactgtatatgaccttaatctttgtgcagcctgaaggatcagtgtagtaatgccaggaaagtgctttttacctaagacttccttctcagcttctcccataaagagaccctaatatgcattttgatttgtaattggaaatgtaactttcactgaaagtgtcatgtgatgtttgcattacttttaactgctatgtataaaggaaagtgtgtcttttgacttcatcagttatttctcttgtgcacagagaaaaatgcattaaaaatgactaaaaaaaataaaaaattaaaaaatggaaaaatcttttctttttgccttttggccctaggatcgtgtttaggaggat

SEQ ID NO: 47232 - DNA, 3499 bp, Homo sapiens
ctttgtttctctctctcccttttttcttttcagtgcagaagtttttaattttgaccgagccaaatctatcaatctaggcctggcgccgcgtcagcagagggggcggggaggcgagcgcggaactgggggaggggaaggggcggggatcagcaggcggagcggctgccagagttgctgggagtgcgcgcggtcggatcacaaggcggcggcggaggaggcccagagaccggagcgcggagacctcagccagcggcctacgcccaggcctttctccaccggaggaccagggaaccgcagtcttcatcacagaggtaccgtgctccgcgctccccgcctgacccggcccagcccgctgcggcggtgcctccttccttcctccttccctcgcgctctctctttcgcccgcccgcgccttccctgcccgcctgcgtcaccgcggccgccatggctgagaatggcgagagcagcggccccccgcgcccctcccgcggccctgctgcggcccaaggctcggctgctgccccggctgagcctaaaatcatcaaagtcacggtgaagactcccaaagagaaagaggagttcgcggtgcccgagaacagctcggttcagcagtttaaggaagcgatttcgaaacgcttcaaatcccaaaccgatcagctagtgctgatttttgccggaaaaatcttaaaagatcaagataccttgatccagcatggcatccatgatgggctgactgttcaccttgtcatcaaaagccagaaccgacctcagggccagtccacgcagcctagcaatgccgcgggaactaacactacctcggcgtcgactcccaggagtaactccacacctatttccacaaatagcaacccgtttgggttggggagcctgggaggacttgcaggccttagcagcctgggcttgagctcgaccaacttctctgagctccagagccagatgcagcagcagcttatggccagccctgagatgatgatccaaataatggaaaatccctttgttcagagcatgctttcgaatcccgatctgatgaggcagctcattatggctaatccacagatgcagcaattgattcagagaaacccagaaatcagtcacctgctcaacaacccagacataatgaggcagacactcgaaattgccaggaatccagccatgatgcaagagatgatgagaaatcaagacctggctcttagcaatctagaaagcatcccaggtggctataatgctttacggcgcatgtacactgacattcaagagccgatgctgaatgccgcacaagagcagtttgggggtaatccatttgcctccgtggggagtagttcctcctctggggaaggtacgcagccttcccgcacagaaaatcgcgatccactacccaatccatgggcaccaccgccagctacccagagttctgcaactaccagcacgaccacaagcactggtagtgggtctggcaatagttccagcaatgctactgggaacaccgttgctgccgctaattatgtcgccagcatctttagtaccccaggcatgcagagcctgctgcaacagataactgaaaacccccagctgattcagaatatgctgtcggcgccctacatgagaagcatgatgcagtcgctgagccagaatccagatttggctgcacagatgatgctgaatagcccgctgtttactgcaaatcctcagctgcaggagcagatgcggccacagctcccagccttcctgcagcagatgcagaatccagacacactatcagccatgtcaaacccaagagcaatgcaggctttaatgcagatccagcaggggctacagacattagccactgaagcacctggcctgattccgagcttcactccaggtgtgggggtgggggtgctgggaaccgctataggccctgtaggcccagtcacccccataggccccataggccctatagtcccttttacccccataggccccattgggcccataggacccactggccctgcagccccccctggctccaccggctctggtggccccacggggcctactgtgtccagcgctgcacctagtgaaaccacgagtcctacatcagaatctggacccaaccagcagttcattcagcaaatggtgcaggccctggctggagcaaatgctccacagctgccgaatccagaagtcagatttcagcaacaactggaacagctcaacgcaatggggttcttaaaccgtgaagcaaacttgcaggccctaatagcaacaggaggcgacatcaatgcagccattgaaaggctgctgggctcccagccatcgtaatcacatttctgtacctggaaaaaaaatgtatcttatttttgataatggctcttaaatctttaaacacacacacaaaatcgttctttactttcattttgattcttttaaatctgtctagttgtaagtctaatatgatgcattttaagatggagtccctcccttccctccctctttgtttccttccttccttatttcctttagtttccttccttagccgttttgagtggtgggaatcaatgctgtttcactcaaaagtgttgcatgcaaacacttctctttattctgcatttattgtgatttttggaaacaggtatcaaccttcacagttgggtgaacaagtgttgtcctacagatgtccaatttatttgcatttttaaacattagcctatgatagtaatttaatgtagaatgaagatattaaaaacagaagcaaattatttgaagctctctaatttgtggtacgatattgcttattgtgactttggcatgtatttttgctagcaaaatgctgtaagatttataccattgatcttttttgctatatttgtatacagtacagtaagcacaattggcactgtacatctaaaaatattacagtagaatctgagtgtaatatgtgtaaccaaaatgagaaagaatacaagaaatgtttctggagctagttatgtctcacaattttgtagaatcttacagcatctttgataaacttctcagtgaaaatgttggctaggcaagttcagttaaaatatagtagaaatgtttatcctggtatctctaagtatacatttaattgtacagaaaatttacagtgtaacattgtgtcaacatttgcagattgactgtatatgaccttaatctttgtgcagcctgaaggatcagtgtagtaatgccaggaaagtgctttttacctaagacttccttctcagcttctcccataaagagaccctaatatgcattttgatttgtaattggaaatgtaactttcactgaaagtgtcatgtgatgtttgcattacttttaactgctatgtataaaggaaagtgtgtcttttgacttcatcagttatttctcttgtgcacagagaaaaatgcattaaaaatgactaaaaaaaataaaaaattaaaaaatggaaaaatcttttctttttgccttttggccctaggatcgtgtttaggaggat

SEQ ID NO: 47233 - DNA, 3347 bp, Homo sapiens
ctttgtttctctctctcccttttttcttttcagtgcagaagtttttaattttgaccgagccaaatctatcaatctaggcctggcgccgcgtcagcagagggggcggggaggcgagcgcggaactgggggaggggaaggggcggggatcagcaggcggagcggctgccagagttgctgggagtgcgcgcggtcggatcacaaggcggcggcggaggaggcccagagaccggagcgcggagacctcagccagcggcctacgcccaggcctttctccaccggaggaccagggaaccgcagtcttcatcacagaggtaccgtgctccgcgctccccgcctgacccggcccagcccgctgcggcggtgcctccttccttcctccttccctcgcgctctctctttcgcccgcccgcgccttccctgcccgcctgcgtcaccgcggccgccatggctgagaatggcgagagcagcggccccccgcgcccctcccgcggccctgctgcggcccaaggctcggctgctgccccggctgagcctaaaatcatcaaagtcacggtgaagactcccaaagagaaagaggagttcgcggtgcccgagaacagctcggttcagcagtttaaggaagcgatttcgaaacgcttcaaatcccaaaccgatcagctagtgctgatttttgccggaaaaatcttaaaagatcaagataccttgatccagcatggcatccatgatgggctgactgttcaccttgtcatcaaaagccagaaccgacctcagggccagtccacgcagcctagcaatgccgcgggaactaacactacctcggcgtcgactcccaggagtaactccacacctatttccacaaatagcaacccgtttgggttggggagcctgggaggacttgcaggccttagcagcctgggcttgagctcgaccaacttctctgagctccagagccagatgcagcagcagcttatggccagccctgagatgatgatccaaataatggaaaatccctttgttcagagcatgctttcgaatcccgatctgatgaggcagctcattatggctaatccacagatgcagcaattgattcagagaaacccagaaatcagtcacctgctcaacaacccagacataatgaggcagacactcgaaattgccaggaatccagccatgatgcaagagatgatgagaaatcaagacctggctcttagcaatctagaaagcatcccaggtggctataatgctttacggcgcatgtacactgacattcaagagccgatgctgaatgccgcacaagagcagtttgggggtaatccatttgcctccgtggggagtagttcctcctctggggaaggtacgcagccttcccgcacagaaaatcgcgatccactacccaatccatgggcaccaccgccagctacccagagttctgcaactaccagcacgaccacaagcactggtagtgggtctggcaatagttccagcaatgctactgggaacaccgttgctgccgctaattatgtcgccagcatctttagtaccccaggcatgcagagcctgctgcaacagataactgaaaacccccagctgattcagaatatgctgtcggcgccctacatgagaagcatgatgcagtcgctgagccagaatccagatttggctgcacagatgatgctgaatagcccgctgtttactgcaaatcctcagctgcaggagcagatgcggccacagctcccagccttcctgcagcagatgcagaatccagacacactatcagccatgtcaaacccaagagcaatgcaggctttaatgcagatccagcaggggctacagacattagccactgaagcacctagtgaaaccacgagtcctacatcagaatctggacccaaccagcagttcattcagcaaatggtgcaggccctggctggagcaaatgctccacagctgccgaatccagaagtcagatttcagcaacaactggaacagctcaacgcaatggggttcttaaaccgtgaagcaaacttgcaggccctaatagcaacaggaggcgacatcaatgcagccattgaaaggctgctgggctcccagccatcgtaatcacatttctgtacctggaaaaaaaatgtatcttatttttgataatggctcttaaatctttaaacacacacacaaaatcgttctttactttcattttgattcttttaaatctgtctagttgtaagtctaatatgatgcattttaagatggagtccctccctcctacttccctcactccctttctcctttgcttatttttcctaccttcccttcctcttgtctccccactccctccctctttgtttccttccttccttatttcctttagtttccttccttagccgttttgagtggtgggaatcaatgctgtttcactcaaaagtgttgcatgcaaacacttctctttattctgcatttattgtgatttttggaaacaggtatcaaccttcacagttgggtgaacaagtgttgtcctacagatgtccaatttatttgcatttttaaacattagcctatgatagtaatttaatgtagaatgaagatattaaaaacagaagcaaattatttgaagctctctaatttgtggtacgatattgcttattgtgactttggcatgtatttttgctagcaaaatgctgtaagatttataccattgatcttttttgctatatttgtatacagtacagtaagcacaattggcactgtacatctaaaaatattacagtagaatctgagtgtaatatgtgtaaccaaaatgagaaagaatacaagaaatgtttctggagctagttatgtctcacaattttgtagaatcttacagcatctttgataaacttctcagtgaaaatgttggctaggcaagttcagttaaaatatagtagaaatgtttatcctggtatctctaagtatacatttaattgtacagaaaatttacagtgtaacattgtgtcaacatttgcagattgactgtatatgaccttaatctttgtgcagcctgaaggatcagtgtagtaatgccaggaaagtgctttttacctaagacttccttctcagcttctcccataaagagaccctaatatgcattttgatttgtaattggaaatgtaactttcactgaaagtgtcatgtgatgtttgcattacttttaactgctatgtataaaggaaagtgtgtcttttgacttcatcagttatttctcttgtgcacagagaaaaatgcattaaaaatgactaaaaaaaataaaaaattaaaaaatggaaaaatcttttctttttgccttttggccctaggatcgtgtttaggaggat

SEQ ID NO: 47234 - DNA, 2077 bp, Homo sapiens
ctctgcatgcctggggtactaaagatgctggcgacataattagcggcagcaacggtgttcccagtagcctgctgcaacagataactgaaaacccccagctgattcagaatatgctgtcggcgccctacatgagaagcatgatgcagtcgctgagccagaatccagatttggctgcacagatgatgctgaatagcccgctgtttactgcaaatcctcagctgcaggagcagatgcggccacagctcccagccttcctgcagcagatgcagaatccagacacactatcagccatgtcaaacccaagagcaatgcaggctttaatgcagatccagcaggggctacagacattagccactgaagcacctggcctgattccgagcttcactccaggtgtgggggtgggggtgctgggaaccgctataggccctgtaggcccagtcacccccataggccccataggccctatagtcccttttacccccataggccccattgggcccataggacccactggccctgcagccccccctggctccaccggctctggtggccccacggggcctactgtgtccagcgctgcacctagtgaaaccacgagtcctacatcagaatctggacccaaccagcagttcattcagcaaatggtgcaggccctggctggagcaaatgctccacagctgccgaatccagaagtcagatttcagcaacaactggaacagctcaacgcaatggggttcttaaaccgtgaagcaaacttgcaggccctaatagcaacaggaggcgacatcaatgcagccattgaaaggctgctgggctcccagccatcgtaatcacatttctgtacctggaaaaaaaatgtatcttatttttgataatggctcttaaatctttaaacacacacacaaaatcgttctttactttcattttgattcttttaaatctgtctagttgtaagtctaatatgatgcattttaagatggagtccctccctcctacttccctcactccctttctcctttgcttatttttcctaccttcccttcctcttgtctccccactccctccctctttgtttccttccttccttatttcctttagtttccttccttagccgttttgagtggtgggaatcaatgctgtttcactcaaaagtgttgcatgcaaacacttctctttattctgcatttattgtgatttttggaaacaggtatcaaccttcacagttgggtgaacaagtgttgtcctacagatgtccaatttatttgcatttttaaacattagcctatgatagtaatttaatgtagaatgaagatattaaaaacagaagcaaattatttgaagctctctaatttgtggtacgatattgcttattgtgactttggcatgtatttttgctagcaaaatgctgtaagatttataccattgatcttttttgctatatttgtatacagtacagtaagcacaattggcactgtacatctaaaaatattacagtagaatctgagtgtaatatgtgtaaccaaaatgagaaagaatacaagaaatgtttctggagctagttatgtctcacaattttgtagaatcttacagcatctttgataaacttctcagtgaaaatgttggctaggcaagttcagttaaaatatagtagaaatgtttatcctggtatctctaagtatacatttaattgtacagaaaatttacagtgtaacattgtgtcaacatttgcagattgactgtatatgaccttaatctttgtgcagcctgaaggatcagtgtagtaatgccaggaaagtgctttttacctaagacttccttctcagcttctcccataaagagaccctaatatgcattttgatttgtaattggaaatgtaactttcactgaaagtgtcatgtgatgtttgcattacttttaactgctatgtataaaggaaagtgtgtcttttgacttcatcagttatttctcttgtgcacagagaaaaatgcattaaaaatgactaaaaaaaataaaaaattaaaaaatggaaaaatcttttctttttgccttttggccctaggatcgtgtttaggaggat

SEQ ID NO: 47235 - DNA, 1227 bp, Homo sapiens
gtcagccataggacaggcctcctgcacacctagggaaggctggctaatcatgtccccaccctccatggccacctccgtgcaccagaaatcagggtaagctgggtgtccctggccatgcaagttcttagctgtgtcctctgacctacttccctcactccctttctcctttgcttatttttcctaccttcccttcctcttgtctccccactccctccctctttgtttccttccttccttatttcctttagtttccttccttagccgttttgagtggtgggaatcaatgctgtttcactcaaaagtgttgcatgcaaacacttctctttattctgcatttattgtgatttttggaaacaggtatcaaccttcacagttgggtgaacaagtgttgtcctacagatgtccaatttatttgcatttttaaacattagcctatgatagtaatttaatgtagaatgaagatattaaaaacagaagcaaattatttgaagctctctaatttgtggtacgatattgcttattgtgactttggcatgtatttttgctagcaaaatgctgtaagatttataccattgatcttttttgctatatttgtatacagtacagtaagcacaattggcactgtacatctaaaaatattacagtagaatctgagtgtaatatgtgtaaccaaaatgagaaagaatacaagaaatgtttctggagctagttatgtctcacaattttgtagaatcttacagcatctttgataaacttctcagtgaaaatgttggctaggcaagttcagttaaaatatagtagaaatgtttatcctggtatctctaagtatacatttaattgtacagaaaatttacagtgtaacattgtgtcaacatttgcagattgactgtatatgaccttaatctttgtgcagcctgaaggatcagtgtagtaatgccaggaaagtgctttttacctaagacttccttctcagcttctcccataaagagaccctaatatgcattttgatttgtaattggaaatgtaactttcactgaaagtgtcatgtgatgtttgcattacttttaactgctatgtataaaggaaagtgtgtcttttgacttcatcagttatttctcttgtgcacagagaaaaatgcattaaaaatgactaaaaaaaataaaaaattaaaaaatggaaaaatcttttctttttgccttttggccctaggatcgtgtttaggaggat

SEQ ID NO: 47236 - DNA, 3566 bp, Homo sapiens
ctttgtttctctctctcccttttttcttttcagtgcagaagtttttaattttgaccgagccaaatctatcaatctaggcctggcgccgcgtcagcagagggggcggggaggcgagcgcggaactgggggaggggaaggggcggggatcagcaggcggagcggctgccagagttgctgggagtgcgcgcggtcggatcacaaggcggcggcggaggaggcccagagaccggagcgcggagacctcagccagcggcctacgcccaggcctttctccaccggaggaccagggaaccgcagtcttcatcacagaggtaccgtgctccgcgctccccgcctgacccggcccagcccgctgcggcggtgcctccttccttcctccttccctcgcgctctctctttcgcccgcccgcgccttccctgcccgcctgcgtcaccgcggccgccatggctgagaatggcgagagcagcggccccccgcgcccctcccgcggccctgctgcggcccaaggctcggctgctgccccggctgagcctaaaatcatcaaagtcacggtgaagactcccaaagagaaagaggagttcgcggtgcccgagaacagctcggttcagcagtttaaggaagcgatttcgaaacgcttcaaatcccaaaccgatcagctagtgctgatttttgccggaaaaatcttaaaagatcaagataccttgatccagcatggcatccatgatgggctgactgttcaccttgtcatcaaaagccagaaccgacctcagggccagtccacgcagcctagcaatgccgcgggaactaacactacctcggcgtcgactcccaggagtaactccacacctatttccacaaatagcaacccgtttgggttggggagcctgggaggacttgcaggccttagcagcctgggcttgagctcgaccaacttctctgagctccagagccagatgcagcagcagcttatggccagccctgagatgatgatccaaataatggaaaatccctttgttcagagcatgctttcgaatcccgatctgatgaggcagctcattatggctaatccacagatgcagcaattgattcagagaaacccagaaatcagtcacctgctcaacaacccagacataatgaggcagacactcgaaattgccaggaatccagccatgatgcaagagatgatgagaaatcaagacctggctcttagcaatctagaaagcatcccaggtggctataatgctttacggcgcatgtacactgacattcaagagccgatgctgaatgccgcacaagagcagtttgggggtaatccatttgcctccgtggggagtagttcctcctctggggaaggtacgcagccttcccgcacagaaaatcgcgatccactacccaatccatgggcaccaccgccagctacccagagttctgcaactaccagcacgaccacaagcactggtagtgggtctggcaatagttccagcaatgctactgggaacaccgttgctgccgctaattatgtcgccagcatctttagtaccccaggcatgcagagcctgctgcaacagataactgaaaacccccagctgattcagaatatgctgtcggcgccctacatgagaagcatgatgcagtcgctgagccagaatccagatttggctgcacagatgatgctgaatagcccgctgtttactgcaaatcctcagctgcaggagcagatgcggccacagctcccagccttcctgcagcagatgcagaatccagacacactatcagccatgtcaaacccaagagcaatgcaggctttaatgcagatccagcaggggctacagacattagccactgaagcacctggcctgattccgagcttcactccaggtgtgggggtgggggtgctgggaaccgctataggccctgtaggcccagtcacccccataggccccataggccctatagtcccttttacccccataggccccattgggcccataggacccactggccctgcagccccccctggctccaccggctctggtggccccacggggcctactgtgtccagcgctgcacctagtgaaaccacgagtcctacatcagaatctggacccaaccagcagttcattcagcaaatggtgcaggccctggctggagcaaatgctccacagctgccgaatccagaagtcagatttcagcaacaactggaacagctcaacgcaatggggttcttaaaccgtgaagcaaacttgcaggccctaatagcaacaggaggcgacatcaatgcagccattgaaaggctgctgggctcccagccatcgtaatcacatttctgtacctggaaaaaaaatgtatcttatttttgataatggctcttaaatctttaaacacacacacaaaatcgttctttactttcattttgattcttttaaatctgtctagttgtaagtctaatatgatgcattttaagatggagtccctccctcctacttccctcactccctttctcctttgcttatttttcctaccttcccttcctcttgtctccccactccctccctctttgtttccttccttccttatttcctttagtttccttccttagccgttttgagtggtgggaatcaatgctgtttcactcaaaagtgttgcatgcaaacacttctctttattctgcatttattgtgatttttggaaacaggtatcaaccttcacagttgggtgaacaagtgttgtcctacagatgtccaatttatttgcatttttaaacattagcctatgatagtaatttaatgtagaatgaagatattaaaaacagaagcaaattatttgaagctctctaatttgtggtacgatattgcttattgtgactttggcatgtatttttgctagcaaaatgctgtaagatttataccattgatcttttttgctatatttgtatacagtacagtaagcacaattggcactgtacatctaaaaatattacagtagaatctgagtgtaatatgtgtaaccaaaatgagaaagaatacaagaaatgtttctggagctagttatgtctcacaattttgtagaatcttacagcatctttgataaacttctcagtgaaaatgttggctaggcaagttcagttaaaatatagtagaaatgtttatcctggtatctctaagtatacatttaattgtacagaaaatttacagtgtaacattgtgtcaacatttgcagattgactgtatatgaccttaatctttgtgcagcctgaaggatcagtgtagtaatgccaggaaagtgctttttacctaagacttccttctcagcttctcccataaagagaccctaatatgcattttgatttgtaattggaaatgtaactttcactgaaagtgtcatgtgatgtttgcattacttttaactgctatgtataaaggaaagtgtgtcttttgacttcatcagttatttctcttgtgcacagagaaaaatgcattaaaaatgactaaaaaaaataaaaaattaaaaaatggaaaaatcttttctttttgccttttggccctaggatcgtgtttaggaggat

SEQ ID NO: 47237 - DNA, 3545 bp, Homo sapiens
ctttgtttctctctctcccttttttcttttcagtgcagaagtttttaattttgaccgagccaaatctatcaatctaggcctggcgccgcgtcagcagagggggcggggaggcgagcgcggaactgggggaggggaaggggcggggatcagcaggcggagcggctgccagagttgctgggagtgcgcgcggtcggatcacaaggcggcggcggaggaggcccagagaccggagcgcggagacctcagccagcggcctacgcccaggcctttctccaccggaggaccagggaaccgcagtcttcatcacagaggtaccgtgctccgcgctccccgcctgacccggcccagcccgctgcggcggtgcctccttccttcctccttccctcgcgctctctctttcgcccgcccgcgccttccctgcccgcctgcgtcaccgcggccgccatggctgagaatggcgagagcagcggccccccgcgcccctcccgcggccctgctgcggcccaaggctcggctgctgccccggctgagcctaaaatcatcaaagtcacggtgaagactcccaaagagaaagaggagttcgcggtgcccgagaacagctcggttcagcagtttaaggaagcgatttcgaaacgcttcaaatcccaaaccgatcagctagtgctgatttttgccggaaaaatcttaaaagatcaagataccttgatccagcatggcatccatgatgggctgactgttcaccttgtcatcaaaagccagaaccgacctcagggccagtccacgcagcctagcaatgccgcgggaactaacactacctcggcgtcgactcccaggagtaactccacacctatttccacaaatagcaacccgtttgggttggggagcctgggaggacttgcaggccttagcagcctgggcttgagctcgaccaacttctctgagctccagagccagatgcagcagcagcttatggccagccctgagatgatgatccaaataatggaaaatccctttgttcagagcatgctttcgaatcccgatctgatgaggcagctcattatggctaatccacagatgcagcaattgattcagagaaacccagaaatcagtcacctgctcaacaacccagacataatgaggcagacactcgaaattgccaggaatccagccatgatgcaagagatgatgagaaatcaagacctggctcttagcaatctagaaagcatcccaggtggctataatgctttacggcgcatgtacactgacattcaagagccgatgctgaatgccgcacaagagcagtttgggggtaatccatttgcctccgtggggagtagttcctcctctggggaaggtacgcagccttcccgcacagaaaatcgcgatccactacccaatccatgggcaccaccgccagctacccagagttctgcaactaccagcacgaccacaagcactggtagtgggtctggcaatagttccagcaatgctactgggaacaccgttgctgccgctaattatgtcgccagcatctttagtaccccaggcatgcagagcctgctgcaacagataactgaaaacccccagctgattcagaatatgctgtcggcgccctacatgagaagcatgatgcagtcgctgagccagaatccagatttggctgcacagatgatgctgaatagcccgctgtttactgcaaatcctcagctgcaggagcagatgcggccacagctcccagccttcctgcagcagatgcagaatccagacacactatcagccatgtcaaacccaagagcaatgcaggctttaatgcagatccagcaggggctacagacattagccactgaagcacctggcctgattccgagcttcactccaggtgtgggggtgggggtgctgggaaccgctataggccctgtaggcccagtcacccccataggccccataggccctatagtcccttttacccccataggccccattgggcccataggacccactggccctgcagccccccctggctccaccggctctggtggccccacggggcctactgtgtccagcgctgcacctagtgaaaccacgagtcctacatcagaatctggacccaaccagcagttcattcagcaaatggtgcaggccctggctggagcaaatgctccacagctgccgaatccagaagtcagatttcagcaacaactggaacagctcaacgcaatggggttcttaaaccgtgaagcaaacttgcaggccctaatagcaacaggaggcgacatcaatgcagccattgaaaggctgctgggctcccagccatcgtaatcacatttctgtacctggaaaaaaaatgtatcttatttttgataatggctcttaaatctttaaacacacacacaaaatcgttctttactttcattttgattcttttaaatctgtctagttgtaagtctaatatgatgcattttaagatggagtccctccctctcctttgcttatttttcctaccttcccttcctcttgtctccccactccctccctctttgtttccttccttccttatttcctttagtttccttccttagccgttttgagtggtgggaatcaatgctgtttcactcaaaagtgttgcatgcaaacacttctctttattctgcatttattgtgatttttggaaacaggtatcaaccttcacagttgggtgaacaagtgttgtcctacagatgtccaatttatttgcatttttaaacattagcctatgatagtaatttaatgtagaatgaagatattaaaaacagaagcaaattatttgaagctctctaatttgtggtacgatattgcttattgtgactttggcatgtatttttgctagcaaaatgctgtaagatttataccattgatcttttttgctatatttgtatacagtacagtaagcacaattggcactgtacatctaaaaatattacagtagaatctgagtgtaatatgtgtaaccaaaatgagaaagaatacaagaaatgtttctggagctagttatgtctcacaattttgtagaatcttacagcatctttgataaacttctcagtgaaaatgttggctaggcaagttcagttaaaatatagtagaaatgtttatcctggtatctctaagtatacatttaattgtacagaaaatttacagtgtaacattgtgtcaacatttgcagattgactgtatatgaccttaatctttgtgcagcctgaaggatcagtgtagtaatgccaggaaagtgctttttacctaagacttccttctcagcttctcccataaagagaccctaatatgcattttgatttgtaattggaaatgtaactttcactgaaagtgtcatgtgatgtttgcattacttttaactgctatgtataaaggaaagtgtgtcttttgacttcatcagttatttctcttgtgcacagagaaaaatgcattaaaaatgactaaaaaaaataaaaaattaaaaaatggaaaaatcttttctttttgccttttggccctaggatcgtgtttaggaggat

SEQ ID NO: 47238 - DNA, 2072 bp, Homo sapiens
gcggccctactactactactaaattcgcaaccagtcatctttagtaccccaggcatgcagagcctgctgcaacagataactgaaaacccccagctgattcagaatatgctgtcggcgccctacatgagaagcatgatgcagtcgctgagccagaatccagatttggctgcacagatgatgctgaatagcccgctgtttactgcaaatcctcagctgcaggagcagatgcggccacagctcccagccttcctgcagcagatgcagaatccagacacactatcagccatgtcaaacccaagagcaatgcaggctttaatgcagatccagcaggggctacagacattagccactgaagcacctggcctgattccgagcttcactccaggtgtgggggtgggggtgctgggaaccgctataggccctgtaggcccagtcacccccataggccccataggccctatagtcccttttacccccataggccccattgggcccataggacccactggccctgcagccccccctggctccaccggctctggtggccccacggggcctactgtgtccagcgctgcacctagtgaaaccacgagtcctacatcagaatctggacccaaccagcagttcattcagcaaatggtgcaggccctggctggagcaaatgctccacagctgccgaatccagaagtcagatttcagcaacaactggaacagctcaacgcaatggggttcttaaaccgtgaagcaaacttgcaggccctaatagcaacaggaggcgacatcaatgcagccattgaaaggctgctgggctcccagccatcgtaatcacatttctgtacctggaaaaaaaatgtatcttatttttgataatggctcttaaatctttaaacacacacacaaaatcgttctttactttcattttgattcttttaaatctgtctagttgtaagtctaatatgatgcattttaagatggagtccctccctcctacttccctcactccctttctcctttgcttatttttcctaccttcccttcctcttgtctccccactccctccctctttgtttccttccttccttatttcctttagtttccttccttagccgttttgagtggtgggaatcaatgctgtttcactcaaaagtgttgcatgcaaacacttctctttattctgcatttattgtgatttttggaaacaggtatcaaccttcacagttgggtgaacaagtgttgtcctacagatgtccaatttatttgcatttttaaacattagcctatgatagtaatttaatgtagaatgaagatattaaaaacagaagcaaattatttgaagctctctaatttgtggtacgatattgcttattgtgactttggcatgtatttttgctagcaaaatgctgtaagatttataccattgatcttttttgctatatttgtatacagtacagtaagcacaattggcactgtacatctaaaaatattacagtagaatctgagtgtaatatgtgtaaccaaaatgagaaagaatacaagaaatgtttctggagctagttatgtctcacaattttgtagaatcttacagcatctttgataaacttctcagtgaaaatgttggctaggcaagttcagttaaaatatagtagaaatgtttatcctggtatctctaagtatacatttaattgtacagaaaatttacagtgtaacattgtgtcaacatttgcagattgactgtatatgaccttaatctttgtgcagcctgaaggatcagtgtagtaatgccaggaaagtgctttttacctaagacttccttctcagcttctcccataaagagaccctaatatgcattttgatttgtaattggaaatgtaactttcactgaaagtgtcatgtgatgtttgcattacttttaactgctatgtataaaggaaagtgtgtcttttgacttcatcagttatttctcttgtgcacagagaaaaatgcattaaaaatgactaaaaaaaataaaaaattaaaaaatggaaaaatcttttctttttgccttttggccctaggatcgtgtttaggaggat

SEQ ID NO: 47239 - DNA, 632 bp, Homo sapiens
cgatgtagggagtgagtccggaaggggaatcctcggatctcccacaggatggggatgggggtgttaaggaggagtcctgaaaacctccttgtttctccgacctctcctgaacacaggactcttttctgcctcagtttccctgcttcattaatctgagtacaacccgactgaccctcatataaaaaacttgacactaacagcttgggcacacccgtgaagattcagggatggggacttcaaatggaaaggtggtcgtttaatcattctgcatttcttccagactccaatccaaattctgggttgctgggactgtggtctgagagaagaactcggaagtggaaggctgggactgcagataggaaccgttagccatgcagcctgggattagggaaggggtgacgccagcactccctgagctgcccagactggtgtctcagtaggtcctgtgccccccgcagtctactgtctccgggcccagctcagcactaggacttgcagtccttgtggcctacacttgggattgggcataggaaatagagttaggggccgggtgaggtggttcacgcctgtaatcccaacactttaggaggccaaggggggtggatcacctgaggtcagggagtcaagaccag

SEQ ID NO: 47240 - DNA, 263 bp, Homo sapiens
attaaacagtgtacttttaaataacccatgagcccaagaaaaaaaatgttacaggtaagattagaaaatattttaaatagaatgaaaatgaaaacaacatgctaaaatttgtgggatacacctcaatcgatgttagaaattatagctttgcttatatttataaaagtacaaaatcactgataaaagatttcaccttaggaaaccagaagataaagagcaaattaaagccaaataagcataatagcaaggcaataataatagtg

SEQ ID NO: 47241 - DNA, 545 bp, Homo sapiens
taatgttttaagaaagtttaagtatttgtgttgggctgcattcaaagctgtcctgggccacatgccacccatgggctgcaggttggaaaagcttgacctggattcttctagctaattgtgagtataggagaaggccgtctgtttactgcttctggagccctctgcgtaagtgcaattaggaacgagtggaaacaatgaggaggggagcataagaatagcttggttgtgaccactggaacccaaagcagcacttgtcttgtcagcgctgtgttatcaatcaggaaggcagccgtggcttctcccgggaggcaggcaccaagatgaggaagcctgaagttctgggccctgcagagtcctttcagtgcaggggggcagagagaaggagcgtgaggagacccacatgggaggcatgcaggaggccctctgtgtatgtctatggaatgggcccctcaaggagccgctaagcagcgggaaactccacccactggcttattctcacccctgggctcctccatcccctcacccttcatagagcccaaaacaaa

SEQ ID NO: 47242 - DNA, 704 bp, Homo sapiens
ggttccagttttattagctacatagcctgcaagcagagagcacggtggcaccaaccaaccaggctgtatttggggactgtcgcttatttttcatgcacttggtgctgaggcttgaattggtacaataagatgcaatacctgcccaacatttcttattcagggcctagttaaaccttgaactgggaagaagcagcctttgtttgggggagcgtgttcttctgcagcagatccttttggttgaaccatgaaataataagactcggtttgcacaactgtgaatgcccaagttggctgaattcttggtacagaggcagagggacgggatgcctgtctttggaaatatgaacgtactggctgctttgttcacgatgactcagtgtttgtatgaccttggttttactaaacatctgaaggcacttttgtcaggtgtcctccatttgcccaatgtaaccgtattttatttctgagacacagtcgtgccctttaacacagtctgtttttcgaggaggaggattcacttaccgcccttgaaaaccaaggtcagtctggggctggtgatgggcatttggactgttccttgggttcaaggtgattttctcttacaaagttttcaccctctgtaattggcctcggaagaccacacataaataaggaaagacagttttctgtatgccggtcctcttcacctctggactgtggtgggc

SEQ ID NO: 47243 - DNA, 121 bp, Homo sapiens
tgtttttaggaaatattatagtaataaaatttgactggttactgtgtgcctgagatggtgtctaagccctttacattatttaactcgtttattttcacaattctatgaagtaaatcgtatt

SEQ ID NO: 47244 - DNA, 389 bp, Homo sapiens
ttgctaacagaacactgagaacagtgccagcccctgtctaagcatgtcctgtgtattaactcacatgatcttaagagtatttgcagaagggcagtagcctgctctgtcaacccctagcaaaatgacacctggagggcaaccaggcttgcaaagcacccccgaagggctgagcagcccctgaggttgacagctcatcaactccctcagctcagccagctttcacgttgtcagacctgcttaatggcagaaggcacaggtatcttgtggcgaatgtgcctggttctctcaacacgaccacacagattttgccttggacactggctgcttcttactttgatcaagatgactgatcgctaagaaacctgggcagttgaggcggctttctagag

SEQ ID NO: 47245 - DNA, 566 bp, Homo sapiens
tgcctagaaatcacatatatgtttatatattatatatttaagtaagaaaaaaacccttttgacctctttggatatgtattctacatatctacatagcaccagattttctgaagtgaaaaagtaaaagaccctgatttaagtaatatatatcatttaatgactataatatctgtttatttttttaaatattgaattaactctttctttctaaaatatgtttcatactccttagtttttttctactctaggtacaacttttcaaccttttttatatttcaaagtccagtggtattaagtatgaaatggtgcttaacctcaaatgttagaaatataaagcttatcctaagtagtttctgaaaagattgcaatctgcttggaattttcttttttatatattaattttcatttttacaagaaatccattgtgtttaaattcccttaacagtacattcaaaatcaggaatattacactttcattgcccatctttacaattgttattaacttctcagggtaattttaagcattggtaataccttaaataaattgctttttgtaaacacttaga

SEQ ID NO: 47246 - DNA, 909 bp, Homo sapiens
agctgaaactgtcatccttgaatttctcctcaggacagttctcctattctccaggagaccttcaaagtcccttccaactctgaaattttaagattctatgaaatgtagacgtatggagtgaggtttcaggcagttttgaaaggatcataactgtagtttccatttgcattaagtgtgaattgtactgaagtgggtgttctttggtgtaccccataatatctcaaacattatttggtatacagtacatactcattaagaattatagcctcattagactatgatatagattagtcaatctcaattctgatcatttaaactccattatatgctattaccaaatattaatcttttaaacaacagaaataattcatatatttgtaaaataaaatcaaaaacatagataggaaattgttaaaggtttaaattaaactctaaattccatgagagttgttgggcaagtcttcctttttctatgcacaactccctctggagtttttaaccctgtaccatgaaaattcctgatgagcaaaaacttgaaagcaaggtatgggaaagagttacaaatactctggtccaagctaaaatcacttgtggggatgatgcaacctcaatttaacagaaactacaacatcttccccttagtatgacaataaacttccagagaaaaatgcaagaaacaagaatgcctagagctgagagggagagttgggttaggagtgatggctaaggagtgcatggtttctttttgaggttattaaaatgttctaagagtgactgtggtgatgaatatataactctgaatatcctaatgaatatataactgtgaatttactaaaagtcactgaatttgtacacttcaagtggcaaattatatggtatgtgaattatatctcaaagctgatttaaaaa

SEQ ID NO: 47247 - DNA, 416 bp, Homo sapiens
tctcttctctctttttccaacgacttccacttctctctctagtttacatgtctccaaaccttaagcctctgttaatactttcacaataagtcaattttgccaacggtttgcctcccctagaccatctaggctgggcccagaacacctcatcttcactcccactgaagtgttcctgaaggtcagctctcactgaccttgattctgctcccctacactgtcaccagaagctatccacctatggttctaattcagtaagtccaactctctcaccccctttttttgtctcagctgtgtgggctttcccaggatggcatgcaatgggacccctgtgccatgcatattgtaaaggaaaatgcctccctccatgcgctacaaaacagcacatttatgatggcactttgaaaagatatgggttg

SEQ ID NO: 47248 - DNA, 385 bp, Homo sapiens
aaacttgaagatactaaagacagaatacaataaaatgctgtgtgtgaactttggaccctagtgttttaaggaaagctataaaagacattaaggggacaaatgagagaaatctggatatgaataatatatgataatgtctgaaaattactgtttattttcttagatgctacaatggtattgtaccaactttgaggaatatgctgtgatattgaaaataaattgccatgtttacaattgactttattatggatcaatgggaaaaaagaagtagaaaaaacaaacactgcaaatgtcacaactgttaaatcgctgtatttttcattcatactatactttcaacaattaaaaaaatatatatatattttaatagagatggagtcttgct

SEQ ID NO: 47249 - DNA, 1226 bp, Homo sapiens
ggaaagaatatttgcaaactatccatctgtattaggccattcttgaagtactataaagaaatacgtgagactgggtaatttataaagaagaggtttaattggctcacagttttgcaggctgtacaggaagcatggtgctaacatctgatcagcttgtagggaggcatcaggaagcttccaaccattgtggaaggcaaaaggggaataagtatctcacatggcaggagcaagggcaaagagagggggagggaggtgccacacacttaaccagatcttgtgagtactcaggtcttgtgagggttgcctgaggtccagggataccccatttaccctgatgtgttcatatacatttccatgactgtatcaaaatatctcatgtacccccataaacatatacacctatttgtacccacaaaaatttaaaaataatttcaatgtttgaagactcattattaaaataatagcagtttctataaatttaatatttcaataaaactcccaatatttattcttaacactggaaaaacttttccaaaatgcatatggcagaaatatgggcgttgatgaaaggacagcatcaattaatgagggatcctcccccttgacgaaaataccttccaccaagacccacctttaatgctgaggattacatctcaaaatgagatttgggcagggacaaatatccaaactatatcactagctatatcaggagctgtaactataactatatcaggaactataacaattctatagaaaaaaaattaatctgaaaactggacaaaaatctgaataggcatttctcgaaagaagacatacaaatggcaaacaggcatatgaaaatgtactcaacatcattgatccattagagaaatgcaaatcaaaactacaatgagatatcatctcaccccagttaaaatatcttctgtccaaaagacaggtaacaacaaatgctgaagaggatgtggagaaaagggaaccctcgtgcactgtggaagtgtatattagtacaaccactatggagaacagtttgtaggtacctcaaaaactaaaaatagagttaccatacaatccagcaattccactggtaggtatataccccaaagaaaggaaatcagtatattgaagataaatctgcaccatgtttactgtagcactactcgcaatagccaagatttggaagcaatccaagtgtccatcagcagatgaatggataaataaaatatggt

SEQ ID NO: 47250 - DNA, 401 bp, Homo sapiens
catatgtgagatataagacactatagcttctgctgttactttagtgtcctctctaagttgaaactctcaacagctcagtgaagtatctataaaggatattatcaccacttaggggatatgtgacttgccgaaaatcacccagtaagcttgtgatagagctcgaactagaatctaggcctcctaatacctagttcctttttttccttctattttagtgttcaaagttatgagtatggaaccacatttctaattatcattagccagaagatacacatgactgttctgagatgtctttttttttttttttttttgaaacggagtctcgctctgttgcccaggctggagtgcagtggcgtgatctcggctcactgcaagctccgcctcctgggttcacgccattc

SEQ ID NO: 47251 - DNA, 223 bp, Homo sapiens
tgtttaccaaaacttctaaatcactgggaaaacataaggtcaggattatgagtaaaattaatgtaaccactgagtaaatagagaatatttttaataagtttgaaaatcagattaaaagatcatggttactttgaggcctaaacattaaaaatctgctatattaaaataatgtacataggctgggtgtggtggctcatgccagtaatcccagcactttgggagg

SEQ ID NO: 47252 - DNA, 509 bp, Homo sapiens
taaatggcaaagaaagtaaagtctcaaatttcttgcttatgtgtcattatgccataaagttggggacatatttccaatttgtccagtgttttcattttgaaacattaaaactggtttattgtactattgaaattttattagaatactttcttgtactttcataattaagaaattagggtaatattaagaatttaaacactaaaaccctgatgaaagttatttttctccattaataatatttttatttgtatttcaattagaagtgatctattgtttatattattttctaagaatctaagagtgtgttttttaaacatataacaatagaatccagtaagcattttaattaaggactgcatattatcacttaacctatttagcagattgtagaggcaaaatgcttgcatgcctattttttaaggattctatctttgtaagctatattttaacttttattgattgaaatatagatttttggtcatataatgactgcctacctccaattacag

SEQ ID NO: 47253 - DNA, 311 bp, Homo sapiens
accaccacacctggctaatttttgtatttttagtagagacggggtttcgccatgttggccaggctggtctcaaacccctgacctcagatgatctgcccaccttggcctcccaaagtgctggaattacaggcttgagctgttgactccctcttgagttccttcctgtgtaaagccaagaacccatgtgacctcctgggctgagcctctaattttggggtcgccctgtgacaggattacaggcatgtgctaccacgcctggctaattttttttttttggagggagaggggtctcactatgttgcccaggctgg

SEQ ID NO: 47254 - DNA, 107 bp, Homo sapiens
ctggaatgtgatggagctgtagactgaggatggccgagcaacaagtggggaggaatgtgggaccctggtgaccatgaagccaccctggcagccctgcaggacaaaag

SEQ ID NO: 47255 - DNA, 408 bp, Homo sapiens
ttgagatgaagtctcgctctgtcgcccaggctggagtgcagtggcaccatctcagctcactgcaacctctgcctcccaggttcaagcaattctcctgtctcagcctcccaagtagctgggactacaggtgcacgccaccacgcccggctaatttttatatttttagtagagacgtggtttcaccatattggtcaggctggtctcaaactcctgacctcaagtgatccgcccacctcagcctcccaaagtgctgggactacaggtgtgagccaccacacccagccttaaaatgtgatttttaaatcatgttttcctaaacaaaattataagatgccttgctaacatctaaatcaagaaataccatctccaagaaacacaatcaacaaacaatccccatctttaagagcc

SEQ ID NO: 47256 - DNA, 285 bp, Homo sapiens
gtttccaacagagttagatttggccgtatgtccaagttgtggccaataaaatgcaagaggttgtgcgccatttctaggccccatctgtaaactcacacgctctttgccctccactagctgatgtcagtgcccaaattgaccttggaggtcatgggctgaagatggtggaattgcgaccaccttgggtccctgaatgactgcatggagcaaagtccctgcattgacttggatctacgttgggctgttacacaagtttagaattaaactgtaatgtgtgaagccatt

SEQ ID NO: 47257 - DNA, 1118 bp, Homo sapiens
  misc_feature (763)..(763): n is a, c, g, or t
agaagccagacggagctcggagatgtggagggcagacgcaggcgcatttggaaaagggactggcggtgggaggcgcagagggaaaaaggaacgacacaatcgggcttcctagccgctggcggacccgatggggcgtcctgcgagggttcggcgagggttctgccaggatagtagcattgcgcccaaggagtgagaggcacccggggctactggagccagaccctcaacccgccctagtgggaggcgaagaacaacgaaagcctcgtattcccatttctctaatggctaatgacattaaaggttttcatatggttatttgccatctgcatatcttcagtgaagtgtctgtttatgtcttctgactattttctaattggatttttaaaaataattgatttttgagttatttacatattctagatactggttgtatgccagatatatggcttgtaaatattttctcctaggtaaaccttttcagtatcgttacagggtctttcacaaagcaaaagttttaaatttatggagtctaattcatcaacatttctttttaccggtcttgccactaatgtcaatttaagaaccttttgcctagccttagacaatagtttgttgttttttaaaaccgttttgtaattttactcgtcacagttatatctagccacttaatttttatgtaagggtaatatggaggggggacgtatgatgtctggctttcagatcattgtggagagatatctggcgcattaacgttttggacatngctaaaacaaggccggtgtgtgagaaatactgtgtaatttaaccgaggagaaatcgtataaatatcacatgtatggcgaatggaaagtgcctacgatgaatgtatgcacatgaggcgtcgagagtacacttagaggatgccgcggcaatttaagcgcgttcctcgtctcctctttttttgtgcgactactgcacttcgacggccagagaaacgacaagagagacggatgctaacaaagtatacagatgagtgacagacagcacaggtacacacacgaaggtgagcatgaggcacgaggctgctgagacgacagcaggacacgcggcacacaccacgtgaagcacacccgcgtggg

SEQ ID NO: 47258 - DNA, 328 bp, Homo sapiens
agacagccttggcagacggatggggagtctggcagttacaggggcccttcctttcctaggtgcaaattgcctgtccagcagctttatcttcagatgggctggcactgtcacttcacaccttattgcttctctgttatcaccaaccaaacccccacagaaggggaggccaaaaccatgtgggaacagatgctacatcctaacagcaagcctgttctatatgtgttttgctggactctcctttcaacaccctctcctgccccaggggtgggtttgggggtactatggtgcaaccccagatatggccattcttctaaatatttcaggccag

SEQ ID NO: 47259 - DNA, 1117 bp, Homo sapiens
cgtggtcagtctagctggctaaaggtttgtccattttgatcttttcaaacaatcagcttctggtttcattgacttttcactgctgtttttgtattctctacttcattaatttccattctaatatttagtatttccttgcttctgtcttgctttaggaacagtttactcttctttttccattaccttaaggtggaagattaggctcttgatttgagatatcttttttagtagaggcattttcaggtattaattattttctaagcactgctttaatgtatctggtaaagttttgggatatcttcattttcactcatctcaaagtattatctaatttcccctgtgactcttctttgaccagatacctttgttttaaaaaaagttattacaatataaatatttgaaagtcatactgagggctttaattataggcaattggagaacgggaatccattgaacctgatttacttctttttacatgattctactttatgtgtctctttctgtaccatctaaaccccctaaaaataatcttgaaacctagtgaaggaacttgagtcactagtgacagtcggttgttgggatagcttgtgaaggctggtggatccatttggttgtagctaatggcgtgaaagaattattaaagttttaaggtttttaataggagtttggaagaaaccttagaacctatgaagtctaatcttgacccaaatagctgtttcttctaaatatctcttgtcagatggtcatctggtttacattccatttcttttatataaagattttcactgtgttgcccaggctggtcgtgaactactgggctcctcctgccttggcctcccaaaacttcgatagctcctcctgccttggcctcccaaagtgttggaattacaggaatgagccacagcacctggcctacattccgtttctagtgttaatacttatgtctgcattagaagaaattatagtgagcttgcctaccaaattgttgaagatctgagaaaggcaccaaggcaacaaaattggaatctcagaacatctcagcagtatgcaacagggatagaatataacaggatgaccttttttcttttttataaagaatatttttaaagttgtgaac

SEQ ID NO: 47260 - DNA, 362 bp, Homo sapiens
aaaattgctggccatttgggtcatgtcagacacagagctcacagggctgagtcacctgttttggtgttttgaaaagatttacccctataaacaaatgagaaattaacagaaaccaagaatcacttctagggtgaaaagaatcatgaaagtgctgaattatattcctatgattggtacttggcattagtaatttattaccatcattcagcagccagaggggccctggactgaaatgcaatccatggcccatttttgttcttctttagagtgttctggcccagttctatgtatgctgaccagcacacccataagcttcattggccctttcagtgcaggggccttggctgtggcatctacaaggg

SEQ ID NO: 47261 - DNA, 324 bp, Homo sapiens
ccagcgtcccgttgaatgtgtcttgagctttatctacgctgggtttttgttccccctctgcctctctttccactcttcaggttttcttcaagtgtttgctaagagattagttagcaagtttatattgaggaggtagccatgggaggcagctctctgcttgaaggaacgcgcagtgggtcagagtgagaagatacagggagctaagactgactaaggcctgggatcaggtactttattttctctcaaagacaaaccgcccatagaaaggttggtgggatggcatctgccagcaggagcacagatgttaccacttttagaaacttc

SEQ ID NO: 47262 - DNA, 675 bp, Homo sapiens
aaccaatcttggtctagaataagtctcaaaatcaaaagacttgaattctagtgcagcgtaggttgactcccttatttatttaattttcccatctctacaccgctagaataacctctctcctgaggctgttgaatctgatgaattagcagataggaaagaacttagaaaattataagttcactcaaatgtaaaaggttatatgggaaataatcaccactaacatttttgagtacttactatctgcttgttatacacattctctaatttaattttcacaagaaaattcatgaaaggactatacttatcccccttttacaggtgagcaacctggagtgcagtgaagtgtaaaatgtgggccgacttaggagcacaaataccccagcaacaatgagcactcttagtacacaggtcttggtttctaaaatatcatcatccgataaaaggaacacaggctctttgaagaaatgactgattccgggattggggcaagaaacacacaagctgagactggagcatcttgcagtcccagaaagtgaagaaacgctgaggatatgtcaaagggacacaggagccaaatgaaagagcttccactggccaaagctggaatgttgagcaacaaagcaacatagcattggataataacccaaagtataaaataaatattcatgagtacat

SEQ ID NO: 47263 - DNA, 655 bp, Homo sapiens
ctattctctggaacagtcccttgactctttctctcaaagctctttcaattacacatgtgcctttatatatgcatttgtcattgacatttttcattccggcctctctctccatgggaccctcatttgtgctgctctcaccttcaagagcttgcagtcaggagagatgctccataaacctttgtagaatgaatgaatgaatgaactgaccagtctccttctctgtaattcagagacattagactgcaagctggacactgagcagtggaaaaagccaggctggccacccagagctgagctctccccgccccggagctcacttgccaggtgaccttgaacaactccctccctgtctctcagctctggcttcctattatttctttattaaaaccacttgattgagacatgactgctattcataaagttgcacatatttaatgtctataacctgacaagtttggagatgagtctacatctgtcacttatcatcaccgtcagcaccatgaacacgtccgttaccttcaggcatctgccgcctgtattcttcatgcttcggtttcctgatctatgagcaaggacactggcccaaggaagcagtttgctcttttattgctgcatatctggccaaaagccctaccttcagaaaaactaaaaattc

SEQ ID NO: 47264 - DNA, 758 bp, Homo sapiens
gactggtaatacacacatgtatttctccatcttccatccttcagtttatctatatcaccctatataggtagagtactattcattatactattataaaggtatgtaattgatccagttagcataatatgattatatttcctttattttgattgaagttaactattgcctctttctccatgcaactttcttaagtacctagcattcaagtgtctataatcaatttattccaaactgtcctttcaaaacattgaaacacatcaagtagtctatcaatcagtttattttttaaattggagacaactctctaggagcccatcatcctccttcactgtggactagtttttctctaagcctactgcacagcttttgtcctgaaataattttatcctttctaccctgttttccacttctttttgtttttctgaaagatttccaccttccagcttttcttttgaattttaaaatttctgttatgttttaaatttgccagaatactttcttgtcaacctctcttttaattaaaaatattttttatttttgtaatttaaaggtttattgtaaattgacaagtacaaattggatatatttatggggtacaaagtgatgttatatgtatacaatgtggaaagattaaatcaagctaattaacatatccatcactacaaatacttctttgtggtgagaatacttgacatttaccttcagcaattttgaaatatacagtacattattattaaccatgctatactctttatctc

SEQ ID NO: 47265 - DNA, 438 bp, Homo sapiens
gcgcagtatttctgtcctcaaagagtttagggtctggtagaagagaaaagtaagtaaatagtaagttacatgctgagacaggaaaaattaaggaagctattggagtgcatataaattcttgatagcaccagttctcaaatatgaggtgttaaaaactggatggaatttaaccctgtccttagccctgttatataacctaggagaaaggctggctgcaactccgggagcatgagtagcccaattcagaattcagggcccaagctccccactgatggaaagatacaaagaaactacttgccagaagccaggaccaatttggcagagtctactcaaaacagtgagttttaggtaagaaagcctcagaacagttttcattagacataccagtgtactaagtccctcaagcagaaaacttagggatatgacagaaaaaaaaaa

SEQ ID NO: 47266 - DNA, 472 bp, Homo sapiens
tgactgcaccttagaatcacctgaggagttttcagcactcccatgacagggggcactccagaccgattgaatcagaatatctgcgggcggatcaggtttctttttttaacactttaggtgattccaaagtgcagccaaggctgtgaatcactgttttacctgcacaatgaggaattggagtcaatcttaatgggaaaaaggcaatatttggagcaagttttgaaaaccaatgttttaaaaaccaatcttaatgggaaaaaggcaatatttggagcaagtttgaaaaccaagatgttttctaggtgagaagaaggagtggcaagagataaggcaggaacatttgcagtgatttaatgaagctggtggattcaaagaaagaaatggattcaagaaatacttaggaggtaacactgattaagactttgtgccaaatgtgaggctaaccaagaaggaggaacctcagataactccc

SEQ ID NO: 47267 - DNA, 314 bp, Homo sapiens
ttcactaggcattggaaaataaaggctaattggacattgtcttagttcttgtggcactcaagatccagtaggaaaaaaaaaaaaagaaactttatcaatttaggctggatcattcctatgatcccttccaacactgattctatgatgttctgtctcaaagaagcaagttggaagccgggcttacaaaatatctagtcctttgacatctctgatatctctagaaggactgaactttcatctgatattcaagatcttgaaagagcaatttaagggaaaaaaaagcttcttcccagaatgtattataaatctattag

SEQ ID NO: 47268 - DNA, 438 bp, Homo sapiens
agtgggctagggaacaagggttttaaccaccgattaagtgtatggatggaactggtagaatggaagttcattccttttctatacattaaggtagatcagtcattccttgttattttataccttttggtttaatatagataatgtacagtaatttgagtttatagccttctggtagtaaaagtttatttaaaaacagtattaaaaggttgataaagatataactaacaaataattttccataataccatttttctcagtgtttttttaaaagcaattacccataagagaagctgaaaaaaggcatttctagaatgtggaagcatctttagagattatgacgaaaagttagatagctatagcttttatagaatttcaataacaagcacagtaatagatctcttatagttctttcttctttcctttttcaataaaaaaaaa

SEQ ID NO: 47269 - DNA, 426 bp, Homo sapiens
tattccaaactttgtactcgaggggagtggaaagcttgaagacctggcaaaggatttatctatttagcattctctttgtcattggtggtgccctaggtttgaggtttgtgagatctgaaagtaacattccaatgaagaactaaagcacatctctgccacacagaaggtgaggtttgtggcaatcaatggaactaacaaatccattctgttttttattatgactaaacctaagttgagggtgtgggtattagagcagctgaaattcagttgcctctttgggggtaagctgtacacatcactcaagaaacagctggatgcaagctaaaacctgctctcattctccctcttgcctgctagtgtgttagatccatggaagacagtttctctcagcctcacctcttgcatttgactgttgctttctaccta

SEQ ID NO: 47270 - DNA, 238 bp, Homo sapiens
ctcttgtctctaaatccccttgtgtctaaggctagcattattattttttctattaatactactctccaaattaattatcgtatctctgaatcatttcctacatatggtaccaactagtagcccctccttcttaatcctcacctctattagcttctataatattcaactttttcttcttgaaatactgatgaataccagcgacagtgtaagttatgtaaaacaaagaatagagggcctt

SEQ ID NO: 47271 - DNA, 649 bp, Homo sapiens
cccagcctgctggccctggggcgcggggcgtcgtgggggtcgttgtcgttgagggtcgttgccgtgtgtggcgtcttagcctggcccctgggttgtgccccacggacgcagtcgacccctctgagcgcctcgggagccccgaatagcagctgggagaaggggcgaggactgagcctcgctgcccgctgccggccgggctagagatacgggcgtgccccccattgtgcgcctcccgccctccggtcccctcaccctgcggccacctggggcgtggggcggtgctcctgcccgtgcacgtagccgctgcgagcggaggcctgctcacctggtgcctgctactcactcccccgggccggtgggcgaaggacacccgcaggaactcggcagaggagaaattcagacggctcccgagggtaggaaaagaccccggcccaccgtggaatctgaaacacccgaccactctgccatcccatgtttcaccagtcagacccccagggcagggcaggggaagcagaatgcaaactggggcaccgtttccctgaagcgtgttggccgcgtttgtcgtagtgctagaggtgcatacccttggaccccgaaaacccattcctgggaatttgctccaaggaagtaaagatgttacaaagatgga

SEQ ID NO: 47272 - DNA, 1120 bp, Homo sapiens
cccagcctgctggccctggggcgcggggcgtcgtgggggtcgttgtcgttgagggtcgttgccgtgtgtggcgtcttagcctggcccctgggttgtgccccacggacgcagtcgacccctctgagcgcctcgggagccccgaatagcagctgggagaaggggcgaggactgagcctcgctgcccgctgccggccgggctagagatacgggcgtgccccccattgtgcgcctcccgccctccggtcccctcaccctgcggccacctggggcgtggggcggtgctcctgcccgtgcacgtagccgctgcgagcggaggcctgctcacctggtgcctgctactcactcccccgggccggtgggcgaaggacacccgcaggaactcggcagaggagaaattcagacggctcccgagggtaggaaaagaccccggcccaccgtggaatctgaaacacccgaccactctgccatcccatgtttcaccagtcagacccccagggcagggcaggggaagcagaatgcaaactggggcaccgtttccctgaagcgtgttggccgcgtttgtcgtagtgctagaggtgcatacccttggaccccgaaaacccattcctgggaatttgctccaaggaagtaaagatgttacaaagatggacccacgaagtatggtcgttggttatgggtggggtcttgaggaaggccttgttagtagcctgaaccctgttgccaggagaagctccaaaccggtagacggagggagcagcgcggcctatgttggggtcttctctgggcgggggacatgatcctaggatgtagaactagcctcagaaaacttaagactcagtggccaggtgcggtggctcaggcctgtaatcccagcgctttgggcggaggtgggtggatcacctgaggtcaggagttcgagacccgtctggccaacatggtgaaaccccatctctactaaaaatacaaaaaattagctgggcgtggtggcaggcgcctgtagtcccagctactcggaaggctgaggcaggagaatggcgtgaacccgggaggcggagcttgtagtgagctgagatcccgccactgcactccagcctgggcgacagagcaagactgcgtctca

SEQ ID NO: 47273 - DNA, 517 bp, Homo sapiens
aaatgtgccagagtgagcacatgctgttggaaaaatggtgctgaaacacttgctccactcagagttgccaaaaacctttaatttctttaaaaaaaaaacctgcaatatctgtgaggcataataaagtcaagtccaataaagcaaggtatgcttgattttataaaacttatgttttgaaaaagtagatcacatgcccaagttgtttcaaacatactcaaaagtatttctcacaaggcatggtggctcacacctgtaatcccagcactttgggaggctgaagcaggaagatcgcttgagtccaggacttcatgaccagcctgggcaacaaagggagaccccatctttacagaaagtcaaaaaattagctaggcatggtggtgcgcacctgtagtcccagctactcaggacgctgtggtgggaatatcatgtcacttgagccctggaggttggggctgcagtgagccatgatcatgccactgcactccagcctaggcgaaaaagcaagaccctatgtcaa

SEQ ID NO: 47274 - DNA, 761 bp, Homo sapiens
gaggttaagaacaggggatctaaggtcacacagccagggtttaattccaccattgctgcttaagagctgcatgatgtgggaaaaggtacttgacctcctgaacctcagtttcctcaactgtaaagtgggttttctaacctcctaaccttccgaggtggtcatgaggatgaaacaagagtgtgtctaaagccctgtgcctgagccctgggatgtagaagtactcagtgaagcagagtggaaatcttatcatgagcactgttaatccatgaaagttagggattgttcctgatgctagagttgtaatgatagtaagtgctggttggatcagagcaagagtgggtaagctatggcccacaggctaaatccagcccacatcagtttttttgtaagtaagcttttattggaacacagccacatgcattcatttatgtattgtccataactgctttagtgctaccactgcagagttaagaagtagcacagatgtcccacagcccacagaatcaggaatattttactctctggccctttctctgacccctgtgatggagggaggcaggtgaagggctcataatgcacacttgaggatgggcggcagaaaagacttccagctgggtgcagtggctcacgtctatagtcccaggactttggaaggcagaggtgagaggatcacttgaggccaggggttggagtgcagtgagctatgattgcaccattgcactccagcctggactaaagaatgagaccttgtcacgaaaaat

SEQ ID NO: 47275 - DNA, 391 bp, Homo sapiens
aggcacgtactataattagttgtgtagagttaagtctgcatatctggactaaatccaagcctccattatgtactatatatgtactgtatgatgatgtgactggatgaggatgttctttgactgttagaggttatctattttgaatcttagacatttgccacagtatgtaagaatgtacagaggtttgggaactggcattcttttgataccagaataattaattcttgaggataccatgtgatcattaaaacctctgagctcctgggttggtgctcatcttctagcagtcaaaccagattgccgcttaggattctcaacttggatataaactaaatctcaagggtgttggttccaaacattggatttggattgaaatgagtgtctcatgcat

SEQ ID NO: 47276 - DNA, 353 bp, Homo sapiens
  misc_feature (172)..(172): n is a, c, g, or t
gcagaccgatcctcaatctgggtgggcaccatccaaccggctgccagtagggctagaaaatgtacgtggaaaagtggaaaaaggtggaataagcagacttgctgtgtcttccggccttcatcatactcccatactggatgcttcctgcccttgaacattagactccaatttntctggcttttggacccttggacttacaccagtggtttgccaggggctctcgggcctttgggcacagactgcagaaagtatgatataattatagccaagaaaggtgagctctaatcagtatgttgtttcaggcctaaagaaaagctatgcaacagagtagtatactatagcaccttgaaaaa

SEQ ID NO: 47277 - DNA, 115 bp, Homo sapiens
aatcaaggatatcaccagtttatctgtggccaaatagcaagccacataatagtggctctgttgtagtaaaaagggtaaataattgttatttggcttaacctaaatgtgacaaaaa

SEQ ID NO: 47278 - DNA, 384 bp, Homo sapiens
cagtattttccaaagttctctgaccatagaacccctttctgtacactgttaattattacctttagctctataagcgcacactttaggaaatttcattctaggcaattcaaggaaatagaagtttttccaatcaagttatccatctaattactcaagtctgccaaataaactttgaaaaggcataaagatcttataaatttaaaatattatccttatcactgtcttaaaatgtttcatcctgctaaaaattgtgtaatataagacatttaaatataaaattggatgaaattctggcaggtactagaattgagcagattgctacactttgatagtatatatggtttaataacaaattaacgagaaatgtttagctacatttctttc

SEQ ID NO: 47279 - DNA, 411 bp, Homo sapiens
aatcctcgaaacgccaaagcacatgttccatcctgtacctccatagaaagagatcttcgaatcaatgtcatgatcctcataattttgtactcttagtctcggcacgaccgactccttcaggtctcaccgagagcccatgtgttcttgatttacacacaaattgaatagtcttagttgtctggttttcaaacccttcacagataaagagaaacaagttagaaggagcaaagaagcaactgctggtggcaacactgacaaacagaaatgacagctgctcagggtagacctgaaattaagggatgggccagcaaaatttaataagtaaatataaggacccagttcttacagtaactgactcatatataatgactcagacaagaccgagactcctacctcaatcgaccctcttgg

SEQ ID NO: 47280 - DNA, 481 bp, Homo sapiens
cccatcacctcgccaacaccctatcatctccccctgcagataaggggaccatagcaggagagggcggcctggctgggggcactcgagtggggaccagagtgacccgacaggaggtttgggccagatcagggcagcacaaggggaagatgaccctcataggggcactgagaggacacagtgtcgaagaaaagcacaggcgcctgccagaggtgtgacccgacagcaaaagtgtttcaggggaagaaaaaccaaatgtggatggtgtggagttccaattccagccttgccactggctaagtaaccggtgtgaacccaaaagtatctgagacaggtctcagtccatttagaacatttattttgcccaggtgaaggatgcactcctgacacagcccgagggggtcctaactacacgtgcctgcggtggtcagggcacagcctgcttgtacacatttcagggagacagaagacgtcactcaataca

SEQ ID NO: 47281 - DNA, 170 bp, Homo sapiens
tatccattgtagacacctttaatgtggaaactcatgtccttcacttcttaacatttccagaattatttcaacgaatatatcctctcttctattttttttttctcctttctgtctagaactactaaaaagaaaagttttaaattgggtcttatggactagttctttaatat

SEQ ID NO: 47282 - DNA, 311 bp, Homo sapiens
agctccaaatcctaggcatttgcccattgacctttaaaagcctggaggcagggcctatacagccctcctctggcctcctctgagatgccaggcttaaagtcttacaagtagcaaatcctcaacaagtatttgttaaatgaatgctttaagcaatctgtggctgggtgcagtggctcacacctttaatcccaacactttggaaggcagaggtgggaggatcgcttgaggccaggagttcaaggctacagtgagcaatgatggcaccactacactgcagcctgggtgacagaacaagaccctgtctcaataaa

SEQ ID NO: 47283 - DNA, 371 bp, Homo sapiens
tagtagagacagggttttgccatgttggccaggctggtctcaaactcctgacttcaggtgatccacccgccttgacctctcaaagtgttgggattacaggcatgagccaccgcacccagccaggtctgttaaatttaaagcccatgatgttagcccggatcagtcctgtttctcaaggtctctcctacctgagatgtgctaaggaggagaagggggtctctctcttaatggggcagtacatgtgcattgctctcatcactgccttggtccttagctctccgctcaaaggagggctggcctatggatgagacctgggtttcattctctgaagtctcctgcatcaaatcaatgtccaatgccatgattattct

SEQ ID NO: 47284 - DNA, 475 bp, Homo sapiens
cacccctcatgccaccaaggggtgcagtggcctgtttttgccagggagctgtaccatccatatgacaataatacaagtcaacaggatgctacagaatttgacttttggtaaattttgctgcaatgcacttagctacaaagaagggcagtccatctaccaaaatgcttttgaagtgttcaggaaatgactcactgtaaagtttaggctttgaaaacacctctgtgggacaaggccgacaagtgtgtaggtgttaaaagaaacactaatttattgactagaaaatgggcaatagggtatgtgaggataaactgtcagaggctgggggttaatgaccttttctcttcttgcatgtggagaaataagcacttggaacagaaaggagctctacccaactacccggaatgcaggcgggcctgggactatgtgactaccaccctctaagtgaggttttgaaaataaacacttgaaagtctga

SEQ ID NO: 47285 - DNA, 382 bp, Homo sapiens
aaatggccaatttctttcaaatgctgtatactggaaaaatccaaaggactcatcagatgaacacatttcaaagagccactaccaattttttttcttaagcaaagcatcaagcctctgatttgccgctgataaattctctgtgtcagacactgctccaggccaggaacacaagaaggaaagtagacccaaccatggaggagttggctgtctcctgggaggcagatgtgtagacaaggcacactggcattgacgccacaacagaaaaataagcacttggaacagaaaggagctctacccaactacccggaatgcaggcgggcctgggactatgtgactaccaccctctaagtgaggttttgaaaataaacacttgaaagtctga

SEQ ID NO: 47286 - DNA, 289 bp, Homo sapiens
ttccagcgaaaatcacctttcaagaaaaattttttagcaaacaaaaacagtttgtcaccagaggacagcaggaacacaaaagaatgagcaaattatgtcataaatacgtggttacatctaaaggaaaattaaattaagcaaaaatagtgttgcatctaaaaatacagaattaggccgtgagccactgcgcctggttcgtttattgagtgaaggttattcattgttaataactgaaagaaagtagaaaatacacctaatcagttgcttattctaatgtagcagatgaccg

SEQ ID NO: 47287 - DNA, 1528 bp, Homo sapiens
  misc_feature (1507)..(1507): n is a, c, g, or t
ttccagcgaaaatcacctttcaagaaaaattttttagcaaacaaaaacagtttgtcaccagaggacagcaggaacacaaaagaatgagcaaattatgtcataaatacgtggttacatctaaaggaaaattaaattaagcaaaaatagtgttgcatctaaaaatacagaattaggccgggtgcggtggctcacgcctgtaatctcagcactttgggaggctgaagcgggcggatcacctgaggtcaggagctcgagaccagcctgcccaatgtggtgaaaccccgtctctactaaaaatacaaaaattacccgggtgtggtggcaggcgcctgtcatcccagctactcgggaggcagaggcaggagaattactcgcacccaggagctggagatttcagtgagccaggatgtgccactgcactccagccggggcaacagagcgagactccttccccccaccaaagaaaaaaaaaacttaaaaactcgtacctagttgcattccttatgagcacagagcaaaatgtcctcattttacctggtttaattttttttttcttccacggcctcttttactgggagacctctgagttttgatgtgtcatgacagataggagaggtcatatccttgtgatttgtggttcattgctggtgacatcagaaagtaaagtcaaccaggaaaagactccatgggcctggctcaggtggcttctggagcaccacctccatcaaggagcttttcctggggtccatgtgtagtccatgttgcctgctctcccacccagggttgctgtgcttattatacaagatggccaataaagcatgacatatattcaataaatgttcatttctttttccaacccttcttattttaagttgagggtattcataaaagggattgagcatttccatttatggacgaggcaactgagtacagcccccaggggcacgcagcgagatggctgtctgctgaacccatacaccagctctctaggcgtttggtcctgtggggaccggtgcatcagatgcttcctaagctggcgtcacctgcctggcccgatgcctcctctggtgttcattgtttaattaatgccacctcctgatggcagtttctttctgggaagaggagaaaagagagccgtccccaagtgaagggtgcagggaagcctccacgaatagtttcaactaaggactgtcccaggaaggaaactcttgggataggcaaagaacagcgaacttccggtgtgacccggatgcacccatttccagagagcaggaagcacagagaaggcccgtgggtcgcccttggggtgctttccatcctgcagggctcgctgcctgccctgaaagttctgataaagacataggaccttcatcaccaggggcgccccgtgggctgttgctgtagtgtctgtcccccatttcttacacacattgagtgtgattgttaccagtggagggtgtccaatggaagaagcacacgccgcccaaaagaaggatctttaccatcngaagacagcatggggatctta

SEQ ID NO: 47288 - DNA, 1421 bp, Homo sapiens
  misc_feature (24)..(24): n is a, c, g, or t
  misc_feature (1400)..(1400): n is a, c, g, or t
tttgagacagagtcttgctctatngcccaggctagagtgcaatggcacgatctcggctcactgcaacctctgcctcccaggttcaagcaattctcctgcctcagcctcccaagtagttcggattacaggtgcctgccaccaaacccagctaatttttgtattttttttagagatggggtttcgtcatgttggtcaggctgatcttgaactctgacgtcaggtgatcaagaccagctactcgggaggcagaggcaggagaattactcgcacccaggagctggagatttcagtgagccaggatgtgccactgcactccagccggggcaacagagcgagactccttccccccaccaaagaaaaaaaaaacttaaaaactcgtacctagttgcattccttatgagcacagagcaaaatgtcctcattttacctggtttaattttttttttcttccacggcctcttttactgggagacctctgagttttgatgtgtcatgacagataggagaggtcatatccttgtgatttgtggttcattgctggtgacatcagaaagtaaagtcaaccaggaaaagactccatgggcctggctcaggtggcttctggagcaccacctccatcaaggagcttttcctggggtccatgtgtagtccatgttgcctgctctcccacccagggttgctgtgcttattatacaagatggccaataaagcatgacatatattcaataaatgttcatttctttttccaacccttcttattttaagttgagggtattcataaaagggattgagcatttccatttatggacgaggcaactgagtacagcccccaggggcacgcagcgagatggctgtctgctgaacccatacaccagctctctaggcgtttggtcctgtggggaccggtgcatcagatgcttcctaagctggcgtcacctgcctggcccgatgcctcctctggtgttcattgtttaattaatgccacctcctgatggcagtttctttctgggaagaggagaaaagagagccgtccccaagtgaagggtgcagggaagcctccacgaatagtttcaactaaggactgtcccaggaaggaaactcttgggataggcaaagaacagcgaacttccggtgtgacccggatgcacccatttccagagagcaggaagcacagagaaggcccgtgggtcgcccttggggtgctttccatcctgcagggctcgctgcctgccctgaaagttctgataaagacataggaccttcatcaccaggggcgccccgtgggctgttgctgtagtgtctgtcccccatttcttacacacattgagtgtgattgttaccagtggagggtgtccaatggaagaagcacacgccgcccaaaagaaggatctttaccatcngaagacagcatggggatctta

SEQ ID NO: 47289 - DNA, 510 bp, Homo sapiens
ctaggcgtttggtcctgtggggaccggtgcatcagatgcttcctaagctggcgtcacctgcctggcccgatgcctcctctggtgttcattgtttaattaatgccacctcctgatggcagtttctttctgggaagaggagaaaagagagccgtccccaagtgaagggtgcagggaagcctccacgaatagtttcaactaaggactgtcccaggaaggaaactcttgggataggcaaagaacagcgaacttccggtgtgacccggatgcacccatttccagagagcaggaagcacagagaaggcccgtgggtcgcccttggggtgctttccatcctgcagggctcgctgcctgccctgaaagttctgataaagacataggaccttcatcaccaggggcgccccgtgggctgttgctgtagtgtctgtcccccatttcttacacacattgagtgtgattgttaccagtggagggtgtccaatggaagaagcaccaaaagccgagatttattga

SEQ ID NO: 47290 - DNA, 320 bp, Homo sapiens
agtatctgtcttcccagctcctgtttactcttgttgatgccacatattgcataggactgtcaagactaatgtctgtgggtgacaaatagaacctggaactgaaaatgtaaatttgagaataacagttcatgaccaagaatccaaaagcaaatgcaacaaaaacaaagataaatagatgggacttagttaaaccaaaaactttcttcacagcaaaagaaataatcagcaaacagacaacccacagagtggaagaaaatatttgcaaactatgcatttgacaaaggactaatatccagaatcgacaactcaaacaaatcagc

SEQ ID NO: 47291 - DNA, 1353 bp, Homo sapiens
ctctggggatgtcggtcagcttttttgaaatgatcttggtgctagaaagacttgtaactgtttaagggtctctcttccactaatcttatcctcctaaacttctgccatacttgtgacatgtgaaatgcaggggtgttctgagtaggtttctgccttctcagcatagtgcttggcactttgtaggcccccaggcccccagtaaataattattgcaagaatgaatctcagctcggtgcagtggctcacacctataatcccagcactttgggatgccaaggtgggcagattgcttgagtccaggtgtttgggtccagcctgggcaacatggcgaaatcccatctgtacaagaaatgcaaatattagccagacatggtggcacatgcctatagtgccagctactaggggtgactgaggtgggaggatcacttgagtgtgggagctgtgatcgtgccactgcattctagcgtgggtgacagaacaagaccctctctcaaaaaaagaataaatttcaatttatgtccctggaggactggcttgaagatgttaaagaaaactctaagggccccctttacacctcttgtttaaagccagaatccacttaactagcgctagacccttgcggggtgccctacctgcatctcccctaattatatagccaatacaaagaattaacctcccatagctcactgaaagaagagaaaataacaaataatatcgtataaagaggcatttctgaggtaatagatgttatttaattataaattgagtattagatgataacgaaattttgtgagcagttaaacaatggcagtgtggttctgtagagctatgtctgcatattgagctgaaccgtaagagtgaaatggggtgacgccaaggattgtctttaagataccaatgggaatggtagagaaagaacctatgaaaagccactctttaagaacaatgagaacaacaaatatgtcaaaatgaactccagaattcaggaaattaaccaaaggcaatgtgggaagttttactcaagaaaaccacctgaatctcagcaagaacagcctgctttgtagcatttccactaaccctaatttcatctcatctcccaaactttgtgttagccttgacaaccaacagtgccacaatcccagggaaaaccagcagccactggagggtgtagaaggggctctgaagctccctcaaaacaccatctgctgagaattgttatttgacctgacagttctgtgtggcatttttctggaaaccccccttcacaatgttgcagaattttgctccttcagctaaaattgggatcttgtcacacaaccaggaaaatttgggcatgcagacacattgaagggt

SEQ ID NO: 47292 - DNA, 344 bp, Homo sapiens
gtggcttatgtacagccttttagactatgaggcatgaatagcaaacagtggcaatcgatgctgaaaaaccagaatgtttaaaaactgggccataaaaatgtagaacgtattctgtcaccagagctggggtcagtggggtgaccccctccctgcctccctgccccccagttctccccagaccttcctgcctgcctgtttcctgcctccaggacagtgtgcaccctgtgtccgtcttctgccgctacacctgtgaactggcaccacaggtgggaacagcccttcaggccagattctggtttttggtttttgctttactgccaaatatgatctagtgctacattcaa

SEQ ID NO: 47293 - DNA, 338 bp, Homo sapiens
cgaatttagatggaaattctttggcctgaaatgtttgaagctttatcctcaggtagtaaggaaccactgaagagtttgaagcagtgaaatctgtcagatttgtacttttaaaaatctcacatcaaagcctggcctggtggctcacacctgtaatcccagtactttgggaggccgaggcaggaggattgcttgagcccaggagtttgacaccagcctgggcaacgaagcaagaccccacctctacaaaaaataaacaaatataaaaataaaaattaggtgggcatggtggcatgcacctgtagtcccagctactcaggaggctgaggtgggaggatcac

SEQ ID NO: 47294 - DNA, 866 bp, Homo sapiens
tttttagagataaggtcttgctatatatatggcccaggctggtcttgacccagcatcaagtcgtcctcctgccttgcgctcccaaagcactgggattacaggtgtgagccaccatgcccagccagatctttcttgtttttgatgtaggtgtttattactaaatacttccctcttaaaactgctcttgctgcatcccatacatttttatatgttgtgtttctgttttcactcattttaagacatttaaattttgtttcttaatttcttcattacccattggtcattcagaatcatgttatttaatttccatttatttgtgctgctttaaaagttcctcttgttattgatttctaggtttatttcattgtggtcagaaaggtacttgatgtgattttaattcttttaatttttgtgatttgttttgtggtttaacatgtggcctctccttgaaaatattgcatgtgcttatgaaaaaaaatatgtattctgtagctgttggatgaaaagatctgttagtgtcttttaagtccatttggtctaaagtcagtttaaacttggtgtttctttgttgattttctatgtatatgatctgtccattgctgaaagtagggtgttgaagtccacaagtattattgtattattgtattgtcttcccctttagatctaataatatttgccttacatatctgggtgctctgatattgggtgcatatatatttacaatttttgtatcctcttcctgatttcatccctactgtgtttgatacaaagtctcttatcgtaagtatagctactccttatatagtcatgattggtggtaaaaacaaaacaaaaagaaaagaaaaaagaaaaaaaatgtatagcta

SEQ ID NO: 47295 - DNA, 272 bp, Homo sapiens
ggaaaatgccaacagggattgtctgtgggtggcttttttctcttctgtgtctcagatgttctttaagaagcatgtgttacgtttacggtaggaaacctcccagtttttaaataagaagtgaaaagcctctgtagtctgaggtgaagcaaatgcctgtgatacgatgttgcagcgtttcctttaaccgagcctgtttgctcttctgtgagatacagatagtaagggctggctgcctcatggggctgatgtgacgattaaagagagctgtgaca

SEQ ID NO: 47296 - DNA, 409 bp, Homo sapiens
  misc_feature (10)..(10): n is a, c, g, or t
cccaaaaaantgggcacgaagcctgcccctgacttctcatatcttgcctaggaactccaggcttgtcttggctccaaatggatcccaactgctcctgcaccacaggtggctcctgtgcctgcgccggctcctgcaagtgcaaagagtgcaaatgtacctcctgcaagaagtgctgctgctcttgctgccccgtgggctgtgccaagtgtgcccagggctgtgtctgcaaaggctcatcagagaagtgccgctgctgtgcctgatgttgggagagccctgctcccagacataaatagagcaaccagtactaacctggatttttttttttaactaccctgaccggtttgctacattcttttttctattcaatatgtgaaagacaataaaacacttttgacttgaaataact

SEQ ID NO: 47297 - DNA, 400 bp, Homo sapiens
  misc_feature (35)..(35): n is a, c, g, or t
  misc_feature (45)..(45): n is a, c, g, or t
  misc_feature (55)..(55): n is a, c, g, or t
  misc_feature (81)..(81): n is a, c, g, or t
cgtgcgccaatccacaagaaagaaaagaagcctcnttgtaaaccncgggcttgtncctggctgcaaatagaacccccaacngctcctgcaccacaggtggctcctgtgcctgcgccggctcctgcaagtgcaaagagtgcaaatgtacctcctgcaagaagtgctgctgctcttgctgccccgtgggctgtgccaagtgtgcccagggctgtgtctgcaaaggctcatcagagaagtgccgctgctgtgcctgatgttgggagagccctgctcccagacataaatagagcaaccagtactaacctggatttttttttttaactaccctgaccggtttgctacattcttttttctattcaatatgtgaaagacaataaaacacttttgacttgaaataact

SEQ ID NO: 47298 - DNA, 401 bp, Homo sapiens
  misc_feature (31)..(31): n is a, c, g, or t
taaaagataagccattaagtgggagcaaacnccaaaaaaactgaggactacagcttgtcttggctccaaatggatcccaactgctcctgcaccacaggtggctcctgtgcctgcgccggctcctgcaagtgcaaagagtgcaaatgtacctcctgcaagaagtgctgctgctcttgctgccccgtgggctgtgccaagtgtgcccagggctgtgtctgcaaaggctcatcagagaagtgccgctgctgtgcctgatgttgggagagccctgctcccagacataaatagagcaaccagtactaacctggatttttttttttaactaccctgaccggtttgctacattcttttttctattcaatatgtgaaagacaataaaacacttttgacttgaaataact

SEQ ID NO: 47299 - DNA, 425 bp, Homo sapiens
  misc_feature (106)..(106): n is a, c, g, or t
aatgcggatctctattaaccgtcggactcattctaaatgagaagaggaatgagaaaaagctagagcactacccagctctgtcttgtgttccaaatggaccccaacngctcctgcaccacaggtggctcctgtgcctgcgccggctcctgcaagtgcaaagagtgcaaatgtacctcctgcaagaagtgctgctgctcttgctgccccgtgggctgtgccaagtgtgcccagggctgtgtctgcaaaggctcatcagagaagtgccgctgctgtgcctgatgttgggagagccctgctcccagacataaatagagcaaccagtactaacctggatttttttttttaactaccctgaccggtttgctacattcttttttctattcaatatgtgaaagacaataaaacacttttgacttgaaataact

SEQ ID NO: 47300 - DNA, 471 bp, Homo sapiens
cctgtaatctcagctatttgggaggccgaggcaggagaatcacttgaacccaggaggcagaggttgcagtgagtcgagatcgtgccactgcactccagcctgggtgacagagcaagactttgtctcaaaaataataatagtaaaatgttacatgtgcatgaagttttaaattactcatttttattaatgaagaaaataaggtagtttagacattccaagagttaactatagtttacaaaaatatattaagcaaaaatatgcttgatatattaagcagaaatgttgtatattaagcaaaaatgtaaaattcagcaattataaactgttccttacagacagtgtacttgaagtcttttggtagttctgagaatgtggtcattgaagttggatctaagaggaaagtggttatcggttgctttttatttataaaggatgcaaaaataaaattagatttttggcagtcaaaaatga

SEQ ID NO: 47301 - DNA, 478 bp, Homo sapiens
cacctgttgctggaggaagaagcattaacaacatatggggtgctgtgctgcggtaacagaatcaagagcaggtgccactgaacttggtatcttgggaatggagggcactattgacagagcaagactttgtctcaaaaataataatagtaaaatgttacatgtgcatgaagttttaaattactcatttttattaatgaagaaaataaggtagtttagacattccaagagttaactatagtttacaaaaatatattaagcaaaaatatgcttgatatattaagcagaaatgttgtatattaagcaaaaatgtaaaattcagcaattataaactgttccttacagacagtgtacttgaagtcttttggtagttctgagaatgtggtcattgaagttggatctaagaggaaagtggttatcggttgctttttatttataaaggatgcaaaaataaaattagatttttggcagtcaaaaatga

SEQ ID NO: 47302 - DNA, 363 bp, Homo sapiens
cctgtaatctcagctatttgggaggccgaggcaggagaatcacttgaacccaggaggcagaggttgcagtgagtcgagatcgtgccactgcactccagcctgggtgacagagcaagactttgtctcaaaaataataatagtaaaatgttacatgtgcatgaagttttaaattactcatttttattaatgaagaaaataaggtagtttagacattccaagagttaactatagtttacaaaaatatattaagcaaaaatatgcttgatatattaagcagaaatgttgtatattaagcaaaaatgtaaaattcagcctgggtgacagagcaagactttgtctcaaaaataataatagtaaatgtta

SEQ ID NO: 47303 - DNA, 742 bp, Homo sapiens
gaatttagaatacatggtagaggaaagacaggatgagaaccagctgtgactccaataccaactgtagtgacagggactgtagttagtcctactaacctacctcttctaagtttcccttcaggaagagagacccatgggaaccatggaggagttccctgaatgtgtatggggaaatcgatctgtgcagtgcagggggtgacccgtggtagccatggaggtgtcccactcagatctccctacagcagacctgccacaaggggtggagttagcggacagctgtcaagatctgcctcagctttcaagctgaggctacatgcttcccagacagcctctaagcaaaggccaggcactgccatggtacaagggctcaccatttctggccagtatgggactcttcgggagggcaatctttgcaccagcactccctgttttgcaggcctaggctttctcagagctgcactgcagtccaaggctcctcctacccaaatatctttcctggcccctctcctttctcaggttttagtcctacatcacgaactaaaggtgttccttgtctggtcctgttccctctcccttttatgttttataggcgttgcccctaataaaccttttgtatatctgactctgtacccctatattattgaaagagacagatttattgaaggtgataccctgaaatgaagatgtcctgttcttacagatgccctctgatcctatgttaataatagtattatatgtttta

SEQ ID NO: 47304 - DNA, 464 bp, Homo sapiens
gcatctagacctaaataccctgtcaatcctttaacgaggaaagaaggctgttaggaacgcagaacatatagaagaaaatcacataaggactcttaactgatacatatatcattttggaaacaagtctttaggaatcaggattgttggagctaaaaataaaatgtttattaacaggccgggcgtggcagctcatgcctgtaatcccagcacgttcagaggccgagatgggcagatcacctgaggtcaggagttcgagaccagcctggtcaacatggtgaaaccctgtctctactaaaaatacaaaaatagctgggcatggtggtacatgcctgtggtcccagctactggggaggctgaggcaggagaatcacttgaatccaggagatggaggttgcagtgagccaagatcacaccattgcactccagcctgggcgagaagagcaaaactctgtctcaaaaaaaaa

SEQ ID NO: 47305 - DNA, 549 bp, Homo sapiens
tgagacaaagtctcactttgttgtccaggctggagtgcagtagtgctatctcggctcactgcaacctctgcctcccaggttcaagcaatttcccagcctcagcctcctgagtagctgggactacaggcgcccaccaccatgccaggctaatttttgtattttttagtagagacggggtttcaccatgttggccaggctggtctcgacctcctgacctcgtgattcacccatctcggcctcccaaagtgctgggattacaggcgtgagccaccgtgcccagcctccacacaatccatattccctttctgttagcagctttgtcttgtacccatggccgtcacaggtccatggctgatttgccaagttaacaggagtccatccataataatcagcactgggtcatgccccagaatcattaggatcaaaggatgggaaatcagggatttctttgaaagtaagccactcttagtaagattcaaatttgtttaaagcctggattaaaacaatgccaaacaataaacttaaacagactgctttaccctctgactt

SEQ ID NO: 47306 - DNA, 1671 bp, Homo sapiens
gattttaaggtgatctagctgagtttttacactgaaagcaaagattatagcaattgtagtccatggtatttattttcagtcaaaccaaagttacatataattctgcctctgcttatacgggatattaacactaacaatacactcccttcaaagacttgcacaggccaaattgttggaatgctggttttcttgacaattccaaaccccaaaactatgataatgagttatgatgtagttgaaaatagcatagtcagatgtttgcttaaaacctagaaacttaacatgttgcttttcatgtgctgtgccaagtcttgataatactttttcccccaaccaagggacctcataacctgattatggttattgctttacaaacagttttgacagaaggtggctgctagagcttaacatacgttcccgttccatgtgatggaaccggttcttgcaaactaagctcatcattgattctttgctgaagtcagcaaatagagttagagagatacccagtcatctatcacaccaaataaaaggacataacggctttcaaaagggttttcccacttacccaaaaggctttctgaaagcttctacctctgcaaaaaaaaaaaaagaaaaaaaaaaaaagaaaaacattagaacaattatggcagattgcatgaaacgtgagaacgtcacagtaactgctacttttcattatgtttgtctttgggtcatgatcaacgaaccggaagtttacaatatggtattaaaagaaagatgggtatggtgaaagatggttttcagtcatctaggatcctactgtaaggattatctgaaaggaaaaatgggtctttcaggtgcatgttcaaaaggctttgagggactggaagtaactgcgagagttgtaccatcagaagggtggcctaagactacaatgctaaagtatgcatacctcagttagaaaacttttgaaaggaagtctcagccacagaatgcatatacctgtagagttttgcatgggttttatatgaatacaattttaaaaaatagctgcttgcacattataccagaaaaacctccaaaactgcaattgctttgaaaatagattttaggttttttggagtttcctgaaatgcttggtctgtattttgataattgtgcatattatgtaaaaatgttggtggacccataaatgaccagactttttctaagaaaaatgttgctttaatgcatttcatgaatttttactcttatatcattgcttgctagtaatagcaaatctgcttttctgcatctgctttgcgtagctattgtaaggctttgaactaatgtatgtatttattgcttgaacttctgtgcataccttataaagcataatgtctgacaatttaaatggctcatgtattcttgcttctatcataagctgattatggggactatgatcttttgtatacagcaaattttaaactgtagcacaaacatctgtttatgtattggtggaatatacctgttttatttatcttttttgaggtaaactaatttttgatacttttcattactgtgtactatgttcatactttgaattctctgacgttagaagtcatggttgagaattgtaacagctgttattcgttctgtattcatggctttcactgctgaataaaataaaggaccaaacctaggatttgaaag

SEQ ID NO: 47307 - DNA, 563 bp, Homo sapiens
  misc_feature (563)..(563): n is a, c, g, or t
gattttaaggtgatctagctgagtttttacactgaaagcaaagattatagcaattgtagtccatggtatttattttcagtcaaaccaaagttacatataattctgcctctgcttatacgggatattaacactaacaatacactcccttcaaagacttgcacaggccaaattgttggaatgctggttttcttgacaattccaaaccccaaaactatgataatgagttatgatgtagttgaaaatagcatagtcagatgtttgcttaaaacctagaaacttaacatgttgcttttcatgtgctgtgccaagtcttgataatactttttcccccaaccaagggacctcataacctgattatggttattgctttacaaacagttttgacagaaggtggctgctagagcttaacatacgttcccgttccatgtgatggaaccggttcttgcaaactaagctcatcattgattctttgctgaagtcagcaaatagagttagagagatacccagtcatctatcacaccaaataaaaggacatttcatggcgggccgtgtatcctctagan

SEQ ID NO: 47308 - DNA, 945 bp, Homo sapiens
aaccccaccactccctccgctttgggtgcctggttcagtacagaggtacacagccccatagaacttcagcaacacggtttggagaagataactctgtttgatggactctttagagtcagtcttagaacatccaagtcctttcctctccctgtcaatttccccttttatggcattaaactctcttgaaaaacatagcgtatgccgactcgacagtttctagtcaagaatgagacggaatgtgggagagggatattaaaagccctaatcccctcttctgatgttcgaagaaaggcaagaccagattcttgggagatccagagattaggggcatctgcgttctatgcagcacagttacccagccctttgatgggctcttcatcgttttgtgactagctcttagaggggaagaaccttgccttagctgctaacagtggttgattcttgaaagcttatgtaatcctagagacatatccaggcatattgggattgccaataaagatgtcacttgtttccacgttggggttctccttattgactcatgagcaccacaatagagtctatacacagacttagtttggggttcttggttgggatttcagcattagaaatagatgcagcactcatggaaaaacatcatgagtgcatctgagccaattttagatgatttcattaattctgcataccttctctttgacccattgatgcaggcccacatctatccagccccaactgtcttatttgcctttaacccattctggaattacccagtatgacttatattatttctatgcacatgagaatccaaggttttagaaacctggcatgcttataactactgctgacagtccctcatagtcagggcttaaagcgccaaaatacacggaaacataagagaaaaagtcccccagtgagaaacctgattgatggaaggggaagaatgtgtgg

SEQ ID NO: 47309 - DNA, 460 bp, Homo sapiens
gataatttctaagccttctccctgtacctcgttacagaaaaaaaaaaaattcttctcttcccagttcatctgcatcttgttattgggccataagaacaagcagcgcaaccctcggtttggtccaggaacaggattacaggcataagccaccgcgtccagccaggagccctaaatttttaaacagccctgactactgtcctggttctacctgtgagttgctcactcttccccaccaacagaggatgggaatgaagctgccgggttctgccctcccaagtcatgcctccctccatgctgagtttgtatccaagtcacgttcccgactctgaccggaggcagaaagccaacactctctacctgctggttcccatccggcaaacgatgcatcagcaagaaggcaaaatacccagagaaaattttgagtcacgatgccaaaggggcctctgggcagaaaaaccag

SEQ ID NO: 47310 - DNA, 360 bp, Homo sapiens
tgctggttctaacatttctactttaaagaaagatggctttgacaaactgtaaaagccaaataataatagcaaccccaatatctgtggctctcccttgtgaaccacattacatactgtaaaatcctcccacatttatttggttttcccaacactgtgaggatgaaaagacaagcatactttctccatattcagttaaagaatgtgaggttcttgagttaatttttttatacagtgtaaggaaggaacccagtttcaaatttctacatatggctagtcagttttcccagcaccatttattaaatagcgaatactttccccattgcttgtttttgtcaggtttgtcaaagatcagatggttgt

SEQ ID NO: 47311 - DNA, 2338 bp, Homo sapiens
ggctggagtgcagtggtgcaatctcggctcactgcaacctctgcctcccgagttcaagcaattctcctgcctcagcctcccaagtagctgggactacaggtgcatgccaccacgcccagctacttttttgtgtattttagtagagatggggtttcaccatgttgtctaggctggtcttgaactcctgacctcaggtgatccacctgcctcagcctcccaaagtgctgggattacaggcatgagccaccacacccagcccctttccaaccatttctaagtagattttttgacattaatgtatttattaaacaaaaactgagaattccttaaattgatttggaatttttgttaattttatgtcctttttttcctaaagtgaattaaagtgaatcatggaagcagcattactttatatgaatattattatttaagttaagttattttaagtatatgcattttttctgattgttgtgtgacttaattcagttgctggtgtgaactataactagcaaataattctataaactgaattattttaaaaggtattttaggtgacaccactgcatttctatttcatcttttgagtcatatgtatattatttccagaattttagacattattacagggtttgtgaggacctttgactcagtgacaatcatcatattggagcaaaacatagaacaaaatcactatctcagaaataccttaattctctaagactggctcttagacctctcccatcatgccttgacctctaaaaagccctttgttcctatcttctaaaggaaagtatatcatatatgatgatgtaactgatctaatcagtgactggaaatagcattagtaacagaagatcccaagttttagttgcttaatttgtacacacttttaaatattgtcttagcctcggcaaaccaatttggggaagaagcaagatactttaagagaaatacaaaggaaatttctaaagcacaagaaatagtgaggtagtagttagtcgtctttcctacaacattttagcttttgcccatctaaagcacaattaaaattaggctacattctttccagtattctatttaagtacctactacatactgctctagtttcttagtactctgtaatgtgtatcttaattgctactggttggcattgtaactcataggaattccagaaaattattaatccgtgctgcttgcagttcattcatatggcccctcttaaccatgctggtgttatgattcagtattaactctcaattagcatgcccctgttcttcctaacttgtaaaatttcacataaatatattttcaattgtgtacaaattaagggtgtacaaattataataatgcatctctatcttcatactttgaatggcaaacgctatttatgcataaatattttcattttaagtaatatatgaagtgtaaatactcgatatataagtatagattttaaagatatgggactttattttcacataagtcaatagatgtttctctagaacaaaatatttagtaaagctttataaattatattaaaaggaagcggggaacatgtattttttaacatagaacagaagtgacttcattctttttagacatcagaaatgttaaagttgattcccaatatttgttgtacttttttgtagcaaatgttaaaaatcacgagttaccatgtatagaatgtggactgtcatgttgatatcattgtacagtgataagccatttttatctgtatacatttcaccaatttattaacaggttgaatatttgtttctttttagaacattttatttatactgtgaagactttgttataccttatttgctacaacatagatcatatcattgctactttgacttagcatttgcatcataaacataattatgatgtttttttcatgctcccttccaggggctcagtcacttgaagaaactgttgctaaccaagctcttgactctgtttcccttaatgatacaagtctctgtaccagcgctttatgttaattaccaaaactctcctgcatcagagcatgatatctataataggagatactgcaataaaatgattaggctgtaaaatttggagacacaatttttcattacaatgcaatttgcatgtgcacatgtgcgcacataacttatatgttagttcttttttccaaactcccaactcttaaaagtattgtagtctgttggtgcctcaactgttggtaactttttttttaaattacaactttccacaacttgtttttgtactttaaggtttctcaattagaatatttctagttgagctgtaatttgaatgcattgttctcagggctatttgtgctaaaagc

SEQ ID NO: 47312 - DNA, 733 bp, Homo sapiens
  misc_feature (646)..(646): n is a, c, g, or t
caaagccagcagaggtaccaactatagctccacggccagaagataccagcagctctgcctttactgaaatttcagctggagaaaggtccacagcacaatgaggcttttcacaggcattgttttctgctccttggtcatgggagtcaccagtgaaagctggcgttcgtttttcaaggaggctctccaaggggttggggacatgggcagagcctattgggacataatgatatccaatcaccaaaattcaaacagatatctctatgctcggggaaactatgatgctgcccaaagaggacctgggggtgtctgggctgctaaactcatcagccgttccaggtctatcttcagggattaatagactactatttatttggaaacagcagcactgtattggaggactcgaagtccaacgagaaagctgaggaatggggccggagtggcaaagaccccgaccgcttcagacctgacggcctgcctaagaaatactgagcttcctgctcctctgctctcagggaaactgggctgtgagccacacacttctccccccagacagggacacagggtcactgagctttgtgtccccaggaactggtatagggcacctagaggtgttcaataaatgtttgtcaacacaacacaaacacanacacaacaaaaatttttggggggttgggcttaaaaaaattttttaaaccattcgttggggggggggggcccttggtaggacactggg

SEQ ID NO: 47313 - DNA, 402 bp, Homo sapiens
agcagctctgcctttactgaaatttcagctggagaaaggtccacaggtgaggtttcttccaaggagtaatttctcttatttgactcttttgagatccttttctcacataattgtcaaatttcaattggagagaaactgtgttttctacctcattacggggtcagtgctgaggagagtaggaactcaggaaatgcttcttgattgactttagtctgctgtattgggtgacaaattgaccacagaccaaataacacgttggaatcctcttattctttctagagatctgggctgagaattaagggtttatgcttcttcttaaaacccgtttcaatctttcatgcagttatgattctcatacaaacaaatggaaatggggaattagtctttcaaattcagtccttt

SEQ ID NO: 47314 - DNA, 1175 bp, Homo sapiens
atcaatggaaatgagaaagcctcctcgaagttaatcccatttttgaagaataaatagatattggactggtgttctgggttggtagccacttgtataaagaccccaagatgttggaagaactcaaagctgacaagtattgctagaatttagaaagttatgagccagagatctctaagggcaataggaatccattaaaagttttaacactggtgtggtgttaatcagattggcattaaaacacacacacatgccgggcacagtggctcacgcctgtaatcccaacactttgggaggccaaggcaggcggacctcttgagctcagaagttcaagaccagcctggaaaacatagtgagaccccatgtctacaaatacaaaaaaattggtctggcacagtggcacacacctgtagtcccaggacttgggagtctgaggagaaaggatcacttgagcctgggaggttgaggctgcagtgagccaagatcgcgccagtgcactccagtctgggtgacagagtgagaccgtgtctcattaaaaaaaaaaaaaacacacacacacatacacactgtctctgttatgtgcagaatgattagaggaagagaaaatgaggagctaagtttcctcgccacttactaacgtttacgtagtgctgttaggtattattctaattgttatccccattttacagatgaaacagacacaggttagcttgcctaaggtcgcacagatagtagttatagagggtcaaaggcagggagaccacctgccgagttcctgctcttcactattatgcgtcctgtgtctgctacttctgcagtggccctgggtgagagacaatgaggacttctctcttaatctgcacaggttgccttttcctgccttttctatcaggtgacactccacttattcctcaagacccacctcaaaaatcccctcttttctttcctagaagtagttgaccttctgcctactagccatattattttatgcatattgctgctgtcacccttaatacgttatttatatgccttatgctagaaaacatttaaggcagttcactgtaatgagaaaatataaaaattaaacggattagaaaacaagacaaaaagaacattgagattaggaaaaataaagggaagtcagaagtggggtgatcctcaaaatgcaggaggataaa

SEQ ID NO: 47315 - DNA, 1677 bp, Homo sapiens
atcaatggaaatgagaaagcctcctcgaagttaatcccatttttgaagaataaatagatattggactggtgttctgggttggtagccacttgtataaagaccccaagatgttggaagaactcaaagctgacaagtattgctagaatttagaaagttatgagccagagatctctaagggcaataggaatccattaaaagttttaacactggtgtggtgttaatcagattggcattaaaacacacacacatgccgggcacagtggctcacgcctgtaatcccaacactttgggaggccaaggcaggcggacctcttgagctcagaagttcaagaccagcctggaaaacatagtgagaccccatgtctacaaatacaaaaaaattggtctggcacagtggcacacacctgtagtcccaggacttgggagtctgaggagaaaggatcacttgagcctgggaggttgaggctgcagtgagccaagatcgcgccagtgcactccagtctgggtgacagagtgagaccgtgtctcattaaaaaaaaaaaaaacacacacacacatacacactgtctctgttatgtgcagaatgattagaggaagagaaaatgaggagctaagtttcctcgccacttactaacgtttacgtagtgctgttaggtattattctaattgttatccccattttacagatgaaacagacacaggttagcttgcctaaggtcgcacagatagtagttatagagggtcaaaggcagggagaccacctgccgagttcctgctcttcactattatgcgtcctgtgtctgctacttctgcagtggccctgggtgagagacaatgaggactgtgaccaagagggaatgcaaagaggacaggtgggagggaaatagggaaatttgtgaggtagaatgtcaggacttcaggtattgaatggatggtgggagaagggatttaggatgatcccaggtttttgacttcactgtgtgcctgttagtgctacttttctatttattgagattgagatgtccaaaggagcaacaggctttgtcagatgggagatagggacagaagatgagttctaaagtaatgactgcagtcaagtgcccccccacatccttaaaagccacaggaatctctaccctgccacttacagactgtctcagcttcagtctctgaacggagataataataaaatccacatcagcggattgttttgaggattaaacacaaaaagttgtaaagggctttgcattgagtccaacacataataattaatattcagtaaatattaatgtcagagttgttttactaatctgtcttccactttcctttgatgtggactttgccttctctcttaatctgcacaggttgccttttcctgccttttctatcaggtgacactccacttattcctcaagacccacctcaaaaatcccctcttttctttcctagaagtagttgaccttctgcctactagccatattattttatgcatattgctgctgtcacccttaatacgttatttatatgccttatgctagaaaacatttaaggcagttcactgtaatgagaaaatataaaaattaaacggattagaaaacaagacaaaaagaacattgagattaggaaaaataaagggaagtcagaagtggggtgatcctcaaaatgcaggaggataaa

SEQ ID NO: 47316 - DNA, 628 bp, Homo sapiens
aaatggcagatgataccttgggttgggaggggtcctggaagtggactcttccacagtggcatcaggggtaggggtcacagtggtggttaggaccagagctgaggtcacagagctcctggaggcaagattaaggacaaagagtggctccccatcaccaagttgggccatctggtcaaggacatgaagatcaagtccctggaggagatctgcctcttctctgtgcatcaaggaccaggttcaaggcatttgtcaccattgaggactacaacggctatgttggtctgggtgttagtgctccaaggaggtagccagcaccatccatggggctataatcatggtcaagctctttatcctccctgtgtgaggagactactgggggaacaagattagcaagcctcacactcacactacctacccttgcaaggtgactggcagcctgcatctctgtgctggtggcctcatccctgcctccaggggcgttggtactgtcttggcccctgtgcccaggaacctgctgctgatggtggttacccaccactgctgcactttgactggggactgcgctgctaccctggccaattttgccaagggcacctttgatgccatctccaagacctacagctatttc

SEQ ID NO: 47317 - DNA, 591 bp, Homo sapiens
ggaaatgcatacttgtaaactctagaagaaccactgcaaggaacagtcaaaaccccaatagagaaattaaaattaatataaaaacactccgctgaaatcagcaaaggtaaaataagaacaaaaccaaaggcactgaacagaaaacaaataattaaatgattatttgaactaaatactatgtttaaactaagtcttaaatatcaataattacattaaaaggcaatggtctaaacacatcaatgaaaagacagaaactgtcaaaatgtatttttttaaaaagacccaaccatatgttgtcttcaataaacccagattttgtctaggcacagtggctcatgcctgtaattccagcactttcagaggcctaggaaggaggatcacttgaggctagcagttcgagaccagcctgagcaacctagcaagactctatctctacaaaaaatttaaaaattagctaggtgtgcggcacgcgcccttagtcccaagctactcaaatggctgaggtgggaggattgtttaagtccaggagttggaggtggcagtgagccttgatcacatcactgaattccagcctggcaacagagcaagaag

SEQ ID NO: 47318 - DNA, 306 bp, Homo sapiens
ttttcctcttcatcccctctcccagcccttcttgcttccctaaatattttcttgagaggaaacgagggcagcaaagatattaatattgacaggctcaaccctttcctgatggtctcaaagtttaaaagagaaacatagaagatgcaatgcttacccaagtcatacatttgagtggtagatgtctagataatgtcaccagggcaaggcagaggcaagggagatgggggaggagagtagagatggccctggatgtgccaggtgaccatacgctcagcccaagtgagagcccagtcctggtccttccac

SEQ ID NO: 47319 - DNA, 1076 bp, Homo sapiens
ccctcagtgagcctgatgacaggtacccacttattgtgaagattgacctgaatcttttgactagaataccaggaaagccttacaaagaaacagagccgcccaagggggaaaagaaaaatgtgccagaaaagcacacgagagaggctcagaaacaagcctcagaaaaagtttccaacaaaggcaagaggaagcataagaatgaagatgataaccgagccagtgagagcaagaaacccaaaacggaggacaagaattcagcaggccataagccatccagcaacagagagtcatctaagcagagtgctgcaaaagaaaaggatttgttgccttctcccgctgggcctgttccttcaaaagatccaaaaacagagcatggctctcggaagaggactattagtcagtcttcttccttaaagtcaagcagtaacagcaacaaggagacgagtggcagcagcaaaaacagttcctccacatcaaagcagaagaagaccgaagggaagacttccagtagctccaaggaggttaaggtaaagtgttgggggcctggggcttttgaaaatcattcaacttgccatgtgacttttccagggtgacactgtgctttgaaattattgtaacatctcagtaaatatataggcctatgtcttttaccctctatatgtaataatcctgataaatgaatacagtgatataagactgtgaaggcggtaagtcagctggtcacatacatattgaaagaaaaacccttgggtacagtggctcatacctgtagtcccagctatttgggaggctaagatggaaggatcatttgaggaatttgagtccagcctgggcaatgtggtgagaccctgtctgtaaaagaactttaaaatttaaaaaaaaaaaaaaaaagatagaaaccagtcattggaaaagttggttatggaagcttttaaaataagaactaagtggttctagttgctaagattgagttgttgtatattgtttgaaataggctttgagtttctcagaattatactttacaaacaagttatattacgtaaagtgacaaagcaatcatttgactttgattcatg

SEQ ID NO: 47320 - DNA, 317 bp, Homo sapiens
ccctcagtgagcctgatgacaggtacccacttattgtgaagattgacctgaatcttttgactagaataccaggaaagccttacaaagaaacagagccgcccaagggggaaaagaaaaatgtgccagaaaagcacacgagagaggctcagaaacaagcctcagaaaaagtttccaacaaaggcaagaggaagcataaggtttgtgaagggtttttgttgtttgttttgaaacatcagaatctgaaatgcggtggaaatctcagtaagccacaaagtaacaaggtgggtcataagctgtgaaggaaaatagtgggtaaa

SEQ ID NO: 47321 - DNA, 1587 bp, Homo sapiens
gataaactctttgtgggtagctagtgctggaagctgaagttagttgaataaaaatcagaccacggtttctatttttcatctagaatgaagatgataaccgagccagtgagagcaagaaacccaaaacggaggacaagaattcagcaggccataagccatccagcaacagagagtacgttcccaaaacatgttgcatgccagtgttgttaatatatgtatatcatttgatagtgggtactttctgacatgctctgagtgttccttttagtaagcaagtgttatataaatgcatacacataacatatgccaaatagtgggagctttcacttttagctaatagggatggaaaacatttaacatttaattagttcttcctttattcattttttattggggtaggggtgagtatggggggagaattaaagtaaagctatgccactttctggttagatggcaaacttatctgtaatttccaagagactggttgccaacttaaaagtggtaatctcttcattcaccattcatcaatttgttcaatcattcagccaatatttattgagtactactgagtggtaggtcagtttttggccctggatttacaaccacgggaataaaaacagagaagatgcctaccttcatggaatttacagtcttattttgttttatagaaatcatgtgtcctagtaatcaaatggggaaaaacagatttgtcttgaaagcagacaaagagaaatggaaaaatcaattacccctgtattactgtgtggagaaatgaaggcattcgtttggtttggcaggtcatctaagcagagtgctgcaaaagaaaaggatttgttgccttctcccgctgggcctgttccttcaaaagatccaaaaacagagcatggctctcggaagaggactattagtcagtcttcttccttaaagtcaagcagtaacagcaacaaggagacgagtggcagcagcaaaaacagttcctccacatcaaagcagaagaagaccgaagggaagacttccagtagctccaaggaggttaaggtaaagtgttgggggcctggggcttttgaaaatcattcaacttgccatgtgacttttccagggtgacactgtgctttgaaattattgtaacatctcagtaaatatataggcctatgtcttttaccctctatatgtaataatcctgataaatgaatacagtgatataagactgtgaaggcggtaagtcagctggtcacatacatattgaaagaaaaacccttgggtacagtggctcatacctgtagtcccagctatttgggaggctaagatggaaggatcatttgaggaatttgagtccagcctgggcaatgtggtgagaccctgtctgtaaaagaactttaaaatttaaaaaaaaaaaaaaaaagatagaaaccagtcattggaaaagttggttatggaagcttttaaaataagaactaagtggttctagttgctaagattgagttgttgtatattgtttgaaataggctttgagtttctcagaattatactttacaaacaagttatattacgtaaagtgacaaagcaatcatttgactttgattcatg

SEQ ID NO: 47322 - DNA, 1003 bp, Homo sapiens
ccctcagtgagcctgatgacaggtacccacttattgtgaagattgacctgaatcttttgactagaataccaggaaagccttacaaagaaacagagccgcccaagggggaaaagaaaaatgtgccagaaaagcacacgagagaggctcagaaacaagcctcagaaaaagtttccaacaaaggcaagaggaagcataagaatgaagatgataaccgagccagtgagagcaagaaacccaaaacggaggacaagaattcagcaggccataagccatccagcaacagagagtcatctaagcagagtgctgcaaaagaaaaggatttgttgccttctcccgctgggcctgttccttcaaaagatccaaaaacagagcatggctctcggaagaggactattagtcagtcttcttccttaaagtcaagcagtaacagcaacaaggagacgagtggcagcagcaaaaacagttcctccacatcaaagcagaagaagaccgaagggaagacttccagtagctccaaggaggttaaggaaaaggctccaagtagctcctctaactgtcctccatctgcaccaactcttgattcttctaagcctcggagaacaaagcttgtctttgatgacagaaattattcagcagaccattatttacaagaagcaaaaaagctaaagcacaatgcagatgcattgtctgataggtttgagaaagctgtatactatcttgatgctgtggtatctttcattgaatgtgggaatgcattagagaagaatgctcaggaatccaaatccccattccctatgtattcagagacggtggatctcatcaaatacactatgaagctaaagaattacttggcaccagatgctacagctgcagataaacgactcacagtactttgcctgcgatgcgagtctttgctgtacctgaggctgttcaaactgaagaaggaaaatgctctgaagtactcaaagacactgacagagcacctgaaggtaagtatgcaaaa

SEQ ID NO: 47323 - DNA, 546 bp, Homo sapiens
aagaaatgctattagtttcatttttaatctccttacggttttcattgtagttatatatttttttggtcaggaaaaggctccaagtagctcctctaactgtcctccatctgcaccaactcttgattcttctaagcctcggagaacaaagcttgtctttgatgacagaaattattcagcagaccattatttacaagaagcaaaaaagctaaagcacaatgcagatgcattgtctgataggtttgagaaagctgtatactatcttgatgctgtggtatctttcattgaatgtgggaatgcattagagaagaatgctcaggaatccaaatccccattccctatgtattcagagacggtggatctcatcaaatacactatgaagctaaagaattacttggcaccagatgctacagctgcagataaacgactcacagtactttgcctgcgatgcgagtctttgctgtacctgaggctgttcaaactgaagaaggaaaatgctctgaagtactcaaagacactgacagagcacctgaaggtaagtatgcaaaa

SEQ ID NO: 47324 - DNA, 1701 bp, Homo sapiens
ccctcagtgagcctgatgacaggtacccacttattgtgaagattgacctgaatcttttgactagaataccaggaaagccttacaaagaaacagagccgcccaagggggaaaagaaaaatgtgccagaaaagcacacgagagaggctcagaaacaagcctcagaaaaagtttccaacaaaggcaagaggaagcataagaatgaagatgataaccgagccagtgagagcaagaaacccaaaacggaggacaagaattcagcaggccataagccatccagcaacagagagtacgttcccaaaacatgttgcatgccagtgttgttaatatatgtatatcatttgatagtgggtactttctgacatgctctgagtgttccttttagtaagcaagtgttatataaatgcatacacataacatatgccaaatagtgggagctttcacttttagctaatagggatggaaaacatttaacatttaattagttcttcctttattcattttttattggggtaggggtgagtatggggggagaattaaagtaaagctatgccactttctggttagatggcaaacttatctgtaatttccaagagactggttgccaacttaaaagtggtaatctcttcattcaccattcatcaatttgttcaatcattcagccaatatttattgagtactactgagtggtaggtcagtttttggccctggatttacaaccacgggaataaaaacagagaagatgcctaccttcatggaatttacagtcttattttgttttatagaaatcatgtgtcctagtaatcaaatggggaaaaacagatttgtcttgaaagcagacaaagagaaatggaaaaatcaattacccctgtattactgtgtggagaaatgaaggcattcgtttggtttggcaggtcatctaagcagagtgctgcaaaagaaaaggatttgttgccttctcccgctgggcctgttccttcaaaagatccaaaaacagagcatggctctcggaagaggactattagtcagtcttcttccttaaagtcaagcagtaacagcaacaaggagacgagtggcagcagcaaaaacagttcctccacatcaaagcagaagaagaccgaagggaagacttccagtagctccaaggaggttaaggtaaagtgttgggggcctggggcttttgaaaatcattcaacttgccatgtgacttttccagggtgacactgtgctttgaaattattgtaacatctcagtaaatatataggcctatgtcttttaccctctatatgtaataatcctgataaatgaatacagtgatataagactgtgaaggcggtaagtcagctggtcacatacatattgaaagaaaaacccttgggtacagtggctcatacctgtagtcccagctatttgggaggctaagatggaaggatcatttgaggaatttgagtccagcctgggcaatgtggtgagaccctgtctgtaaaagaactttaaaatttaaaaaaaaaaaaaaaaagatagaaaccagtcattggaaaagttggttatggaagcttttaaaataagaactaagtggttctagttgctaagattgagttgttgtatattgtttgaaataggctttgagtttctcagaattatactttacaaacaagttatattacgtaaagtgacaaagcaatcatttgactttgattcatg

SEQ ID NO: 47325 - DNA, 829 bp, Homo sapiens
  misc_feature (15)..(15): n is a, c, g, or t
  misc_feature (71)..(71): n is a, c, g, or t
  misc_feature (109)..(109): n is a, c, g, or t
  misc_feature (148)..(148): n is a, c, g, or t
gtaaccggtgttatngatgcaccgcctgtactgcagcccagagctcagcaggtaaggcggtggcaggctgngtcctctggctgagccccaccaggctgcagtgttcgcntgggtcctcttccagcaggtccagccaggaaggccctgnaggcccttctcccgctgggcctgttccttcaaaagatccaaaaacagagcatggctctcggaagaggactattagtcagtcttcttccttaaagtcaagcagtaacagcaacaaggagacgagtggcagcagcaaaaacagttcctccacatcaaagcagaagaagaccgaagggaagacttccagtagctccaaggaggttaaggaaaaggctccaagtagctcctctaactgtcctccatctgcaccaactcttgattcttctaagcctcggagaacaaagcttgtctttgatgacagaaattattcagcagaccattatttacaagaagcaaaaaagctaaagcacaatgcagatgcattgtctgataggtttgagaaagctgtatactatcttgatgctgtggtatctttcattgaatgtgggaatgcattagagaagaatgctcaggaatccaaatccccattccctatgtattcagagacggtggatctcatcaaatacactatgaagctaaagaattacttggcaccagatgctacagctgcagataaacgactcacagtactttgcctgcgatgcgagtctttgctgtacctgaggctgttcaaactgaagaaggaaaatgctctgaagtactcaaagacactgacagagcacctgaaggtaagtatgcaaaa

SEQ ID NO: 47326 - DNA, 392 bp, Homo sapiens
tagtgatgataacaaaggtggtcccagaattgcctaggcatatttttggcatatacaagttttaggaagtacgtaatcatgtaagacaaattagatccatttactgtgaaatattgggagtgagccaattaacatgttattttttaaaaataaattatactaagatttttgttagattaagtttaacttttaaaacaattttttgagagtattccatggatatatcttttgtcccatttcattgtgagtgggtacgttaacattacaatgttccctgggtccaaaatggctcatagaattatatgcctgcaccaaatgagaacttttgttttttaacttctttgaatattgccatctctcctagatattagatccagcagtttaaagtggtt

SEQ ID NO: 47327 - DNA, 429 bp, Homo sapiens
tcttgggtggaaaaaggaaaactggctcctttctttttcttctccaaagagaatccactgaggccaagcactggagagttgtaaccacattgactcctcttgccagagcctccactccccagtttcttgtaggtaattcttctggagcagcggttctcaaagtgtgatctctgaatcagcatcacctgagaaggtgttagaactgtaaattcttggccccaccccaggcctactgaatcagagactctagaggtaggccccagcaatctgtgttttcacaagccttccagttgattctgatgcaggtaagagtttaagaactactgatttaggcaacttgctcttttcatcccttctaaattactccctagttctcttcacccccaggtgtcttcccacttcaccccccacccccaagtgtccatccat

SEQ ID NO: 47328 - DNA, 320 bp, Homo sapiens
ctgcttcaaggaaaaattagttctctattagatgcatcactgactgaaacatttgtttaataaactggtataggcaaactcacctcaaaaagaccaatactggcctgatgatataatcgtatgatgcttctttttctcctataaaggtgttcatagaatgtgcaatcccatgtaaaagctgtgtgttaaagaaaatggtgtaactcttcaaccctcataaggctttgtgagattttatggcatgatcgcatttattgtcatgatagtaattcagtttaataatgttaactagtttcatttggacaacgtatttgccctgg

SEQ ID NO: 47329 - DNA, 402 bp, Homo sapiens
gattatggaggggttacagtttttggtaataacgagagagatctaaggtatgactgagagtgaatggatgagaatagcagagaacaaggtcagtggaaaactactcttcaaagaacctatagtcagggtgttgaaagattaaaaattgctaagaattaaatcaggagtagtgctgcgggaaatgaaatgagcagtgaactaaacttactgagaaatgagaggggatgacccaggggtttgtagattttgtagatgatagcaatgaagagaagagatattatttgatggtatggaactcaaagctgagagttttaagggaagataggagacgtgtctagaagtagtaatgaggagcaagaacatcatctaccccatctccaggaccagtaataggaggactgt

SEQ ID NO: 47330 - DNA, 368 bp, Homo sapiens
gaaaaaggaaagaaaaaaggaaatccagtgcagagtcccagagtgtgggggaaagcacagtgccttctggggacttagatgttcaatgcagtggatcagagagggtgaagcaaggagggacagtctatgagtccagagatgccaaccatggcagatcataaagggcctgagggcataaggaagccagtggaattctgaagctcgttaaagtgtaggatagtggatccaagaccatttgaataaagccatcagactctgacattgctcattttctttttaatgtgtttatggcagacctggctgaagggagggaggatatgtttatcccaggctcagatggcaggaagcatgcgagacatcagaatggg

SEQ ID NO: 47331 - DNA, 430 bp, Homo sapiens
ttcctggaggacctggagccccattgcaaacaagaaccctggagactccattgaccacctagaacctcgagccataggtgtgtggagattagagctcatcatatctctggccatgtctgtgtctagtgtttgaatctggaagagtttatgaagaggttagaattcatttctatcttaatccaggctctgttccaatctgaaaagatgagcagagtagactgctaatttcattcacttaaaaaaaaatcatcagcttacatgagctgacccattaatattactaattttaatatttcatttgggaaaaataatttttgcaatgttgtaagaagtaagtgttatggagtagggagatggaaagttggaatgtttggaacataggatccaaccgggattaaagggggcgtcccctactttttctaaatctggc

SEQ ID NO: 47332 - DNA, 571 bp, Homo sapiens
gtgagtatgccgtttcctcaagttttacctcctgcaacttaaaggcagattttgcagcaactttttggtaaactgtcaactagtggcttgctgttggactgtacttctctgagtgaggtgctgtgaggacccctggaaggacacaagggcagaatagtgaaggccgacgctgacttccagaagcaatgagtgggagacatcttcctgccacaccctgagcaacacagttgtgaagagtaaatagacactagtagcttctagactttttccgaattctcatcacataaaatatctccttgtgaaattctggcttattgaggacaaagaagattctggaacacaaaccccaaacagcgcatcttcggaaacatgcctgttttcaacataagaagtaatccacgcttcaggggctagcacaaagccacagttccactttgagtccttcagaagtgacaaagaccaaatgtggcccagtatgtgaggcaaggcggaagtaggaatttcatgctgttttaaggttgcttagtgtactttaactgaaggtgtaataaaagcaaattctaataaaatt

SEQ ID NO: 47333 - DNA, 396 bp, Homo sapiens
tccacaaatccctgtaaagatagagaataacaacttcattataaagactggtatgtttcagaatatatttcttttatttttaccacttgtacacatattatactacagagacaaaatccctaatagctacatacatacatatgctctccaagtatcttaatttcaaacatgattgtcctagtgactgaatgggtgtgagttatgtatactttatcatcctggtggttcatattcactatcagtgaaaattaggcagtcagaaaaaagtaaaagggctcactactctcaaaaaccagaatttctaaacagactaggccctaaaaagggaagaagaaaaaaattacagagcagaaagggaatcaaaatcagaagggtgatgagtgaaagaacatggca

SEQ ID NO: 47334 - DNA, 424 bp, Homo sapiens
gagcatatccatatttgtaatggtattttccaatgtcgctgtaggcatgggggtaagaaaatgtattagctgtggaggagatgttaagagtatacggaatgttactcatcctaagggaatctttgtgtttctgaggagagacccctgggccttttcgttgttcttcagtgtgggccacgttcactttcagacagtaactctgtagggataactctgtcagtggtacgttcagtccttcatctcacgcttcttcatctcactcttctcgagaatgctggagtcattggtatcctcagttccagtattgttaaaggtgaatttcaaattactagtctatttcaaaatactattgaattccaattagctcaccttttgtagaaagatcagctatttgttcaagtgtgtactgacttgaaaagggcct

SEQ ID NO: 47335 - DNA, 930 bp, Homo sapiens
gcagtttgatcgtttgaagccttcttctctcagctcgtcaaagtcattctccgtccagttttgttctgttgcgtgaagacccactacgttatgtgagactatggggaaagctgaaatttggttaatccgaacatattgggattttgaatttcctcgtccatacttacctaattttgagtttgttggaggattgcactgcaaacctgccaaacctttacctaaggttttatggagatacaaaggaaagaaaccagccacattaggaaacaatactcagctctttgattggataccccagaatgatcttcttggacatcccaaaaccaaagcttttatcactcatggtggaactaatgggatctacgaagctatttaccacggagtccctatggtgggagttcccatgtttgctgatcagcctgataacattgctcacatgaaggccaaaggagcagctgtggaagtgaacctaaacacaatgacaagtgtggatttgcttagcgctttgagaacagtcattaatgaaccttcttataaagagaatgctatgaggttatcaagaattcaccatgatcaacctgtaaagcccctggatcgagcagtcttctggatcgagtttgtcatgcgccacaaaggagccaagcaccttcgggttgcagcccatgacctcacctggttccagtaccactctttggatgtaattgggttcttgctggtctgtgtgacaacggctatatttttggtcatacaatgttgtttgttttcctgtcaaaaatttggtaagataggaaagaagaaaaaaagagaataggtcaagaaaaagaggaaatatatatattcttaagtttggcaaaatcctgagtagtggaagtcctattaattccagacaaaagggagtttaacaaaaacacgtcttccatcctggttcca

SEQ ID NO: 47336 - DNA, 1766 bp, Homo sapiens
aaacttcagcagagaaaaacatttgcttcacatctcatcaaatcttctgcatcaagccacatcatgttaaacaaccttctgctgttctcccttcagataagtctcataggaaccactcttggtgggaatgttttgatttggccaatggaaggtagtcattggctaaatgttaagataattatagatgagctcattaaaaaggagcataatgtgactgtcctagttgcctctggtgcacttttcatcacaccaacctctaacccatctctgacatttgaaatatataaggtgccctttggcaaagaaagaatagaaggagtaattaaggacttcgtttcgacatggctggaaaatagaccatctccttcaaccatttggagattctatcaggagatggccaaagtaatcaaggacttccacatggtgtctcaggagatctgtgatggcgttcttaaaaaccaacagctgatggcaaagctaaagaaaagcaagtttgaagtcctggtgtctgatccagtatttccttgtggcgatatagtagctttaaaacttggaattccatttatgtactccttgaggttttctccagcctcaacagtggaaaagcactgtgggaaggtaccataccctccttcctatgttcctgctgttttatcagaactcaccgaccaaatgtctttcactgacagaataagaaatttcatctcctaccacctacaggactacatgtttgaaactctttggaaatcatgggattcatactatagtaaagctttaggaagacccactacgttatgtgagactatggggaaagctgaaatttggttaatccgaacatattgggattttgaatttcctcgtccatacttacctaattttgagtttgttggaggattgcactgcaaacctgccaaacctttacctaaggaaatggaagaatttatccagagctcaggtaaaaatggtgttgtggtgttttctctgggatcaatggtcaaaaaccttacagaagaaaaggccaatcttattgcctcagcccttgcccagattccacagaaggttttatggagatacaaaggaaagaaaccagccacattaggaaacaatactcagctctttgattggataccccagaatgatcttcttggacatcccaaaaccaaagcttttatcactcatggtggaactaatgggatctacgaagctatttaccacggagtccctatggtgggagttcccatgtttgctgatcagcctgataacattgctcacatgaaggccaaaggagcagctgtggaagtgaacctaaacacaatgacaagtgtggatttgcttagcgctttgagaacagtcattaatgaaccttcttataaagagaatgctatgaggttatcaagaattcaccatgatcaacctgtaaagcccctggatcgagcagtcttctggatcgagtttgtcatgcgccacaaaggagccaagcaccttcgggttgcagcccatgacctcacctggttccagtaccactctttggatgtaattgggttcttgctggtctgtgtgacaacggctatatttttggtcatacaatgttgtttgttttcctgtcaaaaatttggtaagataggaaagaagaaaaaaagagaataggtcaagaaaaagaggaaatatatatattcttaagtttggcaaaatcctgagtagtggaagtcctattaattccagacaaaagggagtttaacaaaaacacgtcttccatcctggttcca

SEQ ID NO: 47337 - DNA, 398 bp, Homo sapiens
tttgttatgaaaggaggctctgggtctgatatgcttgaaaatcacagggcaagggcggtagttcccgaggcagcagggagaggcactcaggggacatgtggattcacggtatcagcaaacacagggacgaggggtccactgtctggctctttgcccctgtttctctggaggtcagcactggtggccggtcagagccggctctgcattctggaaccttagccgtgacagtgggcctgggaaagtcggtgggtctccccatggcctcaagaactcatggcctgttgttgccacagtgtcttaggctttgctggggcttttgagctcacgggacagttccatacaccccactccacccctaccactccagtgagcatactttctccagtgtgcatgggccc

SEQ ID NO: 47338 - DNA, 450 bp, Homo sapiens
gaaattttactgtttgattgattataaaagaagtatagtcagtgtgtaatgtgatgtgtaaaaaggtgtaaagaagaaactgaaagtcacctataacccattaataattacctgtaactggtattgttgtgagtgtgccctcagtttgtttatggcaaacatgatttttaaaacaaaatctggatcattaaatattttcttaacattattctgtagacaatttcattaattataagggctagtactctcaagattttttttgcttttcttccattttgtaacctcttggggaccaagacacatttcttttcattgtttctcattttctctattgataacaaaattttgtggtatagagttacagacttttgttgataaagaagggactttaggacaactagataaacaactttatgaaacaactagataaacaactttataaaagtgaca

SEQ ID NO: 47339 - DNA, 350 bp, Homo sapiens
taatagggtccttattgggtacacctgtcattttaatttatataggcaggtccaaaactcatttttatggctcagtttctgtaatgtaagattaataatgcctgtattgtagtcccatctacagaagtcacaaataaaattaaatcctaggaattaaccaaagaagtgaaagagctctataatgaaaactataaaacatggaggaaacaaattgaaaagaacacccaaaaactggaaagctttctacgttcatggataacaagaatcagtattcttaaaatgtccatagtactcaaagtaatctacagattcaatgcaatgtctaccagaataccaatgacattcttcac

SEQ ID NO: 47340 - DNA, 921 bp, Homo sapiens
ggtttaaatgctccacataaaacaagcttgtccaatccacatcccatgcactacatgttgcctaggatatctttgaatgcagcccaacacaaattcttaaactttcttaaaacattataagatatttttgcatttttattttatttatttttattttgctcatcagctgtcattagtttatgtgtggcccaagacaattcttcttcttctgttgtggcctaagtaagccaaaagattggacacctcttaactaaaagatacagattggcagaatggataaaatatcaaaagccaaataagtattgatttcaggagacacacctaacacgtgaggattcttatggacttaaggtaaaggagtggaaaaagatatttcatgcaaatggaaactaaaagcgagcaggaatagttattcttatatcagataaaactgtctttaaagcagtaacagtaaaaaaataaaaaaaaacatcattataggatgacagaagggatcaattcaacaagaagatataacaatcctaaacatgtatgtgcccaactctggagtacccagattcataaagcaataccactagattaaagaaaagagatagcaacacaacagtagttgtgactttaacactccactgacagtgctagacagatcactgaagcagaaatttaacaaagaaacactggacttcaactgcgctctagaacaaatgaacctgcaccgtaaacaaatgaacctaatagatattcacggaacattctacccaaaaactgcagaatatacatttttctcatcagcacaaggtataacacattctccaagatagaccatatgataggccacaaaatgagtctcaataaatttataaaaatagaaatcacatcaattatattctcagaccacagcaaaataaaactagaaatcaa

SEQ ID NO: 47341 - DNA, 406 bp, Homo sapiens
agagcatcaaagcattatcaccgacccaacacacaccggcgctgcgtagtttctgcagcaggtgtggggtgaagagttgccacacagctgtctgacaccgggtgtacggcgtcacccctcacttcctggacaaggcaacattttcctaaaggcacctggagacattgagtactgccaatggactgctgaaccaaacgaagagcttttctgcaacattcatgttgcagaggagatgggaactgccactcagctgctgccactcagctactaaatctgaaatagttattcagcaatacaaaaatggtattgcggggttctggggcagcccctttggctcaaatgccagagctttctgctatacctactgagtttcagtagattttattgaataaaagtttctcaattc

SEQ ID NO: 47342 - DNA, 777 bp, Homo sapiens
tcccagcactttgggtggccgaggcgggtggatcacctgaggtcaggagttcgagaccagcctggccaacatggtgaaaccccgtctctactaaaaataccaaattagctaggggtggtggcaggcgcctataatcccagctacttgggaggctgaggcaggagaatcacttgaacccgggaggcggacgttgcagtgagccgaaatcattgcctttgcactccagcctgagcaaaaagagctaaactccatcttagaaaaataaataaataaataaataaataaaggatttaccagagcatccaagaaatattattaaatacttgatcccgtgaaaccactcccctatctgttaacgatttttaaaattttacagatttcgaaaatcttcttctttatccttggacctaacctatccacagggtccctaaccatgctatgcagttcccacctctaccagaagtgctgggaaaatcacctaggttatctagcttccctcaaagtattttacactgttgtgagatttcctttaagattcaggagctaaagtttattttctttctggtttcctggcggagcaaaggccctgcacgtgtgaacggaaacaaaacccacacagactctagggatgccaaatattaacactgtgggtaggggcaccttccttctcggccgaattccctttcccagagagcctccagagggatcagtcaacgcccactgagcctggatcaaaggtcaagcttgcctggtcaagaaggatcctggatcaagctt

SEQ ID NO: 47343 - DNA, 428 bp, Homo sapiens
ctattttggtaaaaatatctccatacacatgtctgtacattcatagataaagacttggaagaaatgtggcaaaaatactaacagtgttgtatctgggtattgagtttaaagatgaatttattttcttctttgttcctttctatattgcttgatttcttttgcagtgaggatgtaccagtttttttaattttatttttgaaatagagaatacattcacaaagtaataatcaagagtctaaaagattatacaataaaaattcttctctcgtccctgtctgccttccatctggctccctccagaggtaaacagtgtgaccagcaactagtgtatccttttagagactttatgcacatataagcaaatatatgtttgttttttcctattatcacttttacaaccaaaatacaataaaactaccttgattttg

SEQ ID NO: 47344 - DNA, 503 bp, Homo sapiens
ctgtttgagtctttacagtatcttctttcttaccaacttgtctttctagaatattttcacaattaatgttttggtttgctttgaggtaggcgatcagcaggacttgttttctgagcactggtcaggaccctgtctatctaaatgatatgtagcaaagaaactggccaaagccatgtaggaccagcaattataatgcacttgcgtaagacacttctaccactaccatgacagtttacaaatgccatggcaatgacctggaagttaccttatataattctgggaactctcttccctttttccataaagtttgtgaataacccatcccttatttagcaaataattaagaatgggtataaatataggtagccagcaatccacaagtgctactctggaccaatctgcctctggggtggccctgctctgtctatggagcagtcacttggctgtacactgttgctcaaataaacttgctttctttcattgtcaaaaaaaaaaaaataaat

SEQ ID NO: 47345 - DNA, 430 bp, Homo sapiens
gatatagtaatgacagtagttacaaaactactatgtcattgtcacacctaacaaaattagtaataactccttatctcatctaagcacctccatgccctccttgagccaacaggatattttgtgtcttttttttttttttttttaaatgagatggagtctcactctgtcacccaggctggagtgcagtggcgcgacctcggctcactgcaagctccgcctctggggttcacgccattctcctgcctcaacctcccgagtagctgggactacaggcacccgccaccacgtccagctaatgttttgaatttttttttttttttttttttttgatatggagtcttgctctgtcgcccagactggagtgcagtggcgcgatctcggctcaccgcaagctctgcctccagggttcacaccattctcctgcctcagc

SEQ ID NO: 47346 - DNA, 1054 bp, Homo sapiens
agtatcaggggacctgagtgggaattggagtgctgatggctggggctgcatgcctaggagccagcattcctgcaactggatgccccagccaagagttggcaggaaagccttggtagctaggcagccgagaacatagcacggacactgctaagctgacctaggtgcacatcagagaaaccctcctctgaaattgatgaccacctggctgcagttgctagtgaccagatggtgaggagctagtggatagagggtgggccagggcctcaagacagctcttcactctccactctgcactctgattccgctatttcttggctctgggttctgctgtcaaagtcccaggggccactattgtgggctctcaccctgtatccaagccccacttcacctgcccccttgtatagctgccttcctcacatccctccagcttgcccacattttgctcacggatgggggcagactctactgttccctctgcacctgcatctctctccttcaggcctttcatgtacaccgggaccaccaaagggccatgaactctttgtcagtcaagtcccaaggtcccatagagagcagatggccactttaatgtcacctcaagcccttaggctgtttttagacatccatctccttagtggatgctttttatagacccccatccaagacctcacacatcttgtaattaaatttcatctggtagtattttgactttttttccagcctgtcaacaccttctgtgttcttacttgttgtatctcaaatatttgatacccttttcagtgttgtattaatctaaaatttgttgtttgtgtttatgttttcatgaagttactgttaaaaaatataggaagaagagaaggttaagatttgagcccttcagtgtatagttgagcttgtcctggaagacatcagccatttaagaatcactaagttggccgagcgcggtggctcacgcctgtattcccagcactttgggaggccgaggtgggcagattgcttgagcccaggagttcgagatgagcctgggcaagtggcgagaccccgtccctatatt

SEQ ID NO: 47347 - DNA, 999 bp, Homo sapiens
agtatcaggggacctgagtgggaattggagtgctgatggctggggctgcatgcctaggagccagcattcctgcaactggatgccccagccaagagttggcaggaaagccttggtagctaggcagccgagaacatagcacggacactgctaagctgacctaggtgcacatcagagaaaccctcctctgaaattgatgaccacctggctgcagttgctagtgaccagatggtgaggagctagtggatagagggtgggccagggcctcaagacagctcttcactctccactctgcactctgattccgctatttcttggctctgggttctgctgtcaaagtcccaggggccactattgtgggctctcaccctgtatccaagccccacttcacctgcccccttgtatagctgccttcctcacatccctccagcttgcccacattttgctcacggatgggggcagactctactgttccctctgcacctgcatctctctccttcaggcctttcatgtacaccgggaccaccaaagggccatgaactctttgtcagtcaagtcccaaggtcccatagagagcagatggccactttaatgtcacctcaagcccttaggctgtttttagacatccatctccttagtggatgctttttatagacccccatccaagacctcacacatcttgtaattaaatttcatctggtagtattttgactttttttccagcctgtcaacaccttctgtgttcttacttgttgtatctcaaatatttgatacccttttcagtgttgtattaatctaaaatttgttgtttgtgtttatgttttcatgaagttactgttaattgtcctggaagacatcagccatttaagaatcactaagttggccgagcgcggtggctcacgcctgtattcccagcactttgggaggccgaggtgggcagattgcttgagcccaggagttcgagatgagcctgggcaagtggcgagaccccgtccctatatt

SEQ ID NO: 47348 - DNA, 902 bp, Homo sapiens
agtatcaggggacctgagtgggaattggagtgctgatggctggggctgcatgcctaggagccagcattcctgcaactggatgccccagccaagagttggcaggaaagccttggtagctaggcagccgagaacatagcacggacactgctaagctgacctaggtgcacatcagagaaaccctcctctgaaattgatgaccacctggctgcagttgctagtgaccagatggtgaggagctagtggatagagggtgggccagggcctcaagacagctcttcactctccactctgcactctgattccgctatttcttggctctgggttctgctgtcaaagtcccaggggccactattgtgggctctcaccctgtatccaagccccacttcacctgcccccttgtatagctgccttcctcacatccctccagcttgcccacattttgctcacggatgggggcagactctactgttccctctgcacctgcatctctctccttcaggcctttcatgtacaccgggaccaccaaagggccatgaactctttgtcagtcaagtcccaaggtcccatagagagcagatggccactttaatgtcacctcaagcccttaggctgtttttagacatccatctccttagtggatgctttttatagacccccatccaagacctcacacatcttgtaattaaatttcatctggtagtattttgactttttttccagcctgtcaacaccttctgtgttcttacttgttgtatctcaaatatttgatacccttttcagtgttgtattaatctaaaatttgttgtttgtgtttatgttttcatgaagttactgttaaccttaagacatcacctttaaggatccctagtttgcccacccggtggttaccgcttttttccaat

SEQ ID NO: 47349 - DNA, 396 bp, Homo sapiens
gtatgttctctcatagggttcttatttactcttggtaaggtgagtctcaatagattataatgtttattgctgtagtttaactgtggattttgtttttatcttttgaaaatacactttcttttaagtgtattattataggcataccttggagatactgcaggttcagttataggccactgccattaggtagtgaatattgcaataaagtgaatcacatgaactttttggttttctagtgcatatagaagttatatttacactatactgtagtctcttaagtgtgcaatagcagtatgtcttaaaaaacaatatacataccttaatgaaagtatactttattgctaagaaatgctaatgatcatctgggcctttagtaagtcttaatctttatgctga

SEQ ID NO: 47350 - DNA, 758 bp, Homo sapiens
gagacggagtctcgctctgtcgcccaggccggactgcggactgcagtggcgcaatctcgtctcactgcaagctccgcttcctgggttcacgccattctcctgcctcagcctcccgagtagctgggactacaggcgcccgccaccgcgcccggctaattttttgtatttttagtagagacggggtttcaccttgttagccaggatggtctcgatctcctgacctcatgatccacctgcctcggcctcccaaagtgctgggattacaggcgtgagccaccgcgcccggccggcttggaatttttaatagtggttacaatgtgggcaggggcttgtgtggtttggatttcctgcttgcaccaacaaagagcatccagactttcacatgagcttgcccagatgcaaggcacaagggggtgagggaaagggaaggcttaaaagttgttagcaggccgggtgttgtgactcaaaatactgtaatctcagcattttgggagacctaggtgggtggatcacttgagcccagaggtttgcaaccagcctgagcaaaatattgagactcctgtctctccaaaacaataaaaaataaataaacaaataaataaataaatggctagacataatggtgtgcacctgtagtcccagctgtttgggaagctgaaatggaaggatcgcttgaggcccagagtctgaggctgcggtaagctgtgttcgcaccactgcactccagcctgggtgatagagtgagaccctcgtctcag

SEQ ID NO: 47351 - DNA, 1901 bp, Homo sapiens
  misc_feature (4)..(4): n is a, c, g, or t
  misc_feature (119)..(119): n is a, c, g, or t
  misc_feature (1271)..(1271): n is a, c, g, or t
ttantagtgtatggcaggaggcctgccagccctgtgtgccttggatgtggggcaactaaagcgcactccccacttttaagaagccattgacccagtggagtaaacaaacatgaacaacnaacaatatcacaatgaaataagtgtgagtggtatgtcaggagagccccaaagagggaagatcagaaaaggcctgacagaggtgaagctgggctgggaggaagggaagtgcctcttgattgaggctctgctctttctcctcttcccttcttcctgtgtctcctcactttccttccaccagatcctttccacttccccagccccgctattgtctggtcttagagggcaggaaaacgaggtctgctggtctgctttcagattttgtttaactatagaagtgctttggtttctttgtggtttctttgagcttttcagtgagaaagaagaaggcagtgggaatacattggaaataaacttatcagtgctttgtagcatcaccactgtggtgtgattgccccttgaggcgtgtgagaggaaaggtggaggaagatgaggctgacaaggttaagtggggcagagtgctctggcactactgggattgtagggaggggaaccgagggacatcatggcacaaatctggaacccgagcaaagcgagttttctgaaagataactccagcagtgatgtggagaattcttttaatggcaagagaccagatgctgtggttaccttgcagaagcaaggtggatccccaccctaaatttagtttggatgtcaagattgacgccatcacacataccaagagagcatgcacatgtttattacttacatcaagcttgtccagcccacagcctgcgggtcgcatgtggcccaggatggctttaagtacagcccaacacaaatttataaactttcttacaacattttgagattttttttttttgctagttgttttttttttaagctcatcagctatcgttagtgttagtgtattttatgtgtggcccaagacaattcttcttccagtgttgctcagggaagccaaaatattggacgcccctgacttacatgatgaggctttctggggaagaacagggaagacatcccaagctagttcaaaacagcttgggagagcaagaaaaaagactggcttgggatttgattttcatttatttttatttttagagatgaggtctcactatgttgcccaggctggtcttgaactcctgggctcaagcaatcctcccaccttggtctcccaaagtgctgggatnacagacatgagccaccgcgcccggctaattttttgtatttttagtagagacggggtttcaccttgttagccaggatggtctcgatctcctgacctcatgatccacctgcctcggcctcccaaagtgctgggattacaggcgtgagccaccgcgcccggccggcttggaatttttaatagtggttacaatgtgggcaggggcttgtgtggtttggatttcctgcttgcaccaacaaagagcatccagactttcacatgagcttgcccagatgcaaggcacaagggggtgagggaaagggaaggcttaaaagttgttagcaggccgggtgttgtgactcaaaatactgtaatctcagcattttgggagacctaggtgggtggatcacttgagcccagaggtttgcaaccagcctgagcaaaatattgagactcctgtctctccaaaacaataaaaaataaataaacaaataaataaataaatggctagacataatggtgtgcacctgtagtcccagctgtttgggaagctgaaatggaaggatcgcttgaggcccagagtctgaggctgcggtaagctgtgttcgcaccactgcactccagcctgggtgatagagtgagaccctcgtctcag

SEQ ID NO: 47352 - DNA, 331 bp, Homo sapiens
cgttcattcatgatattgtcctgcccaattgatccctgtgttcagcaatgtcgcctgagaaaggggcaaaaagaccaattctagaactttctttcccagcatggtgtggtgaaatagttctttggcatggacgaggaatgcagggtttggatcacactatgctttatgaacttgggccctagttctcttcatccataaaatggggtttgtatgattttgttagatttgtaaaaacccatctgataaactggtgaacatgataggacaagttccgtcctggtcacagcttatatgagtgttgtggatgctaccataagtgcttccccatctc

SEQ ID NO: 47353 - DNA, 734 bp, Homo sapiens
tgggattataggtgtgagccaccacgcccggccgatgccaagctaatttttaaacattttttgatagaaatgaggtctcattttgttgcccttgcttgtctcaaactcctggcctcagtcctcctgcctcagcctcccgcaacgctgggattatgggtctgagccactgcacctggcctctccgtatttctatgattctcaatattcccatggacggctgtgacccagtcagtctgcactctcgggaggacatctgctcagataaaagcccagttcagggaaggctctgtcttcaggatcccaaagaaacttgaggcttctccatgaggggaaaaagtagtgggctgaggtgattctagtttatccttctataaaaatctttacccacagaatgggacgctgtgcagtcattaactagaacgataaatacttacattcagaaacagaaaagtgcctgtaacgttgtgctggcttgtaagaacagagaatagagttcatgtaaaatgagagacacacacaaatacttctctaggcatctgtgcatatgtatctgcaagaatgttcactgaaatgtcaccaccggaatcacagaatgtctccttcattctcagtacttttacaatttatactatctgctcagaagatctcctttatataaagataaacaaaaagaagaaaagccacacaaaaaatgtgtgagaaacaaactaaaaatctccaaaccccagttcacc

SEQ ID NO: 47354 - DNA, 679 bp, Homo sapiens
tgggattataggtgtgagccaccacgcccggccgatgccaagctaatttttaaacattttttgatagaaatgaggtctcattttgttgcccttgcttgtctcaaactcctggcctcagtcctcctgcctcagcctcccgcaacgctgggattatgggtctgagccactgcacctggcctctccgtatttctatgattctcaatattcccatggacggctgtgacccagtcagtctgcactctcgggaggacatctgctcagataaaagcccagttcagggaaggctctgtcttcaggatcccaaagaaacttgaggcttctccatgaggggaaaaagtagtgggctgaggtgattctagtttatccttctataaaaatctttacccacagaatgggacgctgtgcagtcattaactagaacgataaatacttacattcagaaacagaaaagtgcctgtaacgttgtgctggcttgtaagaacagagaatagagttcatgtaaaatgagagacacacacaaatacttctctaggcatctgtgcatatgtatctgcaagaatgttcaaatttatactatctgctcagaagatctcctttatataaagataaacaaaaagaagaaaagccacacaaaaaatgtgtgagaaacaaactaaaaatctccaaaccccagttcacc

SEQ ID NO: 47355 - DNA, 203 bp, Homo sapiens
tttcaactcagacatcacatttaatatgaagacatttacagaatgtaaatcctaaatatggatagagttaaacataaaggtattgccactggaaaggactcttatctcttgtgaaataaatccagtaggaagctgttctcaggaatgccttggccaggtacacagctcactgtgcttgagtagtgctcctgctatttgctaag

SEQ ID NO: 47356 - DNA, 652 bp, Homo sapiens
tgatcacaggagggtcttctctgggctctttctgctgtgaaatccagaagttatgaagtttccacctacttttgaaatcttaacccacttgtttgttcattcccctaatggcccataatgacatcccacctgttaaggaaagagcaggtcctcggaggctgaacaaggccagctctggagtcgaatccactggaatctggagcaagcccctctggcctcggggttgggttcttgatacttgtcggcttgcccaggtgccctaccttcagaccccgggaccctgcgtagtgactgctgtgacagatagcaccagccttgggtttccgatctgcctccgaggcacctgctgttacgtcctcgggccagtcagcagtcccccacccctgagttgtcagaattaaacggcacaatgaattgaacgtgtttggcaccgtgcctggtgtgtggactcagttgatacttgttgaccgaaggcaaatctacagaaaagcactaggaagaaagggaaagtcactcggctgtgccacatgagctttcaacctatgccgagctgcctccagcccgcgccacccccctgcgtctacggctttgcagtcacaagatcctttgtatgtgctgtctatatataatcgctttgtttcacaaagatctg

SEQ ID NO: 47357 - DNA, 337 bp, Homo sapiens
gccttcaagcttctaccacctgttgccttttctcattgcaattattacagattgcctgatttgctctccctcattccttgaagattttagcacctggatcgctgtctctttctgactctctatctgtcgtaattcatgatggtttttaatatccacacagagatcctttcaaaacccaggagtaccagcgacattaagtaacactctgtgctgttacaaaccaacctggaaatctcagttgcttaacccaataaaagatgatttcttgcttgtgccaaatccaatacacctctatggtacttacctggctataccccatgcctgttcaaagccaact

SEQ ID NO: 47358 - DNA, 1244 bp, Homo sapiens
cagagccccctctcggctgctggcccgggctcgcccgcgccgctgggggctctgactcctgccgagccgggcctgggcagcgccccccgcgccccgcgagcccgcgcccccgtcaccgggaaacgccgtagccggcgatccgcggtcgccctgggctcggcgccggcccagccaggaccccgggagcgcacgggacgggcctcgccagtcacactccagcgcccccacgagccagcacagtgcctgctctcagtgaaaggccactgttctccttgggtgacccccatgatgcctgaccgctcctcgtgcctcctggaacagccagggtccttatgaagtggtgaccactccagtcagcaggggtggaaaatggtaccagtcaaacccgaggcggaggaggagcagcccgcagtcgctgccgcgagatggaggagcccacgcccgagcccgtctatgtcgacgtagacaaagggctgaccttggcctgcttcgtcttcctctgcctcttccttgtcgtgatgatcatccgctgtgccaaggtcatcatggacccttacagcgccatccccacatccacctgggaggagcagcacctggacgactgaggcacagcggctgtggggactggacctggcgctctgtgggtggctgtgccccaggatgcatccgtgtgttccctgccagcctgccatcccacagaggcaaggaatgaatctggccacccagggaaacagaaggtgcagcttagccctctcagccctccctcgagcaccagcgtggaatgcccgggtgccgtgggtgtcgcaaccatggaccagccaggggaaaagagccctggaccaggacccaggaggctggggttccagtgtggggagtccctgtgagatgatagggtagtcaccttcccaggttcctgggcaccttttggaactggatccagcaacagacaccccccatccatcacataacagtggtcttgtcttgaggagactctcggtcctttaaatgcaaagtagcaatggaggctcccaaccaagaggtcccacctgaaccccagccccctccccatggactagcagtggtgtggcagtgaggggggaaagcgggttgagggagtctcacctgaaaattcacaaaacgcacaggatatgggctgcttccaagcagtatttttttaaactaaaatatagagggatatatttttcctgttataaataaaatgtacattttagaaacttgggaaa

SEQ ID NO: 47359 - DNA, 415 bp, Homo sapiens
ggttatcagaaaccacttaaccttcatgcttagtgtctattctcaacagacatctggcagaattaggaggtgagccatgttcctggagccctggcctatgccagctgggaaggcagccatgcaaagtcttgctgctaacccccagcccagcaacaggactgcatttaaacaaataaccaaaaatactctctcttaaacacttatcctgtgactttcatgactcatattatcctggttccccttccatttattgatcctctcaggcttggctccataatttgtggggcccaaagcaaaatgaaaatttgagttcccttgtttgaaaagcaagaaaaattactgttaaagttactcaatataattctgttatcttttggcactttctctcgatttgtcatggaatttttttatttgc

SEQ ID NO: 47360 - DNA, 532 bp, Homo sapiens
ccgtgaaaatttgaacaccgattgtttaactgatattaaggaatttataaaatttaagtgtgaaaatattatagttacgttaagaaaatagttgtcgtcggctgggcgcggtggctcgtgcctgtaatcccagcactttgggaggccgaggcaggcggatcacgaggtcaagagatcgagaccatcctggccaacatggtgaaaaccctgtctttattaaaaatacaaaaattagccaggcgtggtggtgtgtgcctgtaatcccagctactcgggaggctgaggcaggagaatcgcttgaacccgggaggcggaggttgcagtgagccgagatcgtgccactgcactccagcctggctacagagaaagactgtctcaaacaaaaaacacaaaaattagccgggcatggtggtgggcgcccgtagtccagctacttgggaggctaaggcaggagaatcgcttgaacccaggaggtggaggttgcagtgagctgagattgtgccactgcactccagcctgggcgacagagcaa

SEQ ID NO: 47361 - DNA, 810 bp, Homo sapiens
  misc_feature (1)..(1): n is a, c, g, or t
  misc_feature (5)..(6): n is a, c, g, or t
ntttnnttttctacatataaaagtaaaataacactctaaaataacataaaaagtataggcatgagccactgcgcacagcccatttatattaaagtgaagttgattatagtttcatatgtcttaaggaccattaaaaaattttttttggtgaattatttattcatattttgcttatttctcaacaggatatttgtttttttccttcaattttttaaagttcttcaagtattagggataatgtcattatctgtgaagtgttttgcatatatttgctcagcttgttttttgactttgcttgttttttgtttttattcttttttgccacacaagcctttttaaaaaaacatggtccactgtgggaggccgaggcaggcggatcacaagatcaggagtttgagaccagcctggccagtatggtgaaaccctgtctctactaaaaatgtataaaaatttagccgggtgtgatggcgcacgtgtagttgcagctactctggaggctgaggcaggagagtcacttgaacctgggaggcggaggttgcaatgagccaagatcgtgccactgcactccagcctgggcaatggagtaataagaccctgtctaaaaaaaaacagacacacacacacaaaagtagtcatatctatcaatctttttaaaagttgcatctggatttcaagtggtagtttaaaagcctttccatatatcaaggttatagaaaagttcatgcgtgtttcttctagtacttgaatggttttgtgttttacatttatatatctaatccattttgagcttattttcatgtatgctgtgag

SEQ ID NO: 47362 - DNA, 317 bp, Homo sapiens
ccctctgccaggctctgggggaagtttggtcttggactctcgtcgtggagccgcttaaacctgtgggtctgaaggccgcgaggccgggtccctggagttggcctcccaggccgttccactccctcccccaacccccgcgcggggcctccggattggaggtgtttcacccacgtgctggtgggcccgtctccctgggccgctgggtgccctgagctgtgttctctgctgcgcgttccttcctgtgtgtggcgggggtgctgacccgggggtgcccaaggcagcccggactcccatcccgtggagctgcctccgggagc

SEQ ID NO: 47363 - DNA, 777 bp, Homo sapiens
aggtttcaccatgttggccaggctggtctcaaactcctgacctcaggtggtccacctgccttggcctgctgggattacaggcgtgagccaccgcatgcagccttatcctgcttttttaatatgaattgtacctcgggtaaccaaatagatagtggaaagcatctatttttagaaggactctggcttataaatgaaaaaggaacgatagactatcagcactttccagcccctaaataaaatgatggagatagtgatcatcggtggctgctaaaacaattagattgaaatgctgatgggaaactttataataagtggatcagatagaccacatctatcccactgatatatcttagcatctcaaaaaagagatcatagatgttttgtgtgttctgatgtggtgtggtaggaagtatcaccataagccctatgaagttttcttgcctaaaataaaatctgaatcctgagcaagcctctagatttcgattctaattttcaggaaatgcaagggacagaggaccatacgattagcaaaatacagaatgtgtgtaactacaatacagtttactagttttttctctaagtaaattggaagaaaaagtgagagaaacccatagattaaaagatacttcaagacatgtgttagccaaatgcagtatatgtgggtctattgatttgaacaaaccaactgtttaaaaaaagtggtttttccctgtaaatttgggacattgactaaataatttgatattaaggaattatagtcattttctgaggtgtaaa

SEQ ID NO: 47364 - DNA, 616 bp, Homo sapiens
ggatataggttaaaatcttctcggtcaccaggcgatgaaggtgatactggacttgatcaaatttagtcatggagagaacaagggatataccattggatatatttaacacatgtttaaaaagttttaaacatttatctatgcaacaatattaagtaacacctacttttgcttgtaaatatttatattctccaattttaaaataataaaagaaacaaaaagagcctggcacttaggatcatagtgatgagttgctcatctatttcctgtctgatcactaaatacctgccagtgactcctctctccactctattttctgaatgactcgacactgccttttaacttaactgcatctggtccacagtgttcttaagtcactcattatacgtcagtgtttctcacatgagctgcaggctggaatcatttggggagctttcaaaagttctaatgtctagatcagacctcgagcaggattctggtttaattgatttggggcatggcctgggcatcaggattcttaggcacttctccaggcaattctaatgtgcagctgaggttgaggacctcgagaagcaactgctactctgaaatgcatcctctattggatcatctggccccg

SEQ ID NO: 47365 - DNA, 313 bp, Homo sapiens
cccaaagtcctgggattacatgtgtgagccacagcgcccagcctctaggactttcataaatagagagaagtcagtgcctagtttcaaaggacagcctgactctcttgttaggggccagtgcagctggtgactttaagttgaagccagtgctcatttaccattctggaaatcctagggcccttagggattatgccaaatctactctgtgctctttaaatggatcaccaaaggctggatgatagcacatctgtttacagcatggcttactgaatattttaagcccactattgagtcctacttctcagaaaaaaaa

SEQ ID NO: 47366 - DNA, 771 bp, Homo sapiens
ccgaccggagcggcgccccgggggcggccgccaccgaccgcagccgcacgccccgcgcgccgggcccgcccgcccacggggcccgccacgccggggggcctccgctcccggcggggaacatgtgggcgcagacctggtccaacatctatgacttggtggtgcccttcccttcagccccctcgatggacaccacagaggctatgctaaagcagggctggacgcccaggaggatgtttaaggaggctgatgatttcttcacctccctggggctgctgcccgtgcctcctgagttctggaacaagtcgatgctggagaagccaaccgacgggcgggaggtggtctgccacgcctcggcctgggacttctacaacggcaaggacttccggatcaagcagtgcaccaccgtgaacttggaggacctggtggtggcccaccacgaaatgggccacatccagtatttcatgcagtacaaagacttacctgtggccttgagggagggtgccaaccccggcttccatgaggccattggggacgtgctagccctctcagtgtctacgcccaagcacctgcacagtctcaacctgctgagcagtgagggtggcagcgacgagcatgacatcaactttctgatgaagatggcccttgacaagatcgcctttatccccttcagctacctcgtcgatcagtggcgctggagggtatttgatggaagcatcaccaaggagaactataaccaggagtggtggagcctcaggttctggaacactccca

SEQ ID NO: 47367 - DNA, 4959 bp, Homo sapiens
gccgagcaccgcgcaccgcgtcatgggggccgcctcgggccgccgggggccggggctgctgctgccgctgccgctgctgttgctgctgccgccgcagcccgccctggcgttggaccccgggctgcagcccggcaacttttctgctgacgaggccggggcgcagctcttcgcgcagagctacaactccagcgccgaacaggtgctgttccagagcgtggccgccagctgggcgcacgacaccaacatcaccgcggagaatgcaaggcgccaggaggaagcagccctgctcagccaggagtttgcggaggcctggggccagaaggccaaggagctgtatgaaccgatctggcagaacttcacggacccgcagctgcgcaggatcatcggagctgtgcgcaccctgggctctgccaacctgcccctggctaagcggcagcagtacaacgccctgctaagcaacatgagcaggatctactccaccgccaaggtctgcctccccaacaagactgccacctgctggtccctggacccagatctcaccaacatcctggcttcctcgcgaagctacgccatgctcctgtttgcctgggagggctggcacaacgctgcgggcatcccgctgaaaccgctgtacgaggatttcactgccctcagcaatgaagcctacaagcaggacggcttcacagacacgggggcctactggcgctcctggtacaactcccccaccttcgaggacgatctggaacacctctaccaacagctagagcccctctacctgaacctccatgccttcgtccgccgcgcactgcatcgccgatacggagacagatacatcaacctcaggggacccatccctgctcatctgctgggagacatgtgggcccagagctgggaaaacatctacgacatggtggtgcctttcccagacaagcccaacctcgatgtcaccagtactatgctgcagcagggctggaacgccacgcacatgttccgggtggcagaggagttcttcacctccctggagctctcccccatgcctcccgagttctgggaagggtcgatgctggagaagccggccgacgggcgggaagtggtgtgccacgcctcggcttgggacttctacaacaggaaagacttcaggatcaagcagtgcacacgggtcacgatggaccagctctccacagtgcaccatgagatgggccatatacagtactacctgcagtacaaggatctgcccgtctccctgcgtcggggggccaaccccggcttccatgaggccattggggacgtgctggcgctctcggtctccactcctgaacatctgcacaaaatcggcctgctggaccgtgtcaccaatgacacggaaagtgacatcaattacttgctaaaaatggcactggaaaaaattgccttcctgccctttggctacttggtggaccagtggcgctggggggtctttagtgggcgtacccccccttcccgctacaacttcgactggtggtatcttcgaaccaagtatcaggggatctgtcctcctgttacccgaaacgaaacccactttgatgctggagctaagtttcatgttccaaatgtgacaccatacatcaggtactttgtgagttttgtcctgcagttccagttccatgaagccctgtgcaaggaggcaggctatgagggcccactgcaccagtgtgacatctaccggtccaccaaggcaggggccaagctccggaaggtgctgcaggctggctcctccaggccctggcaggaggtgctgaaggacatggtcggcttagatgccctggatgcccagccgctgctcaagtacttccagccagtcacccagtggctgcaggagcagaaccagcagaacggcgaggtcctgggctggcccgagtaccagtggcacccgccgttgcctgacaactacccggagggcatagacctggtgactgatgaggctgaggccagcaagtttgtggaggaatatgaccggacatcccaggtggtgtggaacgagtatgccgaggccaactggaactacaacaccaacatcaccacagagaccagcaagattctgctgcagaagaacatgcaaatagccaaccacaccctgaagtacggcacccaggccaggaagtttgatgtgaaccagttgcagaacaccactatcaagcggatcataaagaaggttcaggacctagaacgggcagcgctgcctgcccaggagctggaggagtacaacaagatcctgttggatatggaaaccacctacagcgtggccactgtgtgccacccgaatggcagctgcctgcagctcgagccagatctgacgaatgtgatggccacatcccggaaatatgaagacctgttatgggcatgggagggctggcgagacaaggcggggagagccatcctccagttttacccgaaatacgtggaactcatcaaccaggctgcccggctcaatggctatgtagatgcaggggactcgtggaggtctatgtacgagacaccatccctggagcaagacctggagcggctcttccaggagctgcagccactctacctcaacctgcatgcctacgtgcgccgggccctgcaccgtcactacggggcccagcacatcaacctggaggggcccattcctgctcacctgctggggaacatgtgggcgcagacctggtccaacatctatgacttggtggtgcccttcccttcagccccctcgatggacaccacagaggctatgctaaagcagggctggacgcccaggaggatgtttaaggaggctgatgatttcttcacctccctggggctgctgcccgtgcctcctgagttctggaacaagtcgatgctggagaagccaaccgacgggcgggaggtggtctgccacgcctcggcctgggacttctacaacggcaaggacttccggatcaagcagtgcaccaccgtgaacttggaggacctggtggtggcccaccacgaaatgggccacatccagtatttcatgcagtacaaagacttacctgtggccttgagggagggtgccaaccccggcttccatgaggccattggggacgtgctagccctctcagtgtctacgcccaagcacctgcacagtctcaacctgctgagcagtgagggtggcagcgacgagcatgacatcaactttctgatgaagatggcccttgacaagatcgcctttatccccttcagctacctcgtcgatcagtggcgctggagggtatttgatggaagcatcaccaaggagaactataaccaggagtggtggagcctcaggctgaagtaccagggcctctgccccccagtgcccaggactcaaggtgactttgacccaggggccaagttccacattccttctagcgtgccttacatcaggtacttcgtcagcttcatcatccagttccagttccacgaggcactgtgccaggcagctggccacacgggccccctgcacaagtgtgacatctaccagtccaaggaggccgggcagcgcctggcgaccgccatgaagctgggcttcagtaggccgtggccggaagccatgcagctgatcacgggccagcccaacatgagcgcctcggccatgttgagctacttcaagccgctgctggactggctccgcacggagaacgagctgcatggggagaagctgggctggccgcagtacaactggacgccgaactccgctcgctcagaagggcccctcccagacagcggccgcgtcagcttcctgggcctggacctggatgcgcagcaggcccgcgtgggccagtggctgctgctcttcctgggcatcgccctgctggtagccaccctgggcctcagccagcggctcttcagcatccgccaccgcagcctccaccggcactcccacgggccccagttcggctccgaggtggagctgagacactcctgaggtgacccggctgggtcggccctgcccaagggcctcccaccagagactgggatgggaacactggtgggcagctgaggacacaccccacaccccagcccaccctgctcctcctgccctgtccctgtccccctcccctcccagtcctccagaccaccagccgccccagccccttctcccagcacacggctgcctgacactgagccccacctctccaagtctctctgtgaatacaattaaaggtcctgccctccccatctgagtctgtgtccctcacagggaagccagggacagggacaggctgctttcctgcctcctggcagtcaagtgggtcccgttactaggtttgttcctccatcctccttcaggagccggggaggatccccagagctctgccccagcacctcctggcgctggcgcctgtcttccctccagcccaggcagcccgccactgtcctgccaccgcaggcagcccctgtctggcccaagcactgacccacgcggactctgggaagcagacatcctgggctgctggcctcacatttccactggcagtggagcctttccctgctccacaaatggccaggtccccccaggggaaggcttccggctgttatcggctgcctcagggggcgagtaccttggagggcctgcttcaaggagggtgccccctggagggcacacaccagcctagtgcttaccttggctcctgcctgtaccagctccatgactctctgctcgggtgaacagccttggctctcagacagccattctaacactgccagtgcagaggggcctcagacgctggagtgtagcagtggctgcacctgcacagggattagctgccagcagccaccctgctggcgtcccagcacacacctcctcactccctgcattggagggagtgtcattttgagggacatttttatgacttttatgtgtatgtttatgtagaaatttggaaaatacagaaaactgtaaagaaaataaaagccctttatatcaacgtcaagagataa

SEQ ID NO: 47368 - DNA, 3264 bp, Homo sapiens
ttcggattggccagggacggtagctgcaggactctgctctcctgcggccatgggccagggttgggctactgcaggacttcccagcctcctcttcctgctgctctgctacgggcaccctctgctggtccctagccaggaggcatcccaacaggtgacagtcacccatgggacaagcagccaggcaacaaccagcagccagacaaccacccaccaggcgacggcccaccagacatcagcccagagcccaaacctggtgactgatgaggctgaggccagcaagtttgtggaggaatatgaccggacatcccaggtggtgtggaacgagtatgccgaggccaactggaactacaacaccaacatcaccacagagaccagcaagattctgctgcagaagaacatgcaaatagccaaccacaccctgaagtacggcacccaggccaggaagtttgatgtgaaccagttgcagaacaccactatcaagcggatcataaagaaggttcaggacctagaacgggcagcgctgcctgcccaggagctggaggagtacaacaagatcctgttggatatggaaaccacctacagcgtggccactgtgtgccacccgaatggcagctgcctgcagctcgagccagatctgacgaatgtgatggccacatcccggaaatatgaagacctgttatgggcatgggagggctggcgagacaaggcggggagagccatcctccagttttacccgaaatacgtggaactcatcaaccaggctgcccggctcaatggctatgtagatgcaggggactcgtggaggtctatgtacgagacaccatccctggagcaagacctggagcggctcttccaggagctgcagccactctacctcaacctgcatgcctacgtgcgccgggccctgcaccgtcactacggggcccagcacatcaacctggaggggcccattcctgctcacctgctggggaacatgtgggcgcagacctggtccaacatctatgacttggtggtgcccttcccttcagccccctcgatggacaccacagaggctatgctaaagcagggctggacgcccaggaggatgtttaaggaggctgatgatttcttcacctccctggggctgctgcccgtgcctcctgagttctggaacaagtcgatgctggagaagccaaccgacgggcgggaggtggtctgccacgcctcggcctgggacttctacaacggcaaggacttccggatcaagcagtgcaccaccgtgaacttggaggacctggtggtggcccaccacgaaatgggccacatccagtatttcatgcagtacaaagacttacctgtggccttgagggagggtgccaaccccggcttccatgaggccattggggacgtgctagccctctcagtgtctacgcccaagcacctgcacagtctcaacctgctgagcagtgagggtggcagcgacgagcatgacatcaactttctgatgaagatggcccttgacaagatcgcctttatccccttcagctacctcgtcgatcagtggcgctggagggtatttgatggaagcatcaccaaggagaactataaccaggagtggtggagcctcaggctgaagtaccagggcctctgccccccagtgcccaggactcaaggtgactttgacccaggggccaagttccacattccttctagcgtgccttacatcaggtacttcgtcagcttcatcatccagttccagttccacgaggcactgtgccaggcagctggccacacgggccccctgcacaagtgtgacatctaccagtccaaggaggccgggcagcgcctggcgaccgccatgaagctgggcttcagtaggccgtggccggaagccatgcagctgatcacgggccagcccaacatgagcgcctcggccatgttgagctacttcaagccgctgctggactggctccgcacggagaacgagctgcatggggagaagctgggctggccgcagtacaactggacgccgaactccgctcgctcagaagggcccctcccagacagcggccgcgtcagcttcctgggcctggacctggatgcgcagcaggcccgcgtgggccagtggctgctgctcttcctgggcatcgccctgctggtagccaccctgggcctcagccagcggctcttcagcatccgccaccgcagcctccaccggcactcccacgggccccagttcggctccgaggtggagctgagacactcctgaggtgacccggctgggtcggccctgcccaagggcctcccaccagagactgggatgggaacactggtgggcagctgaggacacaccccacaccccagcccaccctgctcctcctgccctgtccctgtccccctcccctcccagtcctccagaccaccagccgccccagccccttctcccagcacacggctgcctgacactgagccccacctctccaagtctctctgtgaatacaattaaaggtcctgccctccccatctgagtctgtgtccctcacagggaagccagggacagggacaggctgctttcctgcctcctggcagtcaagtgggtcccgttactaggtttgttcctccatcctccttcaggagccggggaggatccccagagctctgccccagcacctcctggcgctggcgcctgtcttccctccagcccaggcagcccgccactgtcctgccaccgcaggcagcccctgtctggcccaagcactgacccacgcggactctgggaagcagacatcctgggctgctggcctcacatttccactggcagtggagcctttccctgctccacaaatggccaggtccccccaggggaaggcttccggctgttatcggctgcctcagggggcgagtaccttggagggcctgcttcaaggagggtgccccctggagggcacacaccagcctagtgcttaccttggctcctgcctgtaccagctccatgactctctgctcgggtgaacagccttggctctcagacagccattctaacactgccagtgcagaggggcctcagacgctggagtgtagcagtggctgcacctgcacagggattagctgccagcagccaccctgctggcgtcccagcacacacctcctcactccctgcattggagggagtgtcattttgagggacatttttatgacttttatgtgtatgtttatgtagaaatttggaaaatacagaaaactgtaaagaaaataaaagccctttatatcaacgtcaagagataa

SEQ ID NO: 47369 - DNA, 3254 bp, Homo sapiens
ggaaaataaaatcagaagtacgctgaacgagatctactttggaaaaacaaaggatatcgtcaatgggctgaggtctgtgcagacttttgcagacaaatcaaaacaagaagctctgaagaatgacctggtggaggctttgaagagaaagcagcaatgctaaacctctgtttcatgctaaccagacacgccgtgcactcgttagattcctttcttagaaaactcgttttctgctcccttccctcgtcccttccctccccgacaggtcacataacagctgcatcattgaccgcacagcgccatctctccctgagaataaagccgatagccaactggaactacaacaccaacatcaccacagagaccagcaagattctgctgcagaagaacatgcaaatagccaaccacaccctgaagtacggcacccaggccaggaagtttgatgtgaaccagttgcagaacaccactatcaagcggatcataaagaaggttcaggacctagaacgggcagcgctgcctgcccaggagctggaggagtacaacaagatcctgttggatatggaaaccacctacagcgtggccactgtgtgccacccgaatggcagctgcctgcagctcgagccagatctgacgaatgtgatggccacatcccggaaatatgaagacctgttatgggcatgggagggctggcgagacaaggcggggagagccatcctccagttttacccgaaatacgtggaactcatcaaccaggctgcccggctcaatggctatgtagatgcaggggactcgtggaggtctatgtacgagacaccatccctggagcaagacctggagcggctcttccaggagctgcagccactctacctcaacctgcatgcctacgtgcgccgggccctgcaccgtcactacggggcccagcacatcaacctggaggggcccattcctgctcacctgctggggaacatgtgggcgcagacctggtccaacatctatgacttggtggtgcccttcccttcagccccctcgatggacaccacagaggctatgctaaagcagggctggacgcccaggaggatgtttaaggaggctgatgatttcttcacctccctggggctgctgcccgtgcctcctgagttctggaacaagtcgatgctggagaagccaaccgacgggcgggaggtggtctgccacgcctcggcctgggacttctacaacggcaaggacttccggatcaagcagtgcaccaccgtgaacttggaggacctggtggtggcccaccacgaaatgggccacatccagtatttcatgcagtacaaagacttacctgtggccttgagggagggtgccaaccccggcttccatgaggccattggggacgtgctagccctctcagtgtctacgcccaagcacctgcacagtctcaacctgctgagcagtgagggtggcagcgacgagcatgacatcaactttctgatgaagatggcccttgacaagatcgcctttatccccttcagctacctcgtcgatcagtggcgctggagggtatttgatggaagcatcaccaaggagaactataaccaggagtggtggagcctcaggctgaagtaccagggcctctgccccccagtgcccaggactcaaggtgactttgacccaggggccaagttccacattccttctagcgtgccttacatcaggtacttcgtcagcttcatcatccagttccagttccacgaggcactgtgccaggcagctggccacacgggccccctgcacaagtgtgacatctaccagtccaaggaggccgggcagcgcctggcgaccgccatgaagctgggcttcagtaggccgtggccggaagccatgcagctgatcacgggccagcccaacatgagcgcctcggccatgttgagctacttcaagccgctgctggactggctccgcacggagaacgagctgcatggggagaagctgggctggccgcagtacaactggacgccgaactccgctcgctcagaagggcccctcccagacagcggccgcgtcagcttcctgggcctggacctggatgcgcagcaggcccgcgtgggccagtggctgctgctcttcctgggcatcgccctgctggtagccaccctgggcctcagccagcggctcttcagcatccgccaccgcagcctccaccggcactcccacgggccccagttcggctccgaggtggagctgagacactcctgaggtgacccggctgggtcggccctgcccaagggcctcccaccagagactgggatgggaacactggtgggcagctgaggacacaccccacaccccagcccaccctgctcctcctgccctgtccctgtccccctcccctcccagtcctccagaccaccagccgccccagccccttctcccagcacacggctgcctgacactgagccccacctctccaagtctctctgtgaatacaattaaaggtcctgccctccccatctgagtctgtgtccctcacagggaagccagggacagggacaggctgctttcctgcctcctggcagtcaagtgggtcccgttactaggtttgttcctccatcctccttcaggagccggggaggatccccagagctctgccccagcacctcctggcgctggcgcctgtcttccctccagcccaggcagcccgccactgtcctgccaccgcaggcagcccctgtctggcccaagcactgacccacgcggactctgggaagcagacatcctgggctgctggcctcacatttccactggcagtggagcctttccctgctccacaaatggccaggtccccccaggggaaggcttccggctgttatcggctgcctcagggggcgagtaccttggagggcctgcttcaaggagggtgccccctggagggcacacaccagcctagtgcttaccttggctcctgcctgtaccagctccatgactctctgctcgggtgaacagccttggctctcagacagccattctaacactgccagtgcagaggggcctcagacgctggagtgtagcagtggctgcacctgcacagggattagctgccagcagccaccctgctggcgtcccagcacacacctcctcactccctgcattggagggagtgtcattttgagggacatttttatgacttttatgtgtatgtttatgtagaaatttggaaaatacagaaaactgtaaagaaaataaaagccctttatatcaacgtcaagagataa

SEQ ID NO: 47370 - DNA, 3342 bp, Homo sapiens
ttcggattggccagggacggtagctgcaggactctgctctcctgcggccatgggccagggttgggctactgcaggacttcccagcctcctcttcctgctgctctgctacgggcaccctctgctggtccctagccaggaggcatcccaacaggtgacagtcacccatgggacaagcagccaggcaacaaccagcagccagacaaccacccaccaggcgacggcccaccagacatcagcccagagcccaaacctggtgactgatgaggctgaggccagcaagtttgtggaggaatatgaccggacatcccaggtggtgtggaacgagtatgccgaggccaactggaactacaacaccaacatcaccacagagaccagcaagattctgctgcagaagaacatgcaaatagccaaccacaccctgaagtacggcacccaggccaggaagtttgatgtgaaccagttgcagaacaccactatcaagcggatcataaagaaggttcaggacctagaacgggcagcgctgcctgcccaggagctggaggagtacaacaagatcctgttggatatggaaaccacctacagcgtggccactgtgtgccacccgaatggcagctgcctgcagctcgagccagctctgaaattctctgagctccccttacaagcagaggtgagctaagggctggagctcaagccattcaaacccctaccagatctgacgaatgtgatggccacatcccggaaatatgaagacctgttatgggcatgggagggctggcgagacaaggcggggagagccatcctccagttttacccgaaatacgtggaactcatcaaccaggctgcccggctcaatggctatgtagatgcaggggactcgtggaggtctatgtacgagacaccatccctggagcaagacctggagcggctcttccaggagctgcagccactctacctcaacctgcatgcctacgtgcgccgggccctgcaccgtcactacggggcccagcacatcaacctggaggggcccattcctgctcacctgctggggaacatgtgggcgcagacctggtccaacatctatgacttggtggtgcccttcccttcagccccctcgatggacaccacagaggctatgctaaagcagggctggacgcccaggaggatgtttaaggaggctgatgatttcttcacctccctggggctgctgcccgtgcctcctgagttctggaacaagtcgatgctggagaagccaaccgacgggcgggaggtggtctgccacgcctcggcctgggacttctacaacggcaaggacttccggatcaagcagtgcaccaccgtgaacttggaggacctggtggtggcccaccacgaaatgggccacatccagtatttcatgcagtacaaagacttacctgtggccttgagggagggtgccaaccccggcttccatgaggccattggggacgtgctagccctctcagtgtctacgcccaagcacctgcacagtctcaacctgctgagcagtgagggtggcagcgacgagcatgacatcaactttctgatgaagatggcccttgacaagatcgcctttatccccttcagctacctcgtcgatcagtggcgctggagggtatttgatggaagcatcaccaaggagaactataaccaggagtggtggagcctcaggctgaagtaccagggcctctgccccccagtgcccaggactcaaggtgactttgacccaggggccaagttccacattccttctagcgtgccttacatcaggtacttcgtcagcttcatcatccagttccagttccacgaggcactgtgccaggcagctggccacacgggccccctgcacaagtgtgacatctaccagtccaaggaggccgggcagcgcctggcgaccgccatgaagctgggcttcagtaggccgtggccggaagccatgcagctgatcacgggccagcccaacatgagcgcctcggccatgttgagctacttcaagccgctgctggactggctccgcacggagaacgagctgcatggggagaagctgggctggccgcagtacaactggacgccgaactccgctcgctcagaagggcccctcccagacagcggccgcgtcagcttcctgggcctggacctggatgcgcagcaggcccgcgtgggccagtggctgctgctcttcctgggcatcgccctgctggtagccaccctgggcctcagccagcggctcttcagcatccgccaccgcagcctccaccggcactcccacgggccccagttcggctccgaggtggagctgagacactcctgaggtgacccggctgggtcggccctgcccaagggcctcccaccagagactgggatgggaacactggtgggcagctgaggacacaccccacaccccagcccaccctgctcctcctgccctgtccctgtccccctcccctcccagtcctccagaccaccagccgccccagccccttctcccagcacacggctgcctgacactgagccccacctctccaagtctctctgtgaatacaattaaaggtcctgccctccccatctgagtctgtgtccctcacagggaagccagggacagggacaggctgctttcctgcctcctggcagtcaagtgggtcccgttactaggtttgttcctccatcctccttcaggagccggggaggatccccagagctctgccccagcacctcctggcgctggcgcctgtcttccctccagcccaggcagcccgccactgtcctgccaccgcaggcagcccctgtctggcccaagcactgacccacgcggactctgggaagcagacatcctgggctgctggcctcacatttccactggcagtggagcctttccctgctccacaaatggccaggtccccccaggggaaggcttccggctgttatcggctgcctcagggggcgagtaccttggagggcctgcttcaaggagggtgccccctggagggcacacaccagcctagtgcttaccttggctcctgcctgtaccagctccatgactctctgctcgggtgaacagccttggctctcagacagccattctaacactgccagtgcagaggggcctcagacgctggagtgtagcagtggctgcacctgcacagggattagctgccagcagccaccctgctggcgtcccagcacacacctcctcactccctgcattggagggagtgtcattttgagggacatttttatgacttttatgtgtatgtttatgtagaaatttggaaaatacagaaaactgtaaagaaaataaaagccctttatatcaacgtcaagagataa

SEQ ID NO: 47371 - DNA, 3344 bp, Homo sapiens
ttcggattggccagggacggtagctgcaggactctgctctcctgcggccatgggccagggttgggctactgcaggacttcccagcctcctcttcctgctgctctgctacgggcaccctctgctggtccctagccaggaggcatcccaacaggtgacagtcacccatgggacaagcagccaggcaacaaccagcagccagacaaccacccaccaggcgacggcccaccagacatcagcccagagcccaaacctggtgactgatgaggctgaggccagcaagtttgtggaggaatatgaccggacatcccaggtggtgtggaacgagtatgccgaggccaactggaactacaacaccaacatcaccacagagaccagcaagattctgggcctttacgacacttgggggtcttctcttctctgcccctgcctggatatgtgttgcttgaccgcaggcatccagggaggctgcagaagaacatgcaaatagccaaccacaccctgaagtacggcacccaggccaggaagtttgatgtgaaccagttgcagaacaccactatcaagcggatcataaagaaggttcaggacctagaacgggcagcgctgcctgcccaggagctggaggagtacaacaagatcctgttggatatggaaaccacctacagcgtggccactgtgtgccacccgaatggcagctgcctgcagctcgagccagatctgacgaatgtgatggccacatcccggaaatatgaagacctgttatgggcatgggagggctggcgagacaaggcggggagagccatcctccagttttacccgaaatacgtggaactcatcaaccaggctgcccggctcaatggctatgtagatgcaggggactcgtggaggtctatgtacgagacaccatccctggagcaagacctggagcggctcttccaggagctgcagccactctacctcaacctgcatgcctacgtgcgccgggccctgcaccgtcactacggggcccagcacatcaacctggaggggcccattcctgctcacctgctggggaacatgtgggcgcagacctggtccaacatctatgacttggtggtgcccttcccttcagccccctcgatggacaccacagaggctatgctaaagcagggctggacgcccaggaggatgtttaaggaggctgatgatttcttcacctccctggggctgctgcccgtgcctcctgagttctggaacaagtcgatgctggagaagccaaccgacgggcgggaggtggtctgccacgcctcggcctgggacttctacaacggcaaggacttccggatcaagcagtgcaccaccgtgaacttggaggacctggtggtggcccaccacgaaatgggccacatccagtatttcatgcagtacaaagacttacctgtggccttgagggagggtgccaaccccggcttccatgaggccattggggacgtgctagccctctcagtgtctacgcccaagcacctgcacagtctcaacctgctgagcagtgagggtggcagcgacgagcatgacatcaactttctgatgaagatggcccttgacaagatcgcctttatccccttcagctacctcgtcgatcagtggcgctggagggtatttgatggaagcatcaccaaggagaactataaccaggagtggtggagcctcaggctgaagtaccagggcctctgccccccagtgcccaggactcaaggtgactttgacccaggggccaagttccacattccttctagcgtgccttacatcaggtacttcgtcagcttcatcatccagttccagttccacgaggcactgtgccaggcagctggccacacgggccccctgcacaagtgtgacatctaccagtccaaggaggccgggcagcgcctggcgaccgccatgaagctgggcttcagtaggccgtggccggaagccatgcagctgatcacgggccagcccaacatgagcgcctcggccatgttgagctacttcaagccgctgctggactggctccgcacggagaacgagctgcatggggagaagctgggctggccgcagtacaactggacgccgaactccgctcgctcagaagggcccctcccagacagcggccgcgtcagcttcctgggcctggacctggatgcgcagcaggcccgcgtgggccagtggctgctgctcttcctgggcatcgccctgctggtagccaccctgggcctcagccagcggctcttcagcatccgccaccgcagcctccaccggcactcccacgggccccagttcggctccgaggtggagctgagacactcctgaggtgacccggctgggtcggccctgcccaagggcctcccaccagagactgggatgggaacactggtgggcagctgaggacacaccccacaccccagcccaccctgctcctcctgccctgtccctgtccccctcccctcccagtcctccagaccaccagccgccccagccccttctcccagcacacggctgcctgacactgagccccacctctccaagtctctctgtgaatacaattaaaggtcctgccctccccatctgagtctgtgtccctcacagggaagccagggacagggacaggctgctttcctgcctcctggcagtcaagtgggtcccgttactaggtttgttcctccatcctccttcaggagccggggaggatccccagagctctgccccagcacctcctggcgctggcgcctgtcttccctccagcccaggcagcccgccactgtcctgccaccgcaggcagcccctgtctggcccaagcactgacccacgcggactctgggaagcagacatcctgggctgctggcctcacatttccactggcagtggagcctttccctgctccacaaatggccaggtccccccaggggaaggcttccggctgttatcggctgcctcagggggcgagtaccttggagggcctgcttcaaggagggtgccccctggagggcacacaccagcctagtgcttaccttggctcctgcctgtaccagctccatgactctctgctcgggtgaacagccttggctctcagacagccattctaacactgccagtgcagaggggcctcagacgctggagtgtagcagtggctgcacctgcacagggattagctgccagcagccaccctgctggcgtcccagcacacacctcctcactccctgcattggagggagtgtcattttgagggacatttttatgacttttatgtgtatgtttatgtagaaatttggaaaatacagaaaactgtaaagaaaataaaagccctttatatcaacgtcaagagataa

SEQ ID NO: 47372 - DNA, 3040 bp, Homo sapiens
ttcggattggccagggacggtagctgcaggactctgctctcctgcggccatgggccagggttgggctactgcaggacttcccagcctcctcttcctgctgctctgctacgggcaccctctgctggtccctagccaggaggcatcccaacaggtgacagtcacccatgggacaagcagccaggcaacaaccagcagccagacaaccacccaccaggcgacggcccaccagacatcagcccagagcccaaacctggtgactgatgaggctgaggccagcaagtttgtggaggaatatgaccggacatcccaggtggtgtggaacgagtatgccgaggccaactggaactacaacaccaacatcaccacagagaccagcaagattctgctgcagaagaacatgcaaatagccaaccacaccctgaagtacggcacccaggccaggaagtttgatgtgaaccagttgcagaacaccactatcaagcggatcataaagaaggttcaggacctagaacgggcagcgctgcctgcccaggagctggaggagtacaacaagatcctgttggatatggaaaccacctacagcgtggccactgtgtgccacccgaatggcagctgcctgcagctcgagccagatctgacgaatgtgatggccacatcccggaaatatgaagacctgttatgggcatgggagggctggcgagacaaggcggggagagccatcctccagttttacccgaaatacgtggaactcatcaaccaggctgcccggctcaatggctatgtagatgcaggggactcgtggaggtctatgtacgagacaccatccctggagcaagacctggagcggctcttccaggagctgcagccactctacctcaacctgcatgcctacgtgcgccgggccctgcaccgtcactacggggcccagcacatcaacctggaggggcccattcctgctcacctgctggggaacatgtgggcgcagacctggtccaacatctatgacttggtggtgcccttcccttcagccccctcgatggacaccacagaggctatgctaaagcagggctggacgcccaggaggatgtttaaggaggctgatgatttcttcacctccctggggctgctgcccgtgcctcctgagttctggaacaagtcgatgctggagaagccaaccgacgggcgggaggtggtctgccacgcctcggcctgggacttctacaacggcaaggacttccgagcatgacatcaactttctgatgaagatggcccttgacaagatcgcctttatccccttcagctacctcgtcgatcagtggcgctggagggtatttgatggaagcatcaccaaggagaactataaccaggagtggtggagcctcaggctgaagtaccagggcctctgccccccagtgcccaggactcaaggtgactttgacccaggggccaagttccacattccttctagcgtgccttacatcaggtacttcgtcagcttcatcatccagttccagttccacgaggcactgtgccaggcagctggccacacgggccccctgcacaagtgtgacatctaccagtccaaggaggccgggcagcgcctggcgaccgccatgaagctgggcttcagtaggccgtggccggaagccatgcagctgatcacgggccagcccaacatgagcgcctcggccatgttgagctacttcaagccgctgctggactggctccgcacggagaacgagctgcatggggagaagctgggctggccgcagtacaactggacgccgaactccgctcgctcagaagggcccctcccagacagcggccgcgtcagcttcctgggcctggacctggatgcgcagcaggcccgcgtgggccagtggctgctgctcttcctgggcatcgccctgctggtagccaccctgggcctcagccagcggctcttcagcatccgccaccgcagcctccaccggcactcccacgggccccagttcggctccgaggtggagctgagacactcctgaggtgacccggctgggtcggccctgcccaagggcctcccaccagagactgggatgggaacactggtgggcagctgaggacacaccccacaccccagcccaccctgctcctcctgccctgtccctgtccccctcccctcccagtcctccagaccaccagccgccccagccccttctcccagcacacggctgcctgacactgagccccacctctccaagtctctctgtgaatacaattaaaggtcctgccctccccatctgagtctgtgtccctcacagggaagccagggacagggacaggctgctttcctgcctcctggcagtcaagtgggtcccgttactaggtttgttcctccatcctccttcaggagccggggaggatccccagagctctgccccagcacctcctggcgctggcgcctgtcttccctccagcccaggcagcccgccactgtcctgccaccgcaggcagcccctgtctggcccaagcactgacccacgcggactctgggaagcagacatcctgggctgctggcctcacatttccactggcagtggagcctttccctgctccacaaatggccaggtccccccaggggaaggcttccggctgttatcggctgcctcagggggcgagtaccttggagggcctgcttcaaggagggtgccccctggagggcacacaccagcctagtgcttaccttggctcctgcctgtaccagctccatgactctctgctcgggtgaacagccttggctctcagacagccattctaacactgccagtgcagaggggcctcagacgctggagtgtagcagtggctgcacctgcacagggattagctgccagcagccaccctgctggcgtcccagcacacacctcctcactccctgcattggagggagtgtcattttgagggacatttttatgacttttatgtgtatgtttatgtagaaatttggaaaatacagaaaactgtaaagaaaataaaagccctttatatcaacgtcaagagataa

SEQ ID NO: 47373 - DNA, 2922 bp, Homo sapiens
gaaccttctttatgatccttgatagtggtgtctgcaactgattctgcagaagaacatgcaaatagccaaccacaccctgaagtacggcacccaggccaggaagtttgatgtgaaccagttgcagaacaccactatcaagcggatcataaagaaggttcaggacctagaacgggcagcgctgcctgcccaggagctggaggagtacaacaagatcctgttggatatggaaaccacctacagcgtggccactgtgtgccacccgaatggcagctgcctgcagctcgagccagatctgacgaatgtgatggccacatcccggaaatatgaagacctgttatgggcatgggagggctggcgagacaaggcggggagagccatcctccagttttacccgaaatacgtggaactcatcaaccaggctgcccggctcaatggctatgtagatgcaggggactcgtggaggtctatgtacgagacaccatccctggagcaagacctggagcggctcttccaggagctgcagccactctacctcaacctgcatgcctacgtgcgccgggccctgcaccgtcactacggggcccagcacatcaacctggaggggcccattcctgctcacctgctggggaacatgtgggcgcagacctggtccaacatctatgacttggtggtgcccttcccttcagccccctcgatggacaccacagaggctatgctaaagcagggctggacgcccaggaggatgtttaaggaggctgatgatttcttcacctccctggggctgctgcccgtgcctcctgagttctggaacaagtcgatgctggagaagccaaccgacgggcgggaggtggtctgccacgcctcggcctgggacttctacaacggcaaggacttccggatcaagcagtgcaccaccgtgaacttggaggacctggtggtggcccaccacgaaatgggccacatccagtatttcatgcagtacaaagacttacctgtggccttgagggagggtgccaaccccggcttccatgaggccattggggacgtgctagccctctcagtgtctacgcccaagcacctgcacagtctcaacctgctgagcagtgagggtggcagcgacgagcatgacatcaactttctgatgaagatggcccttgacaagatcgcctttatccccttcagctacctcgtcgatcagtggcgctggagggtatttgatggaagcatcaccaaggagaactataaccaggagtggtggagcctcaggctgaagtaccagggcctctgccccccagtgcccaggactcaaggtgactttgacccaggggccaagttccacattccttctagcgtgccttacatcaggtacttcgtcagcttcatcatccagttccagttccacgaggcactgtgccaggcagctggccacacgggccccctgcacaagtgtgacatctaccagtccaaggaggccgggcagcgcctggcgaccgccatgaagctgggcttcagtaggccgtggccggaagccatgcagctgatcacgggccagcccaacatgagcgcctcggccatgttgagctacttcaagccgctgctggactggctccgcacggagaacgagctgcatggggagaagctgggctggccgcagtacaactggacgccgaactccgctcgctcagaagggcccctcccagacagcggccgcgtcagcttcctgggcctggacctggatgcgcagcaggcccgcgtgggccagtggctgctgctcttcctgggcatcgccctgctggtagccaccctgggcctcagccagcggctcttcagcatccgccaccgcagcctccaccggcactcccacgggccccagttcggctccgaggtggagctgagacactcctgaggtgacccggctgggtcggccctgcccaagggcctcccaccagagactgggatgggaacactggtgggcagctgaggacacaccccacaccccagcccaccctgctcctcctgccctgtccctgtccccctcccctcccagtcctccagaccaccagccgccccagccccttctcccagcacacggctgcctgacactgagccccacctctccaagtctctctgtgaatacaattaaaggtcctgccctccccatctgagtctgtgtccctcacagggaagccagggacagggacaggctgctttcctgcctcctggcagtcaagtgggtcccgttactaggtttgttcctccatcctccttcaggagccggggaggatccccagagctctgccccagcacctcctggcgctggcgcctgtcttccctccagcccaggcagcccgccactgtcctgccaccgcaggcagcccctgtctggcccaagcactgacccacgcggactctgggaagcagacatcctgggctgctggcctcacatttccactggcagtggagcctttccctgctccacaaatggccaggtccccccaggggaaggcttccggctgttatcggctgcctcagggggcgagtaccttggagggcctgcttcaaggagggtgccccctggagggcacacaccagcctagtgcttaccttggctcctgcctgtaccagctccatgactctctgctcgggtgaacagccttggctctcagacagccattctaacactgccagtgcagaggggcctcagacgctggagtgtagcagtggctgcacctgcacagggattagctgccagcagccaccctgctggcgtcccagcacacacctcctcactccctgcattggagggagtgtcattttgagggacatttttatgacttttatgtgtatgtttatgtagaaatttggaaaatacagaaaactgtaaagaaaataaaagccctttatatcaacgtcaagagataa

SEQ ID NO: 47374 - DNA, 3280 bp, Homo sapiens
ttgccgggtcagccctgacaaaggtcagctagccccttgaggacatcagctttggcctcagggtcctaatggcagcagaaccactgacagagctagaggagtccatatgagaccgtggtcaccaccttcttcacgctttgcaaggcaggagggccggaaggatagcctcagcggtcaacgagttcaaagagcctggttacccagcaggttgccccgatctgcgtcaagggatgtgggcgtctcgttggatgagaagtatgaagagcttggcatgtgaatgctaggactcggagtctcaagttcaatgaggtactggagattgattggtggagctggaccaaggaacatcaggaagaagaaagagcctgaatgatcaggaagaagtaaagccgcctggtctgagatggggtgggcagggcagagcttgatcacgggtccgagcagaaccgctaatcttcccgaatataaagcttccgtccttggaacacataagaaacagaggcaagacagacatagaacatagaacacaaaagaagactagagaagagaagtaacaaacatacaacaagatcctgttggatatggaaaccacctacagcgtggccactgtgtgccacccgaatggcagctgcctgcagctcgagccagatctgacgaatgtgatggccacatcccggaaatatgaagacctgttatgggcatgggagggctggcgagacaaggcggggagagccatcctccagttttacccgaaatacgtggaactcatcaaccaggctgcccggctcaatggctatgtagatgcaggggactcgtggaggtctatgtacgagacaccatccctggagcaagacctggagcggctcttccaggagctgcagccactctacctcaacctgcatgcctacgtgcgccgggccctgcaccgtcactacggggcccagcacatcaacctggaggggcccattcctgctcacctgctggggaacatgtgggcgcagacctggtccaacatctatgacttggtggtgcccttcccttcagccccctcgatggacaccacagaggctatgctaaagcagggctggacgcccaggaggatgtttaaggaggctgatgatttcttcacctccctggggctgctgcccgtgcctcctgagttctggaacaagtcgatgctggagaagccaaccgacgggcgggaggtggtctgccacgcctcggcctgggacttctacaacggcaaggacttccggatcaagcagtgcaccaccgtgaacttggaggacctggtggtggcccaccacgaaatgggccacatccagtatttcatgcagtacaaagacttacctgtggccttgagggagggtgccaaccccggcttccatgaggccattggggacgtgctagccctctcagtgtctacgcccaagcacctgcacagtctcaacctgctgagcagtgagggtggcagcgacgagcatgacatcaactttctgatgaagatggcccttgacaagatcgcctttatccccttcagctacctcgtcgatcagtggcgctggagggtatttgatggaagcatcaccaaggagaactataaccaggagtggtggagcctcaggctgaagtaccagggcctctgccccccagtgcccaggactcaaggtgactttgacccaggggccaagttccacattccttctagcgtgccttacatcaggtacttcgtcagcttcatcatccagttccagttccacgaggcactgtgccaggcagctggccacacgggccccctgcacaagtgtgacatctaccagtccaaggaggccgggcagcgcctggcgaccgccatgaagctgggcttcagtaggccgtggccggaagccatgcagctgatcacgggccagcccaacatgagcgcctcggccatgttgagctacttcaagccgctgctggactggctccgcacggagaacgagctgcatggggagaagctgggctggccgcagtacaactggacgccgaactccgctcgctcagaagggcccctcccagacagcggccgcgtcagcttcctgggcctggacctggatgcgcagcaggcccgcgtgggccagtggctgctgctcttcctgggcatcgccctgctggtagccaccctgggcctcagccagcggctcttcagcatccgccaccgcagcctccaccggcactcccacgggccccagttcggctccgaggtggagctgagacactcctgaggtgacccggctgggtcggccctgcccaagggcctcccaccagagactgggatgggaacactggtgggcagctgaggacacaccccacaccccagcccaccctgctcctcctgccctgtccctgtccccctcccctcccagtcctccagaccaccagccgccccagccccttctcccagcacacggctgcctgacactgagccccacctctccaagtctctctgtgaatacaattaaaggtcctgccctccccatctgagtctgtgtccctcacagggaagccagggacagggacaggctgctttcctgcctcctggcagtcaagtgggtcccgttactaggtttgttcctccatcctccttcaggagccggggaggatccccagagctctgccccagcacctcctggcgctggcgcctgtcttccctccagcccaggcagcccgccactgtcctgccaccgcaggcagcccctgtctggcccaagcactgacccacgcggactctgggaagcagacatcctgggctgctggcctcacatttccactggcagtggagcctttccctgctccacaaatggccaggtccccccaggggaaggcttccggctgttatcggctgcctcagggggcgagtaccttggagggcctgcttcaaggagggtgccccctggagggcacacaccagcctagtgcttaccttggctcctgcctgtaccagctccatgactctctgctcgggtgaacagccttggctctcagacagccattctaacactgccagtgcagaggggcctcagacgctggagtgtagcagtggctgcacctgcacagggattagctgccagcagccaccctgctggcgtcccagcacacacctcctcactccctgcattggagggagtgtcattttgagggacatttttatgacttttatgtgtatgtttatgtagaaatttggaaaatacagaaaactgtaaagaaaataaaagccctttatatcaacgtcaagagataa

SEQ ID NO: 47375 - DNA, 3245 bp, Homo sapiens
ttcggattggccagggacggtagctgcaggactctgctctcctgcggccatgggccagggttgggctactgcaggacttcccagcctcctcttcctgctgctctgctacgggcaccctctgctggtccctagccaggaggcatcccaacagacctggtgactgatgaggctgaggccagcaagtttgtggaggaatatgaccggacatcccaggtggtgtggaacgagtatgccgaggccaactggaactacaacaccaacatcaccacagagaccagcaagattctgctgcagaagaacatgcaaatagccaaccacaccctgaagtacggcacccaggccaggaagtttgatgtgaaccagttgcagaacaccactatcaagcggatcataaagaaggttcaggacctagaacgggcagcgctgcctgcccaggagctggaggagtacaacaagatcctgttggatatggaaaccacctacagcgtggccactgtgtgccacccgaatggcagctgcctgcagctcgagccagctctgaaattctctgagctccccttacaagcagaggtgagctaagggctggagctcaagccattcaaacccctaccagatctgacgaatgtgatggccacatcccggaaatatgaagacctgttatgggcatgggagggctggcgagacaaggcggggagagccatcctccagttttacccgaaatacgtggaactcatcaaccaggctgcccggctcaatggctatgtagatgcaggggactcgtggaggtctatgtacgagacaccatccctggagcaagacctggagcggctcttccaggagctgcagccactctacctcaacctgcatgcctacgtgcgccgggccctgcaccgtcactacggggcccagcacatcaacctggaggggcccattcctgctcacctgctggggaacatgtgggcgcagacctggtccaacatctatgacttggtggtgcccttcccttcagccccctcgatggacaccacagaggctatgctaaagcagggctggacgcccaggaggatgtttaaggaggctgatgatttcttcacctccctggggctgctgcccgtgcctcctgagttctggaacaagtcgatgctggagaagccaaccgacgggcgggaggtggtctgccacgcctcggcctgggacttctacaacggcaaggacttccggatcaagcagtgcaccaccgtgaacttggaggacctggtggtggcccaccacgaaatgggccacatccagtatttcatgcagtacaaagacttacctgtggccttgagggagggtgccaaccccggcttccatgaggccattggggacgtgctagccctctcagtgtctacgcccaagcacctgcacagtctcaacctgctgagcagtgagggtggcagcgacgagcatgacatcaactttctgatgaagatggcccttgacaagatcgcctttatccccttcagctacctcgtcgatcagtggcgctggagggtatttgatggaagcatcaccaaggagaactataaccaggagtggtggagcctcaggctgaagtaccagggcctctgccccccagtgcccaggactcaaggtgactttgacccaggggccaagttccacattccttctagcgtgccttacatcaggtacttcgtcagcttcatcatccagttccagttccacgaggcactgtgccaggcagctggccacacgggccccctgcacaagtgtgacatctaccagtccaaggaggccgggcagcgcctggcgaccgccatgaagctgggcttcagtaggccgtggccggaagccatgcagctgatcacgggccagcccaacatgagcgcctcggccatgttgagctacttcaagccgctgctggactggctccgcacggagaacgagctgcatggggagaagctgggctggccgcagtacaactggacgccgaactccgctcgctcagaagggcccctcccagacagcggccgcgtcagcttcctgggcctggacctggatgcgcagcaggcccgcgtgggccagtggctgctgctcttcctgggcatcgccctgctggtagccaccctgggcctcagccagcggctcttcagcatccgccaccgcagcctccaccggcactcccacgggccccagttcggctccgaggtggagctgagacactcctgaggtgacccggctgggtcggccctgcccaagggcctcccaccagagactgggatgggaacactggtgggcagctgaggacacaccccacaccccagcccaccctgctcctcctgccctgtccctgtccccctcccctcccagtcctccagaccaccagccgccccagccccttctcccagcacacggctgcctgacactgagccccacctctccaagtctctctgtgaatacaattaaaggtcctgccctccccatctgagtctgtgtccctcacagggaagccagggacagggacaggctgctttcctgcctcctggcagtcaagtgggtcccgttactaggtttgttcctccatcctccttcaggagccggggaggatccccagagctctgccccagcacctcctggcgctggcgcctgtcttccctccagcccaggcagcccgccactgtcctgccaccgcaggcagcccctgtctggcccaagcactgacccacgcggactctgggaagcagacatcctgggctgctggcctcacatttccactggcagtggagcctttccctgctccacaaatggccaggtccccccaggggaaggcttccggctgttatcggctgcctcagggggcgagtaccttggagggcctgcttcaaggagggtgccccctggagggcacacaccagcctagtgcttaccttggctcctgcctgtaccagctccatgactctctgctcgggtgaacagccttggctctcagacagccattctaacactgccagtgcagaggggcctcagacgctggagtgtagcagtggctgcacctgcacagggattagctgccagcagccaccctgctggcgtcccagcacacacctcctcactccctgcattggagggagtgtcattttgagggacatttttatgacttttatgtgtatgtttatgtagaaatttggaaaatacagaaaactgtaaagaaaataaaagccctttatatcaacgtcaagagataa

SEQ ID NO: 47376 - DNA, 2997 bp, Homo sapiens
  misc_feature (78)..(78): n is a, c, g, or t
  misc_feature (243)..(244): n is a, c, g, or t
  misc_feature (247)..(247): n is a, c, g, or t
tcctgagtttcttccttttcctctgtcgtggagaactaggctcttttcttacactaaactcagaggcatcagcctctncctgaaggagacggctggttcctgtcagagttgctgagctgcagacaccgacctcaggtggtgcggaggggacatggcagagtggctggtgaagagagcagcctgccagcctttcaatcccagccctgccacttaggagccgtgggcccccggcgaggggggcgnngtncacttaactctccagcctgtttcctttactagccaatgggaatcgtgacagtacctgggtgcagacaggattgaaagtgaattcacacaatgttcttggtgcagagccaataagaggtggccaccggggtgtaggtgttctggggacctgtaatgtcctcacatgtcagcagttgctagtcacattggtctccactgctcacggacagtgaagaccacctggattccctgataaccagcaaggcccccacctagagccaggcagtaatgacctactgggctggatatgcacaccaaagatgatgtgtgcctcaaagcttgcaaacagtaggtgctcaagaaatgccactatgattagcaggactgggatctggagcgctcttcctgcaggagggcattgagcctaagtaacatttgtctttcctctctctgccgtcccccacactcgcctccagggaacatgtgggcgcagacctggtccaacatctatgacttggtggtgcccttcccttcagccccctcgatggacaccacagaggctatgctaaagcagggctggacgcccaggaggatgtttaaggaggctgatgatttcttcacctccctggggctgctgcccgtgcctcctgagttctggaacaagtcgatgctggagaagccaaccgacgggcgggaggtggtctgccacgcctcggcctgggacttctacaacggcaaggacttccggatcaagcagtgcaccaccgtgaacttggaggacctggtggtggcccaccacgaaatgggccacatccagtatttcatgcagtacaaagacttacctgtggccttgagggagggtgccaaccccggcttccatgaggccattggggacgtgctagccctctcagtgtctacgcccaagcacctgcacagtctcaacctgctgagcagtgagggtggcagcgacgagcatgacatcaactttctgatgaagatggcccttgacaagatcgcctttatccccttcagctacctcgtcgatcagtggcgctggagggtatttgatggaagcatcaccaaggagaactataaccaggagtggtggagcctcaggctgaagtaccagggcctctgccccccagtgcccaggactcaaggtgactttgacccaggggccaagttccacattccttctagcgtgccttacatcaggtacttcgtcagcttcatcatccagttccagttccacgaggcactgtgccaggcagctggccacacgggccccctgcacaagtgtgacatctaccagtccaaggaggccgggcagcgcctggcgaccgccatgaagctgggcttcagtaggccgtggccggaagccatgcagctgatcacgggccagcccaacatgagcgcctcggccatgttgagctacttcaagccgctgctggactggctccgcacggagaacgagctgcatggggagaagctgggctggccgcagtacaactggacgccgaactccgctcgctcagaagggcccctcccagacagcggccgcgtcagcttcctgggcctggacctggatgcgcagcaggcccgcgtgggccagtggctgctgctcttcctgggcatcgccctgctggtagccaccctgggcctcagccagcggctcttcagcatccgccaccgcagcctccaccggcactcccacgggccccagttcggctccgaggtggagctgagacactcctgaggtgacccggctgggtcggccctgcccaagggcctcccaccagagactgggatgggaacactggtgggcagctgaggacacaccccacaccccagcccaccctgctcctcctgccctgtccctgtccccctcccctcccagtcctccagaccaccagccgccccagccccttctcccagcacacggctgcctgacactgagccccacctctccaagtctctctgtgaatacaattaaaggtcctgccctccccatctgagtctgtgtccctcacagggaagccagggacagggacaggctgctttcctgcctcctggcagtcaagtgggtcccgttactaggtttgttcctccatcctccttcaggagccggggaggatccccagagctctgccccagcacctcctggcgctggcgcctgtcttccctccagcccaggcagcccgccactgtcctgccaccgcaggcagcccctgtctggcccaagcactgacccacgcggactctgggaagcagacatcctgggctgctggcctcacatttccactggcagtggagcctttccctgctccacaaatggccaggtccccccaggggaaggcttccggctgttatcggctgcctcagggggcgagtaccttggagggcctgcttcaaggagggtgccccctggagggcacacaccagcctagtgcttaccttggctcctgcctgtaccagctccatgactctctgctcgggtgaacagccttggctctcagacagccattctaacactgccagtgcagaggggcctcagacgctggagtgtagcagtggctgcacctgcacagggattagctgccagcagccaccctgctggcgtcccagcacacacctcctcactccctgcattggagggagtgtcattttgagggacatttttatgacttttatgtgtatgtttatgtagaaatttggaaaatacagaaaactgtaaagaaaataaaagccctttatatcaacgtcaagagataa

SEQ ID NO: 47377 - DNA, 1877 bp, Homo sapiens
ttcggattggccagggacggtagctgcaggactctgctctcctgcggccatgggccagggttgggctactgcaggacttcccagcctcctcttcctgctgctctgctacgggcaccctctgctggtccctagccaggaggcatcccaacaggtgacagtcacccatgggacaagcagccaggcaacaaccagcagccagacaaccacccaccaggcgacggcccaccagacatcagcccagagcccaaacctggtgactgatgaggctgaggccagcaagtttgtggaggaatatgaccggacatcccaggtggtgtggaacgagtatgccgaggccaactggaactacaacaccaacatcaccacagagaccagcaagattctgctgcagaagaacatgcaaatagccaaccacaccctgaagtacggcacccaggccaggaagtttgatgtgaaccagttgcagaacaccactatcaagcggatcataaagaaggttcaggacctagaacgggcagcgctgcctgcccaggagctggaggagtacaacaagatcctgttggatatggaaaccacctacagcgtggccactgtgtgccacccgaatggcagctgcctgcagctcgagccagatctgacgaatgtgatggccacatcccggaaatatgaagacctgttatgggcatgggagggctggcgagacaaggcggggagagccatcctccagttttacccgaaatacgtggaactcatcaaccaggctgcccggctcaatggctatgtagatgcaggggactcgtggaggtctatgtacgagacaccatccctggagcaagacctggagcggctcttccaggagctgcagccactctacctcaacctgcatgcctacgtgcgccgggccctgcaccgtcactacggggcccagcacatcaacctggaggggcccattcctgctcacctgctggggaacatgtgggcgcagacctggtccaacatctatgacttggtggtgcccttcccttcaccccttctcccagcacacggctgcctgacactgagccccacctctccaagtctctctgtgaatacaattaaaggtcctgccctccccatctgagtctgtgtccctcacagggaagccagggacagggacaggctgctttcctgcctcctggcagtcaagtgggtcccgttactaggtttgttcctccatcctccttcaggagccggggaggatccccagagctctgccccagcacctcctggcgctggcgcctgtcttccctccagcccaggcagcccgccactgtcctgccaccgcaggcagcccctgtctggcccaagcactgacccacgcggactctgggaagcagacatcctgggctgctggcctcacatttccactggcagtggagcctttccctgctccacaaatggccaggtccccccaggggaaggcttccggctgttatcggctgcctcagggggcgagtaccttggagggcctgcttcaaggagggtgccccctggagggcacacaccagcctagtgcttaccttggctcctgcctgtaccagctccatgactctctgctcgggtgaacagccttggctctcagacagccattctaacactgccagtgcagaggggcctcagacgctggagtgtagcagtggctgcacctgcacagggattagctgccagcagccaccctgctggcgtcccagcacacacctcctcactccctgcattggagggagtgtcattttgagggacatttttatgacttttatgtgtatgtttatgtagaaatttggaaaatacagaaaactgtaaagaaaataaaagccctttatatcaacgtcaagagataa

SEQ ID NO: 47378 - DNA, 2623 bp, Homo sapiens
gccgagcaccgcgcaccgcgtcatgggggccgcctcgggccgccgggggccggggctgctgctgccgctgccgctgctgttgctgctgccgccgcagcccgccctggcgttggaccccgggctgcagcccggcaacttttctgctgacgaggccggggcgcagctcttcgcgcagagctacaactccagcgccgaacaggtgctgttccagagcgtggccgccagctgggcgcacgacaccaacatcaccgcggagaatgcaaggcgccaggaggaagcagccctgctcagccaggagtttgcggaggcctggggccagaaggccaaggagctgtatgaaccgatctggcagaacttcacggacccgcagctgcgcaggatcatcggagctgtgcgcaccctgggctctgccaacctgcccctggctaagcggcagcagtacaacgccctgctaagcaacatgagcaggatctactccaccgccaaggtctgcctccccaacaagactgccacctgctggtccctggacccagatctcaccaacatcctggcttcctcgcgaagctacgccatgctcctgtttgcctgggagggctggcacaacgctgcgggcatcccgctgaaaccgctgtacgaggatttcactgccctcagcaatgaagcctacaagcaggacggcttcacagacacgggggcctactggcgctcctggtacaactcccccaccttcgaggacgatctggaacacctctaccaacagctagagcccctctacctgaacctccatgccttcgtccgccgcgcactgcatcgccgatacggagacagatacatcaacctcaggggacccatccctgctcatctgctgggagacatgtgggcccagagctgggaaaacatctacgacatggtggtgcctttcccagacaagcccaacctcgatgtcaccagtactatgctgcagcagggctggaacgccacgcacatgttccgggtggcagaggagttcttcacctccctggagctctcccccatgcctcccgagttctgggaagggtcgatgctggagaagccggccgacgggcgggaagtggtgtgccacgcctcggcttgggacttctacaacaggaaagacttcaggatcaagcagtgcacacgggtcacgatggaccagctctccacagtgcaccatgagatgggccatatacagtactacctgcagtacaaggatctgcccgtctccctgcgtcggggggccaaccccggcttccatgaggccattggggacgtgctggcgctctcggtctccactcctgaacatctgcacaaaatcggcctgctggaccgtgtcaccaatgacacggaaagtgacatcaattacttgctaaaaatggcactggaaaaaattgccttcctgccctttggctacttggtggaccagtggcgctggggggtctttagtgggcgtacccccccttcccgctacaacttcgactggtggtatcttcgaaccaagtatcaggggatctgtcctcctgttacccgaaacgaaacccactttgatgctggagctaagtttcatgttccaaatgtgacaccatacatcaggtactttgtgagttttgtcctgcagttccagttccatgaagccctgtgcaaggaggcaggctatgagggcccactgcaccagtgtgacatctaccggtccaccaaggcaggggccaagctccggaaggtgctgcaggctggctcctccaggccctggcaggaggtgctgaaggacatggtcggcttagatgccctggatgcccagccgctgctcaagtacttccagccagtcacccagtggctgcaggagcagaaccagcagaacggcgaggtcctgggctggcccgagtaccagtggcacccgccgttgcctgacaactacccggagggcatagacctggtgactgatgaggctgaggccagcaagtttgtggaggaatatgaccggacatcccaggtggtgtggaacgagtatgccgaggccaactggaactacaacaccaacatcaccacagagaccagcaagattctgctgcagaagaacatgcaaatagccaaccacaccctgaagtacggcacccaggccaggaagtttgatgtgaaccagttgcagaacaccactatcaagcggatcataaagaaggttcaggacctagaacgggcagcgctgcctgcccaggagctggaggagtacaacaagatcctgttggatatggaaaccacctacagcgtggccactgtgtgccacccgaatggcagctgcctgcagctcgagccagatctgacgaatgtgatggccacatcccggaaatatgaagacctgttatgggcatgggagggctggcgagacaaggcggggagagccatcctccagttttacccgaaatacgtggaactcatcaaccaggctgcccggctcaatgggtatgtaggatgcagggactcggggcggttctatgttcgagaaagcattccgtggagcaagaactggagcgggttcttacaggaagtgagacactttaactgacgtggatgcacggtgggcggggacctgacaggcattagggggcaagaa

SEQ ID NO: 47379 - DNA, 477 bp, Homo sapiens
tcctcgctatgtcatcaaatatttattgagtgggccttctggctggcatggggcgacacaaatgccccctgccaccatcagagagatcccaggccccagggtcttattgccacagtttctgcagtccattggggggcggaagtggccaggggcatgtgggccggggtccaggagcagactccagcctgagtcccctgtgcccatggtacccactctgcccaccaggaaggtgctgcaggctggctcctccaggccctggcaggaggtgctgaaggacatggtcggcttagatgccctggatgcccagccgctgctcaagtacttccagccagtcacccagtggctgcaggagcagaaccagcagaacggcgaggtcctgggctggcccgagtaccagtggcacccgccgttgcctgacaactacccggagggcataggtaaagccctgagtgaggatggtgtggggctaaggtgggt

SEQ ID NO: 47380 - DNA, 4622 bp, Homo sapiens
gccgagcaccgcgcaccgcgtcatgggggccgcctcgggccgccgggggccggggctgctgctgccgctgccgctgctgttgctgctgccgccgcagcccgccctggcgttggaccccgggctgcagcccggcaacttttctgctgacgaggccggggcgcagctcttcgcgcagagctacaactccagcgccgaacaggtgctgttccagagcgtggccgccagctgggcgcacgacaccaacatcaccgcggagaatgcaaggcgccaggaggaagcagccctgctcagccaggagtttgcggaggcctggggccagaaggccaaggagctgtatgaaccgatctggcagaacttcacggacccgcagctgcgcaggatcatcggagctgtgcgcaccctgggctctgccaacctgcccctggctaagcggcagcagtacaacgccctgctaagcaacatgagcaggatctactccaccgccaaggtctgcctccccaacaagactgccacctgctggtccctggacccagatctcaccaacatcctggcttcctcgcgaagctacgccatgctcctgtttgcctgggagggctggcacaacgctgcgggcatcccgctgaaaccgctgtacgaggatttcactgccctcagcaatgaagcctacaagcaggacggcttcacagacacgggggcctactggcgctcctggtacaactcccccaccttcgaggacgatctggaacacctctaccaacagctagagcccctctacctgaacctccatgccttcgtccgccgcgcactgcatcgccgatacggagacagatacatcaacctcaggggacccatccctgctcatctgctgggagacatgtgggcccagagctgggaaaacatctacgacatggtggtgcctttcccagacaagcccaacctcgatgtcaccagtactatgctgcagcagggctggaacgccacgcacatgttccgggtggcagaggagttcttcacctccctggagctctcccccatgcctcccgagttctgggaagggtcgatgctggagaagccggccgacgggcgggaagtggtgtgccacgcctcggcttgggacttctacaacaggaaagacttcaggatcaagcagtgcacacgggtcacgatggaccagctctccacagtgcaccatgagatgggccatatacagtactacctgcagtacaaggatctgcccgtctccctgcgtcggggggccaaccccggcttccatgaggccattggggacgtgctggcgctctcggtctccactcctgaacatctgcacaaaatcggcctgctggaccgtgtcaccaatgacacggaaagtgacatcaattacttgctaaaaatggcactggaaaaaattgccttcctgccctttggctacttggtggaccagtggcgctggggggtctttagtgggcgtacccccccttcccgctacaacttcgactggtggtatcttcgaaccaagtatcaggggatctgtcctcctgttacccgaaacgaaacccactttgatgctggagctaagtttcatgttccaaatgtgacaccatacatcaggtactttgtgagttttgtcctgcagttccagttccatgaagccctgtgcaaggaggcaggctatgagggcccactgcaccagtgtgacatctaccggtccaccaaggcaggggccaagctccggaaggtgctgcaggctggctcctccaggccctggcaggaggtgctgaaggacatggtcggcttagatgccctggatgcccagccgctgctcaagtacttccagccagtcacccagtggctgcaggagcagaaccagcagaacggcgaggtcctgggctggcccgagtaccagtggcacccgccgttgcctgacaactacccggagggcatagacctggtgactgatgaggctgaggccagcaagtttgtggaggaatatgaccggacatcccaggtggtgtggaacgagtatgccgaggccaactggaactacaacaccaacatcaccacagagaccagcaagattctgctgcagaagaacatgcaaatagccaaccacaccctgaagtacggcacccaggccaggaagtttgatgtgaaccagttgcagaacaccactatcaagcggatcataaagaaggttcaggacctagaacgggcagcgctgcctgcccaggagctggaggagtacaacaagatcctgttggatatggaaaccacctacagcgtggccactgtgtgccacccgaatggcagctgcctgcagctcgagccagatctgacgaatgtgatggccacatcccggaaatatgaagacctgttatgggcatgggagggctggcgagacaaggcggggagagccatcctccagttttacccgaaatacgtggaactcatcaaccaggctgcccggctcaatggctatgtagatgcaggggactcgtggaggtctatgtacgagacaccatccctggagcaagacctggagcggctcttccaggagctgcagccactctacctcaacctgcatgcctacgtgcgccgggccctgcaccgtcactacggggcccagcacatcaacctggaggggcccattcctgctcacctgctggggaacatgtgggcgcagacctggtccaacatctatgacttggtggtgcccttcccttcagccccctcgatggacaccacagaggctatgctaaagcagggctggacgcccaggaggatgtttaaggaggctgatgatttcttcacctccctggggctgctgcccgtgcctcctgagttctggaacaagtcgatgctggagaagccaaccgacgggcgggaggtggtctgccacgcctcggcctgggacttctacaacggcaaggacttccggatcaagcagtgcaccaccgtgaacttggaggacctggtggtggcccaccacgaaatgggccacatccagtatttcatgcagtacaaagacttacctgtggccttgagggagggtgccaaccccggcttccatgaggccattggggacgtgctagccctctcagtgtctacgcccaagcacctgcacagtctcaacctgctgagcagtgagggtggcagcgacgagcatgacatcaactttctgatgaagatggcccttgacaagatcgcctttatccccttcagctacctcgtcgatcagtggcgctggagggtatttgatggaagcatcaccaaggagaactataaccaggagtggtggagcctcaggctgaagtaccagggcctctgccccccagtgcccaggactcaaggtgactttgacccaggggccaagttccacattccttctagcgtgccttacatcaggtacttcgtcagcttcatcatccagttccagttccacgaggcactgtgccaggcagctggccacacgggccccctgcacaagtgtgacatctaccagtccaaggaggccgggcagcgcctggcgaccgccatgaagctgggcttcagtaggccgtggccggaagccatgcagctgatcacgggccagcccaacatgagcgcctcggccatgttgagctacttcaagccgctgctggactggctccgcacggagaacgagctgcatggggagaagctgggctggccgcagtacaactggacgccgaactccgctcgctcagaagggcccctcccagacagcggccgcgtcagcttcctgggcctggacctggatgcgcagcaggcccgcgtgggccagtggctgctgctcttcctgggcatcgccctgctggtagccaccctgggcctcagccagcggctcttcagcatccgccaccgcagcctccaccggcactcccacgggccccagttcggctccgaggtggagctgagacactcctgaggtgacccggctgggtcggccctgcccaagggcctcccaccagagactgggatgggaacactggtgggcagctgaggacacaccccacaccccagcccaggcagcccgccactgtcctgccaccgcaggcagcccctgtctggcccaagcactgacccacgcggactctgggaagcagacatcctgggctgctggcctcacatttccactggcagtggagcctttccctgctccacaaatggccaggtccccccaggggaaggcttccggctgttatcggctgcctcagggggcgagtaccttggagggcctgcttcaaggagggtgccccctggagggcacacaccagcctagtgcttaccttggctcctgcctgtaccagctccatgactctctgctcgggtgaacagccttggctctcagacagccattctaacactgccagtgcagaggggcctcagacgctggagtgtagcagtggctgcacctgcacagggattagctgccagcagccaccctgctggcgtcccagcacacacctcctcactccctgcattggagggagtgtcattttgagggacatttttatgacttttatgtgtatgtttatgtagaaatttggaaaatacagaaaactgtaaagaaaataaaagccctttatatcaacgtcaagagataa

SEQ ID NO: 47381 - DNA, 4195 bp, Homo sapiens
  misc_feature (4117)..(4117): n is a, c, g, or t
  misc_feature (4148)..(4148): n is a, c, g, or t
  misc_feature (4176)..(4176): n is a, c, g, or t
  misc_feature (4194)..(4194): n is a, c, g, or t
gccgagcaccgcgcaccgcgtcatgggggccgcctcgggccgccgggggccggggctgctgctgccgctgccgctgctgttgctgctgccgccgcagcccgccctggcgttggaccccgggctgcagcccggcaacttttctgctgacgaggccggggcgcagctcttcgcgcagagctacaactccagcgccgaacaggtgctgttccagagcgtggccgccagctgggcgcacgacaccaacatcaccgcggagaatgcaaggcgccaggaggaagcagccctgctcagccaggagtttgcggaggcctggggccagaaggccaaggagctgtatgaaccgatctggcagaacttcacggacccgcagctgcgcaggatcatcggagctgtgcgcaccctgggctctgccaacctgcccctggctaagcggcagcagtacaacgccctgctaagcaacatgagcaggatctactccaccgccaaggtctgcctccccaacaagactgccacctgctggtccctggacccagatctcaccaacatcctggcttcctcgcgaagctacgccatgctcctgtttgcctgggagggctggcacaacgctgcgggcatcccgctgaaaccgctgtacgaggatttcactgccctcagcaatgaagcctacaagcaggacggcttcacagacacgggggcctactggcgctcctggtacaactcccccaccttcgaggacgatctggaacacctctaccaacagctagagcccctctacctgaacctccatgccttcgtccgccgcgcactgcatcgccgatacggagacagatacatcaacctcaggggacccatccctgctcatctgctgggagacatgtgggcccagagctgggaaaacatctacgacatggtggtgcctttcccagacaagcccaacctcgatgtcaccagtactatgctgcagcagggctggaacgccacgcacatgttccgggtggcagaggagttcttcacctccctggagctctcccccatgcctcccgagttctgggaagggtcgatgctggagaagccggccgacgggcgggaagtggtgtgccacgcctcggcttgggacttctacaacaggaaagacttcaggatcaagcagtgcacacgggtcacgatggaccagctctccacagtgcaccatgagatgggccatatacagtactacctgcagtacaaggatctgcccgtctccctgcgtcggggggccaaccccggcttccatgaggccattggggacgtgctggcgctctcggtctccactcctgaacatctgcacaaaatcggcctgctggaccgtgtcaccaatgacacggaaagtgacatcaattacttgctaaaaatggcactggaaaaaattgccttcctgccctttggctacttggtggaccagtggcgctggggggtctttagtgggcgtacccccccttcccgctacaacttcgactggtggtatcttcgaaccaagtatcaggggatctgtcctcctgttacccgaaacgaaacccactttgatgctggagctaagtttcatgttccaaatgtgacaccatacatcaggtactttgtgagttttgtcctgcagttccagttccatgaagccctgtgcaaggaggcaggctatgagggcccactgcaccagtgtgacatctaccggtccaccaaggcaggggccaagctccggaaggtgctgcaggctggctcctccaggccctggcaggaggtgctgaaggacatggtcggcttagatgccctggatgcccagccgctgctcaagtacttccagccagtcacccagtggctgcaggagcagaaccagcagaacggcgaggtcctgggctggcccgagtaccagtggcacccgccgttgcctgacaactacccggagggcatagacctggtgactgatgaggctgaggccagcaagtttgtggaggaatatgaccggacatcccaggtggtgtggaacgagtatgccgaggccaactggaactacaacaccaacatcaccacagagaccagcaagattctgctgcagaagaacatgcaaatagccaaccacaccctgaagtacggcacccaggccaggaagtttgatgtgaaccagttgcagaacaccactatcaagcggatcataaagaaggttcaggacctagaacgggcagcgctgcctgcccaggagctggaggagtacaacaagatcctgttggatatggaaaccacctacagcgtggccactgtgtgccacccgaatggcagctgcctgcagctcgagccagatctgacgaatgtgatggccacatcccggaaatatgaagacctgttatgggcatgggagggctggcgagacaaggcggggagagccatcctccagttttacccgaaatacgtggaactcatcaaccaggctgcccggctcaatggctatgtagatgcaggggactcgtggaggtctatgtacgagacaccatccctggagcaagacctggagcggctcttccaggagctgcagccactctacctcaacctgcatgcctacgtgcgccgggccctgcaccgtcactacggggcccagcacatcaacctggaggggcccattcctgctcacctgctggggaacatgtgggcgcagacctggtccaacatctatgacttggtggtgcccttcccttcagccccctcgatggacaccacagaggctatgctaaagcagggctggacgcccaggaggatgtttaaggaggctgatgatttcttcacctccctggggctgctgcccgtgcctcctgagttctggaacaagtcgatgctggagaagccaaccgacgggcgggaggtggtctgccacgcctcggcctgggacttctacaacggcaaggacttccggatcaagcagtgcaccaccgtgaacttggaggacctggtggtggcccaccacgaaatgggccacatccagtatttcatgcagtacaaagacttacctgtggccttgagggagggtgccaaccccggcttccatgaggccattggggacgtgctagccctctcagtgtctacgcccaagcacctgcacagtctcaacctgctgagcagtgagggtggcagcgacgagcatgacatcaactttctgatgaagatggcccttgacaagatcgcctttatccccttcagctacctcgtcgatcagtggcgctggagggtatttgatggaagcatcaccaaggagaactataaccaggagtggtggagcctcaggctgaagtaccagggcctctgccccccagtgcccaggactcaaggtgactttgacccaggggccaagttccacattccttctagcgtgccttacatcaggtacttcgtcagcttcatcatccagttccagttccacgaggcactgtgccaggcagctggccacacgggccccctgcacaagtgtgacatctaccagtccaaggaggccgggcagcgcctggcgaccgccatgaagctgggcttcagtaggccgtggccggaagccatgcagctgatcacgggccagcccaacatgagcgcctcggccatgttgagctacttcaagccgctgctggactggctccgcacggagaacgagctgcatggggagaagctgggctggccgcagtacaactggacgccgaactccgctcgctcagaagggcccctcccagacagcggccgcgtcagcttcctgggcctggacctggatgcgcagcaggcccgcgtgggccagtggctgctgctcttcctgggcatcgccctgctggtagccaccctgggcctcagccagcggctcttcagcatccgccaccgcagcctccaccggcactcccacgggccccagttcggctccgaggtggagctgagacactcctgaggtgacccggctgggtcggccctgcccaagggcctcccaccagagactgggatgggaacactggtgggcagctgaggacacaccccacaccccagcccaccagtgttcccatcccagtctctggcctcgtgccgaatttctttgggcctcgagggcaaaatttccctatagttnagttcgtattttaaattggttaattcatgtnattaggttgtttttcccgtgtgaaattngtttttccgtttaaaaant

SEQ ID NO: 47382 - DNA, 4918 bp, Homo sapiens
aggccggtcccacggcaggttgtactcctgcgtgacagagtgagacctccccccaaaaaaaagagagagagaaaaggttgagaaagactgggaagtcaccaaagccagagaatgggagggatctgccctcactgcagggtggtgccaagctgggacttgaccctgaccctgactttcaggactcctgtcccccactccacaggctgcctccactggcaggggactcagaagtgatccggtcacactaagtgacacttagtgatcagaagtgccccggtgccactgagtggccttgtccaagctacatccactctgtgggctcctccttgtagcagcgaggggagggcagatgtcccaggggctggtcactggagcattcctcccctctgactccccagtacaacgccctgctaagcaacatgagcaggatctactccaccgccaaggtctgcctccccaacaagactgccacctgctggtccctggacccagatctcaccaacatcctggcttcctcgcgaagctacgccatgctcctgtttgcctgggagggctggcacaacgctgcgggcatcccgctgaaaccgctgtacgaggatttcactgccctcagcaatgaagcctacaagcaggacggcttcacagacacgggggcctactggcgctcctggtacaactcccccaccttcgaggacgatctggaacacctctaccaacagctagagcccctctacctgaacctccatgccttcgtccgccgcgcactgcatcgccgatacggagacagatacatcaacctcaggggacccatccctgctcatctgctgggagacatgtgggcccagagctgggaaaacatctacgacatggtggtgcctttcccagacaagcccaacctcgatgtcaccagtactatgctgcagcagggctggaacgccacgcacatgttccgggtggcagaggagttcttcacctccctggagctctcccccatgcctcccgagttctgggaagggtcgatgctggagaagccggccgacgggcgggaagtggtgtgccacgcctcggcttgggacttctacaacaggaaagacttcaggatcaagcagtgcacacgggtcacgatggaccagctctccacagtgcaccatgagatgggccatatacagtactacctgcagtacaaggatctgcccgtctccctgcgtcggggggccaaccccggcttccatgaggccattggggacgtgctggcgctctcggtctccactcctgaacatctgcacaaaatcggcctgctggaccgtgtcaccaatgacacggaaagtgacatcaattacttgctaaaaatggcactggaaaaaattgccttcctgccctttggctacttggtggaccagtggcgctggggggtctttagtgggcgtacccccccttcccgctacaacttcgactggtggtatcttcgaaccaagtatcaggggatctgtcctcctgttacccgaaacgaaacccactttgatgctggagctaagtttcatgttccaaatgtgacaccatacatcaggtactttgtgagttttgtcctgcagttccagttccatgaagccctgtgcaaggaggcaggctatgagggcccactgcaccagtgtgacatctaccggtccaccaaggcaggggccaagctccggaaggtgctgcaggctggctcctccaggccctggcaggaggtgctgaaggacatggtcggcttagatgccctggatgcccagccgctgctcaagtacttccagccagtcacccagtggctgcaggagcagaaccagcagaacggcgaggtcctgggctggcccgagtaccagtggcacccgccgttgcctgacaactacccggagggcatagacctggtgactgatgaggctgaggccagcaagtttgtggaggaatatgaccggacatcccaggtggtgtggaacgagtatgccgaggccaactggaactacaacaccaacatcaccacagagaccagcaagattctgctgcagaagaacatgcaaatagccaaccacaccctgaagtacggcacccaggccaggaagtttgatgtgaaccagttgcagaacaccactatcaagcggatcataaagaaggttcaggacctagaacgggcagcgctgcctgcccaggagctggaggagtacaacaagatcctgttggatatggaaaccacctacagcgtggccactgtgtgccacccgaatggcagctgcctgcagctcgagccagatctgacgaatgtgatggccacatcccggaaatatgaagacctgttatgggcatgggagggctggcgagacaaggcggggagagccatcctccagttttacccgaaatacgtggaactcatcaaccaggctgcccggctcaatggctatgtagatgcaggggactcgtggaggtctatgtacgagacaccatccctggagcaagacctggagcggctcttccaggagctgcagccactctacctcaacctgcatgcctacgtgcgccgggccctgcaccgtcactacggggcccagcacatcaacctggaggggcccattcctgctcacctgctggggaacatgtgggcgcagacctggtccaacatctatgacttggtggtgcccttcccttcagccccctcgatggacaccacagaggctatgctaaagcagggctggacgcccaggaggatgtttaaggaggctgatgatttcttcacctccctggggctgctgcccgtgcctcctgagttctggaacaagtcgatgctggagaagccaaccgacgggcgggaggtggtctgccacgcctcggcctgggacttctacaacggcaaggacttccggatcaagcagtgcaccaccgtgaacttggaggacctggtggtggcccaccacgaaatgggccacatccagtatttcatgcagtacaaagacttacctgtggccttgagggagggtgccaaccccggcttccatgaggccattggggacgtgctagccctctcagtgtctacgcccaagcacctgcacagtctcaacctgctgagcagtgagggtggcagcgacgagcatgacatcaactttctgatgaagatggcccttgacaagatcgcctttatccccttcagctacctcgtcgatcagtggcgctggagggtatttgatggaagcatcaccaaggagaactataaccaggagtggtggagcctcaggctgaagtaccagggcctctgccccccagtgcccaggactcaaggtgactttgacccaggggccaagttccacattccttctagcgtgccttacatcaggtacttcgtcagcttcatcatccagttccagttccacgaggcactgtgccaggcagctggccacacgggccccctgcacaagtgtgacatctaccagtccaaggaggccgggcagcgcctggcgaccgccatgaagctgggcttcagtaggccgtggccggaagccatgcagctgatcacgggccagcccaacatgagcgcctcggccatgttgagctacttcaagccgctgctggactggctccgcacggagaacgagctgcatggggagaagctgggctggccgcagtacaactggacgccgaactccgctcgctcagaagggcccctcccagacagcggccgcgtcagcttcctgggcctggacctggatgcgcagcaggcccgcgtgggccagtggctgctgctcttcctgggcatcgccctgctggtagccaccctgggcctcagccagcggctcttcagcatccgccaccgcagcctccaccggcactcccacgggccccagttcggctccgaggtggagctgagacactcctgaggtgacccggctgggtcggccctgcccaagggcctcccaccagagactgggatgggaacactggtgggcagctgaggacacaccccacaccccagcccaccctgctcctcctgccctgtccctgtccccctcccctcccagtcctccagaccaccagccgccccagccccttctcccagcacacggctgcctgacactgagccccacctctccaagtctctctgtgaatacaattaaaggtcctgccctccccatctgagtctgtgtccctcacagggaagccagggacagggacaggctgctttcctgcctcctggcagtcaagtgggtcccgttactaggtttgttcctccatcctccttcaggagccggggaggatccccagagctctgccccagcacctcctggcgctggcgcctgtcttccctccagcccaggcagcccgccactgtcctgccaccgcaggcagcccctgtctggcccaagcactgacccacgcggactctgggaagcagacatcctgggctgctggcctcacatttccactggcagtggagcctttccctgctccacaaatggccaggtccccccaggggaaggcttccggctgttatcggctgcctcagggggcgagtaccttggagggcctgcttcaaggagggtgccccctggagggcacacaccagcctagtgcttaccttggctcctgcctgtaccagctccatgactctctgctcgggtgaacagccttggctctcagacagccattctaacactgccagtgcagaggggcctcagacgctggagtgtagcagtggctgcacctgcacagggattagctgccagcagccaccctgctggcgtcccagcacacacctcctcactccctgcattggagggagtgtcattttgagggacatttttatgacttttatgtgtatgtttatgtagaaatttggaaaatacagaaaactgtaaagaaaataaaagccctttatatcaacgtcaagagataa

SEQ ID NO: 47383 - DNA, 3167 bp, Homo sapiens
ttcggattggccagggacggtagctgcaggactctgctctcctgcggccatgggccagggttgggctactgcaggacttcccagcctcctcttcctgctgctctgctacgggcaccctctgctggtccctagccaggaggcatcccaacagacctggtgactgatgaggctgaggccagcaagtttgtggaggaatatgaccggacatcccaggtggtgtggaacgagtatgccgaggccaactggaactacaacaccaacatcaccacagagaccagcaagattctgctgcagaagaacatgcaaatagccaaccacaccctgaagtacggcacccaggccaggaagtttgatgtgaaccagttgcagaacaccactatcaagcggatcataaagaaggttcaggacctagaacgggcagcgctgcctgcccaggagctggaggagtacaacaagatcctgttggatatggaaaccacctacagcgtggccactgtgtgccacccgaatggcagctgcctgcagctcgagccagatctgacgaatgtgatggccacatcccggaaatatgaagacctgttatgggcatgggagggctggcgagacaaggcggggagagccatcctccagttttacccgaaatacgtggaactcatcaaccaggctgcccggctcaatggctatgtagatgcaggggactcgtggaggtctatgtacgagacaccatccctggagcaagacctggagcggctcttccaggagctgcagccactctacctcaacctgcatgcctacgtgcgccgggccctgcaccgtcactacggggcccagcacatcaacctggaggggcccattcctgctcacctgctggggaacatgtgggcgcagacctggtccaacatctatgacttggtggtgcccttcccttcagccccctcgatggacaccacagaggctatgctaaagcagggctggacgcccaggaggatgtttaaggaggctgatgatttcttcacctccctggggctgctgcccgtgcctcctgagttctggaacaagtcgatgctggagaagccaaccgacgggcgggaggtggtctgccacgcctcggcctgggacttctacaacggcaaggacttccggatcaagcagtgcaccaccgtgaacttggaggacctggtggtggcccaccacgaaatgggccacatccagtatttcatgcagtacaaagacttacctgtggccttgagggagggtgccaaccccggcttccatgaggccattggggacgtgctagccctctcagtgtctacgcccaagcacctgcacagtctcaacctgctgagcagtgagggtggcagcgacgagcatgacatcaactttctgatgaagatggcccttgacaagatcgcctttatccccttcagctacctcgtcgatcagtggcgctggagggtatttgatggaagcatcaccaaggagaactataaccaggagtggtggagcctcaggctgaagtaccagggcctctgccccccagtgcccaggactcaaggtgactttgacccaggggccaagttccacattccttctagcgtgccttacatcaggtacttcgtcagcttcatcatccagttccagttccacgaggcactgtgccaggcagctggccacacgggccccctgcacaagtgtgacatctaccagtccaaggaggccgggcagcgcctggcgaccgccatgaagctgggcttcagtaggccgtggccggaagccatgcagctgatcacgggccagcccaacatgagcgcctcggccatgttgagctacttcaagccgctgctggactggctccgcacggagaacgagctgcatggggagaagctgggctggccgcagtacaactggacgccgaactccgctcgctcagaagggcccctcccagacagcggccgcgtcagcttcctgggcctggacctggatgcgcagcaggcccgcgtgggccagtggctgctgctcttcctgggcatcgccctgctggtagccaccctgggcctcagccagcggctcttcagcatccgccaccgcagcctccaccggcactcccacgggccccagttcggctccgaggtggagctgagacactcctgaggtgacccggctgggtcggccctgcccaagggcctcccaccagagactgggatgggaacactggtgggcagctgaggacacaccccacaccccagcccaccctgctcctcctgccctgtccctgtccccctcccctcccagtcctccagaccaccagccgccccagccccttctcccagcacacggctgcctgacactgagccccacctctccaagtctctctgtgaatacaattaaaggtcctgccctccccatctgagtctgtgtccctcacagggaagccagggacagggacaggctgctttcctgcctcctggcagtcaagtgggtcccgttactaggtttgttcctccatcctccttcaggagccggggaggatccccagagctctgccccagcacctcctggcgctggcgcctgtcttccctccagcccaggcagcccgccactgtcctgccaccgcaggcagcccctgtctggcccaagcactgacccacgcggactctgggaagcagacatcctgggctgctggcctcacatttccactggcagtggagcctttccctgctccacaaatggccaggtccccccaggggaaggcttccggctgttatcggctgcctcagggggcgagtaccttggagggcctgcttcaaggagggtgccccctggagggcacacaccagcctagtgcttaccttggctcctgcctgtaccagctccatgactctctgctcgggtgaacagccttggctctcagacagccattctaacactgccagtgcagaggggcctcagacgctggagtgtagcagtggctgcacctgcacagggattagctgccagcagccaccctgctggcgtcccagcacacacctcctcactccctgcattggagggagtgtcattttgagggacatttttatgacttttatgtgtatgtttatgtagaaatttggaaaatacagaaaactgtaaagaaaataaaagccctttatatcaacgtcaagagataa

SEQ ID NO: 47384 - DNA, 3453 bp, Homo sapiens
tcctcgctatgtcatcaaatatttattgagtgggccttctggctggcatggggcgacacaaatgccccctgccaccatcagagagatcccaggccccagggtcttattgccacagtttctgcagtccattggggggcggaagtggccaggggcatgtgggccggggtccaggagcagactccagcctgagtcccctgtgcccatggtacccactctgcccaccaggaaggtgctgcaggctggctcctccaggccctggcaggaggtgctgaaggacatggtcggcttagatgccctggatgcccagccgctgctcaagtacttccagccagtcacccagtggctgcaggagcagaaccagcagaacggcgaggtcctgggctggcccgagtaccagtggcacccgccgttgcctgacaactacccggagggcatagacctggtgactgatgaggctgaggccagcaagtttgtggaggaatatgaccggacatcccaggtggtgtggaacgagtatgccgaggccaactggaactacaacaccaacatcaccacagagaccagcaagattctgctgcagaagaacatgcaaatagccaaccacaccctgaagtacggcacccaggccaggaagtttgatgtgaaccagttgcagaacaccactatcaagcggatcataaagaaggttcaggacctagaacgggcagcgctgcctgcccaggagctggaggagtacaacaagatcctgttggatatggaaaccacctacagcgtggccactgtgtgccacccgaatggcagctgcctgcagctcgagccagatctgacgaatgtgatggccacatcccggaaatatgaagacctgttatgggcatgggagggctggcgagacaaggcggggagagccatcctccagttttacccgaaatacgtggaactcatcaaccaggctgcccggctcaatggctatgtagatgcaggggactcgtggaggtctatgtacgagacaccatccctggagcaagacctggagcggctcttccaggagctgcagccactctacctcaacctgcatgcctacgtgcgccgggccctgcaccgtcactacggggcccagcacatcaacctggaggggcccattcctgctcacctgctggggaacatgtgggcgcagacctggtccaacatctatgacttggtggtgcccttcccttcagccccctcgatggacaccacagaggctatgctaaagcagggctggacgcccaggaggatgtttaaggaggctgatgatttcttcacctccctggggctgctgcccgtgcctcctgagttctggaacaagtcgatgctggagaagccaaccgacgggcgggaggtggtctgccacgcctcggcctgggacttctacaacggcaaggacttccggatcaagcagtgcaccaccgtgaacttggaggacctggtggtggcccaccacgaaatgggccacatccagtatttcatgcagtacaaagacttacctgtggccttgagggagggtgccaaccccggcttccatgaggccattggggacgtgctagccctctcagtgtctacgcccaagcacctgcacagtctcaacctgctgagcagtgagggtggcagcgacgagcatgacatcaactttctgatgaagatggcccttgacaagatcgcctttatccccttcagctacctcgtcgatcagtggcgctggagggtatttgatggaagcatcaccaaggagaactataaccaggagtggtggagcctcaggctgaagtaccagggcctctgccccccagtgcccaggactcaaggtgactttgacccaggggccaagttccacattccttctagcgtgccttacatcaggtacttcgtcagcttcatcatccagttccagttccacgaggcactgtgccaggcagctggccacacgggccccctgcacaagtgtgacatctaccagtccaaggaggccgggcagcgcctggcgaccgccatgaagctgggcttcagtaggccgtggccggaagccatgcagctgatcacgggccagcccaacatgagcgcctcggccatgttgagctacttcaagccgctgctggactggctccgcacggagaacgagctgcatggggagaagctgggctggccgcagtacaactggacgccgaactccgctcgctcagaagggcccctcccagacagcggccgcgtcagcttcctgggcctggacctggatgcgcagcaggcccgcgtgggccagtggctgctgctcttcctgggcatcgccctgctggtagccaccctgggcctcagccagcggctcttcagcatccgccaccgcagcctccaccggcactcccacgggccccagttcggctccgaggtggagctgagacactcctgaggtgacccggctgggtcggccctgcccaagggcctcccaccagagactgggatgggaacactggtgggcagctgaggacacaccccacaccccagcccaccctgctcctcctgccctgtccctgtccccctcccctcccagtcctccagaccaccagccgccccagccccttctcccagcacacggctgcctgacactgagccccacctctccaagtctctctgtgaatacaattaaaggtcctgccctccccatctgagtctgtgtccctcacagggaagccagggacagggacaggctgctttcctgcctcctggcagtcaagtgggtcccgttactaggtttgttcctccatcctccttcaggagccggggaggatccccagagctctgccccagcacctcctggcgctggcgcctgtcttccctccagcccaggcagcccgccactgtcctgccaccgcaggcagcccctgtctggcccaagcactgacccacgcggactctgggaagcagacatcctgggctgctggcctcacatttccactggcagtggagcctttccctgctccacaaatggccaggtccccccaggggaaggcttccggctgttatcggctgcctcagggggcgagtaccttggagggcctgcttcaaggagggtgccccctggagggcacacaccagcctagtgcttaccttggctcctgcctgtaccagctccatgactctctgctcgggtgaacagccttggctctcagacagccattctaacactgccagtgcagaggggcctcagacgctggagtgtagcagtggctgcacctgcacagggattagctgccagcagccaccctgctggcgtcccagcacacacctcctcactccctgcattggagggagtgtcattttgagggacatttttatgacttttatgtgtatgtttatgtagaaatttggaaaatacagaaaactgtaaagaaaataaaagccctttatatcaacgtcaagagataa

SEQ ID NO: 47385 - DNA, 2904 bp, Homo sapiens
  misc_feature (40)..(40): n is a, c, g, or t
cttcctcgttgtatcaagtcatggcatctgccatgcgatngtgcacctcagaactgctgagagggcagcgctccccagctccctggctccccacctgccagcccatggggcttgggggtagtgcaggccccagagagaccaagtgcaaaggagtacagctcattgcctctccttcctcctgcagtacaacaagatcctgttggatatggaaaccacctacagcgtggccactgtgtgccacccgaatggcagctgcctgcagctcgagccagatctgacgaatgtgatggccacatcccggaaatatgaagacctgttatgggcatgggagggctggcgagacaaggcggggagagccatcctccagttttacccgaaatacgtggaactcatcaaccaggctgcccggctcaatggctatgtagatgcaggggactcgtggaggtctatgtacgagacaccatccctggagcaagacctggagcggctcttccaggagctgcagccactctacctcaacctgcatgcctacgtgcgccgggccctgcaccgtcactacggggcccagcacatcaacctggaggggcccattcctgctcacctgctggggaacatgtgggcgcagacctggtccaacatctatgacttggtggtgcccttcccttcagccccctcgatggacaccacagaggctatgctaaagcagggctggacgcccaggaggatgtttaaggaggctgatgatttcttcacctccctggggctgctgcccgtgcctcctgagttctggaacaagtcgatgctggagaagccaaccgacgggcgggaggtggtctgccacgcctcggcctgggacttctacaacggcaaggacttccggatcaagcagtgcaccaccgtgaacttggaggacctggtggtggcccaccacgaaatgggccacatccagtatttcatgcagtacaaagacttacctgtggccttgagggagggtgccaaccccggcttccatgaggccattggggacgtgctagccctctcagtgtctacgcccaagcacctgcacagtctcaacctgctgagcagtgagggtggcagcgacgagcatgacatcaactttctgatgaagatggcccttgacaagatcgcctttatccccttcagctacctcgtcgatcagtggcgctggagggtatttgatggaagcatcaccaaggagaactataaccaggagtggtggagcctcaggctgaagtaccagggcctctgccccccagtgcccaggactcaaggtgactttgacccaggggccaagttccacattccttctagcgtgccttacatcaggtacttcgtcagcttcatcatccagttccagttccacgaggcactgtgccaggcagctggccacacgggccccctgcacaagtgtgacatctaccagtccaaggaggccgggcagcgcctggcgaccgccatgaagctgggcttcagtaggccgtggccggaagccatgcagctgatcacgggccagcccaacatgagcgcctcggccatgttgagctacttcaagccgctgctggactggctccgcacggagaacgagctgcatggggagaagctgggctggccgcagtacaactggacgccgaactccgctcgctcagaagggcccctcccagacagcggccgcgtcagcttcctgggcctggacctggatgcgcagcaggcccgcgtgggccagtggctgctgctcttcctgggcatcgccctgctggtagccaccctgggcctcagccagcggctcttcagcatccgccaccgcagcctccaccggcactcccacgggccccagttcggctccgaggtggagctgagacactcctgaggtgacccggctgggtcggccctgcccaagggcctcccaccagagactgggatgggaacactggtgggcagctgaggacacaccccacaccccagcccaccctgctcctcctgccctgtccctgtccccctcccctcccagtcctccagaccaccagccgccccagccccttctcccagcacacggctgcctgacactgagccccacctctccaagtctctctgtgaatacaattaaaggtcctgccctccccatctgagtctgtgtccctcacagggaagccagggacagggacaggctgctttcctgcctcctggcagtcaagtgggtcccgttactaggtttgttcctccatcctccttcaggagccggggaggatccccagagctctgccccagcacctcctggcgctggcgcctgtcttccctccagcccaggcagcccgccactgtcctgccaccgcaggcagcccctgtctggcccaagcactgacccacgcggactctgggaagcagacatcctgggctgctggcctcacatttccactggcagtggagcctttccctgctccacaaatggccaggtccccccaggggaaggcttccggctgttatcggctgcctcagggggcgagtaccttggagggcctgcttcaaggagggtgccccctggagggcacacaccagcctagtgcttaccttggctcctgcctgtaccagctccatgactctctgctcgggtgaacagccttggctctcagacagccattctaacactgccagtgcagaggggcctcagacgctggagtgtagcagtggctgcacctgcacagggattagctgccagcagccaccctgctggcgtcccagcacacacctcctcactccctgcattggagggagtgtcattttgagggacatttttatgacttttatgtgtatgtttatgtagaaatttggaaaatacagaaaactgtaaagaaaataaaagccctttatatcaacgtcaagagataa

SEQ ID NO: 47386 - DNA, 3415 bp, Homo sapiens
ttcggattggccagggacggtagctgcaggactctgctctcctgcggccatgggccagggttgggctactgcaggacttcccagcctcctcttcctgctgctctgctacgggcaccctctgctggtccctagccaggaggcatcccaacaggtgacagtcacccatgggacaagcagccaggcaacaaccagcagccagacaaccacccaccaggcgacggcccaccagacatcagcccagagcccaaacctggtgactgatgaggctgaggccagcaagtttgtggaggaatatgaccggacatcccaggtggtgtggaacgagtatgccgaggccaactggaactacaacaccaacatcaccacagagaccagcaagattctgctgcagaagaacatgcaaatagccaaccacaccctgaagtacggcacccaggccaggaagtttgatgtgaaccagttgcagaacaccactatcaagcggatcataaagaaggttcaggacctagaacgggcagcgctgcctgcccaggagctggaggagtacaacaagatcctgttggatatggaaaccacctacagcgtggccactgtgtgccacccgaatggcagctgcctgcagctcgagccagatctgacgaatgtgatggccacatcccggaaatatgaagacctgttatgggcatgggagggctggcgagacaaggcggggagagccatcctccagttttacccgaaatacgtggaactcatcaaccaggctgcccggctcaatggctatgtagatgcaggggactcgtggaggtctatgtacgagacaccatccctggagcaagacctggagcggctcttccaggagctgcagccactctacctcaacctgcatgcctacgtgcgccgggccctgcaccgtcactacggggcccagcacatcaacctggaggggcccattcctgctcacctgctggggaacatgtgggcgcagacctggtccaacatctatgacttggtggtgcccttcccttcagccccctcgatggacaccacagaggctatgctaaagcagggctggacgcccaggaggatgtttaaggaggctgatgatttcttcacctccctggggctgctgcccgtgcctcctgagttctggaacaagtcgatgctggagaagccaaccgacgggcgggaggtggtctgccacgcctcggcctgggacttctacaacggcaaggacttccggatcaagcagtgcaccaccgtgaacttggaggacctggtggtggcccaccacgaaatgggccacatccagtatttcatgcagtacaaagacttacctgtggccttgagggagggtgccaaccccggcttccatgaggccattggggacgtgctagccctctcagtgtctacgcccaagcacctgcacagtctcaacctgctgagcagtgagggtggcagcgacgagcatgacatcaactttctgatgaagatggcccttgacaagatcgcctttatccccttcagctacctcgtcgatcagtggcgctggagggtatttgatggaagcatcaccaaggagaactataaccaggagtggtggagcctcaggctgaagtaccagggcctctgccccccagtgcccaggactcaaggtgactttgacccaggggccaagttccacattccttctagcgtgccttacatcaggtacttcgtcagcttcatcatccagttccagttccacgaggcactgtgccaggcagctggccacacgggccccctgcacaagtgtgacatctaccagtccaaggaggccgggcagcgcctggcgaccgccatgaagctgggcttcagtaggccgtggccggaagccatgcagctgatcacgggccagcccaacatgagcgcctcggccatgttgagctacttcaagccgctgctggactggctccgcacggagaacgagctgcatggggagaagctgggctggccgcagtacaactggacgccgaactccggtaccgccacccaccccacctccagccttgggtcttaaccccctccccaggctgggcagccatgcggctgacctcggagcctggccctgccccgcacccttgccctgccctgccctgccctgcccatgctgtctccttgcttcccactcagctcgctcagaagggcccctcccagacagcggccgcgtcagcttcctgggcctggacctggatgcgcagcaggcccgcgtgggccagtggctgctgctcttcctgggcatcgccctgctggtagccaccctgggcctcagccagcggctcttcagcatccgccaccgcagcctccaccggcactcccacgggccccagttcggctccgaggtggagctgagacactcctgaggtgacccggctgggtcggccctgcccaagggcctcccaccagagactgggatgggaacactggtgggcagctgaggacacaccccacaccccagcccaccctgctcctcctgccctgtccctgtccccctcccctcccagtcctccagaccaccagccgccccagccccttctcccagcacacggctgcctgacactgagccccacctctccaagtctctctgtgaatacaattaaaggtcctgccctccccatctgagtctgtgtccctcacagggaagccagggacagggacaggctgctttcctgcctcctggcagtcaagtgggtcccgttactaggtttgttcctccatcctccttcaggagccggggaggatccccagagctctgccccagcacctcctggcgctggcgcctgtcttccctccagcccaggcagcccgccactgtcctgccaccgcaggcagcccctgtctggcccaagcactgacccacgcggactctgggaagcagacatcctgggctgctggcctcacatttccactggcagtggagcctttccctgctccacaaatggccaggtccccccaggggaaggcttccggctgttatcggctgcctcagggggcgagtaccttggagggcctgcttcaaggagggtgccccctggagggcacacaccagcctagtgcttaccttggctcctgcctgtaccagctccatgactctctgctcgggtgaacagccttggctctcagacagccattctaacactgccagtgcagaggggcctcagacgctggagtgtagcagtggctgcacctgcacagggattagctgccagcagccaccctgctggcgtcccagcacacacctcctcactccctgcattggagggagtgtcattttgagggacatttttatgacttttatgtgtatgtttatgtagaaatttggaaaatacagaaaactgtaaagaaaataaaagccctttatatcaacgtcaagagataa

SEQ ID NO: 47387 - DNA, 1948 bp, Homo sapiens
  misc_feature (66)..(66): n is a, c, g, or t
ggtgagaccaaagaacatctggtgatgtcacagtggacgtcagttcaccaactgggagacacaggnccccgggaagaaaagcaacatgcccagcgtggcctgggagctggggcagagctggccttagaactcagcccctgacaattgagcatgacatcaactttctgatgaagatggcccttgacaagatcgcctttatccccttcagctacctcgtcgatcagtggcgctggagggtatttgatggaagcatcaccaaggagaactataaccaggagtggtggagcctcaggctgaagtaccagggcctctgccccccagtgcccaggactcaaggtgactttgacccaggggccaagttccacattccttctagcgtgccttacatcaggtacttcgtcagcttcatcatccagttccagttccacgaggcactgtgccaggcagctggccacacgggccccctgcacaagtgtgacatctaccagtccaaggaggccgggcagcgcctggcgaccgccatgaagctgggcttcagtaggccgtggccggaagccatgcagctgatcacgggccagcccaacatgagcgcctcggccatgttgagctacttcaagccgctgctggactggctccgcacggagaacgagctgcatggggagaagctgggctggccgcagtacaactggacgccgaactccgctcgctcagaagggcccctcccagacagcggccgcgtcagcttcctgggcctggacctggatgcgcagcaggcccgcgtgggccagtggctgctgctcttcctgggcatcgccctgctggtagccaccctgggcctcagccagcggctcttcagcatccgccaccgcagcctccaccggcactcccacgggccccagttcggctccgaggtggagctgagacactcctgaggtgacccggctgggtcggccctgcccaagggcctcccaccagagactgggatgggaacactggtgggcagctgaggacacaccccacaccccagcccaccctgctcctcctgccctgtccctgtccccctcccctcccagtcctccagaccaccagccgccccagccccttctcccagcacacggctgcctgacactgagccccacctctccaagtctctctgtgaatacaattaaaggtcctgccctccccatctgagtctgtgtccctcacagggaagccagggacagggacaggctgctttcctgcctcctggcagtcaagtgggtcccgttactaggtttgttcctccatcctccttcaggagccggggaggatccccagagctctgccccagcacctcctggcgctggcgcctgtcttccctccagcccaggcagcccgccactgtcctgccaccgcaggcagcccctgtctggcccaagcactgacccacgcggactctgggaagcagacatcctgggctgctggcctcacatttccactggcagtggagcctttccctgctccacaaatggccaggtccccccaggggaaggcttccggctgttatcggctgcctcagggggcgagtaccttggagggcctgcttcaaggagggtgccccctggagggcacacaccagcctagtgcttaccttggctcctgcctgtaccagctccatgactctctgctcgggtgaacagccttggctctcagacagccattctaacactgccagtgcagaggggcctcagacgctggagtgtagcagtggctgcacctgcacagggattagctgccagcagccaccctgctggcgtcccagcacacacctcctcactccctgcattggagggagtgtcattttgagggacatttttatgacttttatgtgtatgtttatgtagaaatttggaaaatacagaaaactgtaaagaaaataaaagccctttatatcaacgtcaagagataa

SEQ ID NO: 47388 - DNA, 2352 bp, Homo sapiens
gccgagcaccgcgcaccgcgtcatgggggccgcctcgggccgccgggggccggggctgctgctgccgctgccgctgctgttgctgctgccgccgcagcccgccctggcgttggaccccgggctgcagcccggcaacttttctgctgacgaggccggggcgcagctcttcgcgcagagctacaactccagcgccgaacaggtgctgttccagagcgtggccgccagctgggcgcacgacaccaacatcaccgcggagaatgcaaggcgccaggaggaagcagccctgctcagccaggagtttgcggaggcctggggccagaaggccaaggagctgtatgaaccgatctggcagaacttcacggacccgcagctgcgcaggatcatcggagctgtgcgcaccctgggctctgccaacctgcccctggctaagcggcagcagtacaacgccctgctaagcaacatgagcaggatctactccaccgccaaggtctgcctccccaacaagactgccacctgctggtccctggacccagatctcaccaacatcctggcttcctcgcgaagctacgccatgctcctgtttgcctgggagggctggcacaacgctgcgggcatcccgctgaaaccgctgtacgaggatttcactgccctcagcaatgaagcctacaagcaggacggcttcacagacacgggggcctactggcgctcctggtacaactcccccaccttcgaggacgatctggaacacctctaccaacagctagagcccctctacctgaacctccatgccttcgtccgccgcgcactgcatcgccgatacggagacagatacatcaacctcaggggacccatccctgctcatctgctgggagacatgtgggcccagagctgggaaaacatctacgacatggtggtgcctttcccagacaagcccaacctcgatgtcaccagtactatgctgcagcagggctggaacgccacgcacatgttccgggtggcagaggagttcttcacctccctggagctctcccccatgcctcccgagttctgggaagggtcgatgctggagaagccggccgacgggcgggaagtggtgtgccacgcctcggcttgggacttctacaacaggaaagacttcaggatcaagcagtgcacacgggtcacgatggaccagctctccacagtgcaccatgagatgggccatatacagtactacctgcagtacaaggatctgcccgtctccctgcgtcggggggccaaccccggcttccatgaggccattggggacgtgctggcgctctcggtctccactcctgaacatctgcacaaaatcggcctgctggaccgtgtcaccaatgacacggaaagtgacatcaattacttgctaaaaatggcactggaaaaaattgccttcctgccctttggctacttggtggaccagtggcgctggggggtctttagtgggcgtacccccccttcccgctacaacttcgactggtggtatcttcgaaccaagtatcaggggatctgtcctcctgttacccgaaacgaaacccactttgatgctggagctaagtttcatgttccaaatgtgacaccatacatcaggtactttgtgagttttgtcctgcagttccagttccatgaagccctgtgcaaggaggcaggctatgagggcccactgcaccagtgtgacatctaccggtccaccaaggcaggggccaagctccggaaggtgctgcaggctggctcctccaggccctggcaggaggtgctgaaggacatggtcggcttagatgccctggatgcccagccgctgctcaagtacttccagccagtcacccagtggctgcaggagcagaaccagcagaacggcgaggtcctgggctggcccgagtaccagtggcacccgccgttgcctgacaactacccggagggcatagacctggtgactgatgaggctgaggccagcaagtttgtggaggaatatgaccggacatcccaggtggtgtggaacgagtatgccgaggccaactggaactacaacaccaacatcaccacagagaccagcaagattctggtgggagccacctccccacccccaaacctgagcatgtgcacacacacagagatgctgtcccgctcaccacacagtggggctgccaccacattttaaattgaatatttaaaacaatactcaatttcgggccgggcgcggtggctcacgcctgtaatcccagcactttgggagggggaggcgggcggatcacgaggtcagatcaagaccatcctggctaacacggtgaaaccccatctctagtaaaaatacaaaaattagccgggtgtggtggc

SEQ ID NO: 47389 - DNA, 2825 bp, Homo sapiens
gactggaagaattaactaaaaatacaaaattagccgagtagctgggactacaggcatgcgccaccacgcctgactaatttttgtatttttagtagagatgggatttcattatgttggccagctggtcttgaacttctgagctcaggtgatccacccgccttagcctcccagagtgctaggataacaggcatgagccgccgcgcctggccaaaatagcataatgttttaagaaagtttacgaatttgtcttgggccacattcaaaaccatcatgggccaagggttggacaagctagccttaggtcatgtccagaatgcaatttaacaggaatttcaagcaaaactaacaaaaaattaaatccacaaaaaaatatcatttggtaaatgcactgtctcacacactttactactaagtcccattcaaaccatgacgaccctttacataaaattagggcattctcaccaagtttctaaagatgatttctaaacattaccaaggtctaagtgctaattccccacaaaccatttcttatcttgtttaaatgagactggctttagatatcatgactcatatttatgtgtttaaggaattaaacgtgaaggagatgtataaggcaaccacaaatgtagaaaacaaatgtatgtattagtaatattctcccatgtattaactagaacaagaatgtgagatttttacatttcttctagtgtgccttagcaaatctgctggaaagagtctagttgttttgagaattgaaaaaaaaatgtgtctctcaatttgtcaattctaagcctgtaaaggcagaaactatccacagtaatgagtttggtagtgcctggagagaggcaaatgatcattggatgtaacaaaagctacaagagaatagactaaaaaaagaatttcaatatgaaaaagtaaaatctagagagatgacaaatcagcattgggtaccaagcctcaaaatacttgaactagaagccatctcttaaagttaaaagtaagaagctccaggaaaaataaagattgcatagtaaaaagggatagatggcaggattaattcaactcaacaaatatttatcaaatgtctactctggtcaggtgctgtgttagcagccagcttccctaaagggaggaaaggctagacacgaggacattgaggattgtttatttaaagtcactcataggcatgccataatggatttattaaggggaaattggggtttctgtgaatctttacaggacatagccatggagacaatcactatgttaagtaagttgctgttttcccaattgggcttcagtttcctgagacaaaaaagtgaggaagttggattaattgtttcttcaagtcctttccagctctaaagttgtgggttattttacaaaatatccattggtgccacctttcagtgactcttcctatgtttataagaaccaagaaatttaaattttgaagattggaaaaatcacctggtccatctttttccttttcacatctctctctttttttttttttttttttatcatttccccagacaacagaaacagacaaccttccaaatcctctatattgcagttgccttccacacacaggatttaaaaagggggatcaaagagggtggtgaagatcaggtggaatgcttctttggaagttccactggcatcatctatcagaacaatggtgtgagcatgaagaggcacagacaggtctccaaaatagatgttaggatttgggtgctacctgacacagaagtaggtctaaccctccaagtactggggatgataggataatcaatgaggtatatatatatttgtcattttgtataaaatattgtgaaaattgaaggaggacactcagtaaacatcctgggactatttgtaagttatggcaaaaccagatgagagaaaagggacagtcccctctgtatcctcgttgtctcttagtaacatcaaattgtagttaaaaaaattttaaactatgtacaagctacaaaatagcatctctttcatggtatgtttgagtgtgtaattttagtttcttttctggttgtatttgtggtagtcagatgtgttggattgattccaactggacagagtaaggaattccagcatcctcttcctgcttgctcgtgttaccccacagatcaaaccctcaattctagttggggatgctgtctagccccacaccatgactgaagccttaagcactgttgcgcctccatgtgctttggatcagcaaccccagtggtattctaccagagcattgtgggaaagcagatgtatagtcaggtcccaacagcaaattgttgggtgtgagagttctaaagtataggggtgagggaagagaaggatatgaactcctctgaccttaagccagcattcatttaacttttatgtctacttaacaagagaacctggagaaaactaccgtattcaagagattaatcaaaatcagtgttttagccaggcgatgacagagaagcaccattcctcaccctccattcttgtaatgtctgtaataaatttcagtgcgtcaggatggatgaacccaagatccagtgaatgattcagctgttccaagccttacattttccatcattcatcatccattctcattcagtgtaacctcttgcactattgtggttaattttatgtaaaaccagtttatgtttttttttttttaatatgtgcctatgtaataaagtctacacactggctatctctgtagaggtgaggttttgtttttagttgttctactgattatatccttttctgagctatgaaaatgaattattaataaaaaatttttgaacaaaaaaacacta

SEQ ID NO: 47390 - DNA, 2717 bp, Homo sapiens
gactggaagaattaactaaaaatacaaaattagccgagtagctgggactacaggcatgcgccaccacgcctgactaatttttgtatttttagtagagatgggatttcattatgttggccagctggtcttgaacttctgagctcaggtgatccacccgccttagcctcccagagtgctaggataacaggcatgagccgccgcgcctggccaaaatagcataatgttttaagaaagtttacgaatttgtcttgggccacattcaaaaccatcatgggccaagggttggacaagctagccttaggtcatgtccagaatgcaatttaacaggaatttcaagcaaaactaacaaaaaattaaatccacaaaaaaatatcatttggtaaatgcactgtctcacacactttactactaagtcccattcaaaccatgacgaccctttacataaaattagggcattctcaccaagtttctaaagatgatttctaaacattaccaaggtctaagtgctaattccccacaaaccatttcttatcttgtttaaatgagactggctttagatatcatgactcatatttatgtgtttaaggaattaaacgtgaaggagatgtataaggcaaccacaaatgtagaaaacaaatgtatgtattagtaatattctcccatgtattaactagaacaagaatgtgagatttttacatttcttctagtgtgccttagcaaatctgctggaaagagtctagttgttttgagaattgaaaaaaaaatgtgtctctcaatttgtcaattctaagcctgtaaaggcagaaactatccacagtaatgagtttggtagtgcctggagagaggcaaatgatcattggatgtaacaaaagctacaagagaatagactaaaaaaagaatttcaatatgaaaaagtaaaatctagagagatgacaaatcagcattgggtaccaagcctcaaaatacttgaactagaagccatctcttaaagttaaaagtaagaagctccaggaaaaataaagattgcatagtaaaaagggatagatggcaggattaattcaactcaacaaatatttatcaaatgtctactctggtcaggtgctgtgttagcagccagcttccctaaagggaggaaaggctagacacgaggacattgaggattgtttatttaaagtcactcataggcatgccataatggatttattaaggggaaattggggtttctgtgaatctttacaggacatagccatggagacaatcactatgttaagtaagttgctgttttcccaattgggcttcagtttcctgagacaaaaaagtgaggaagttggattaattgtttcttcaagtcctttccagctctaaagttgtgggttattttacaaaatatccattggtgccacctttcagtgactcttcctatgtttataagaaccaagaaatttaaattttgaagattggaaaaatcacctggtccatctttttccttttcacatctctctctttttttttttttttttttatcatttccccagacaacagaaacagacaaccttccaaatcctctatattgcagttgccttccacacacaggatttaaaaagggggatcaaagagggtggtgaagatcaggtggaatgcttctttggaagttccactggcatcatctatcagaacaatggtgtgagcatgaagaggcacagacaggtctccaaaatagatgttaggatttgggtgctacctgacacagaagtaggtctaaccctccaagtactggggatgataggataatcaatgaggtatatatatatttgtcattttgtataaaatattgtgaaaattgaaggaggacactcagtaaacatcctgggactatttgtaagttatggcaaaaccagatgagagaaaagggacagtcccctctgtatcctcgttgtctcttagtaacatcaaattgtagttaaaaaaattttaaactatgtacaagctacaaaatagcatctctttcatggtatgtttgagtgtgtaattttagtttcttttctggttgtatttgtggtagtcagatgtgttggattgattccaactggacagagtaaggaattccagcatcctcttcctgcttgctcgtgttaccccacagatcaaaccctcaattctagttggggatgctgtctagccccacaccatgactgaagccttaagcactgttgcgcctccatgtgctttggatcagcaaccccagtggtattctaccagagcattgtgggaaagcagatgtatagtcaggtcccaacagcaaattgttgggtgtgagagttctaaagtataggggtgagggaagagaaggatatgaactcctctgaccttaagccagcattcatttaacttttatgtctacttaacaagagaacctggagaaaactaccgtattcaagagattaatcaaaatcagtgttttagccaggcgatgacagagaagcaccattcctcaccctccattcttgtaatgtctgtaataaatttcagtgcgtcaggatggatgaacccaagatccagtgaatgattcagctgttccaagccttacattttccatcattcatcatccattctcattcagtgtaacctcttgcactattgtggttaattttatgtaaaaccagtttatgtttttttttttttaatatgtgcctatgtaataaagtctacacactggc

SEQ ID NO: 47391 - DNA, 998 bp, Homo sapiens
  misc_feature (998)..(998): n is a, c, g, or t
gactggaagaattaactaaaaatacaaaattagccgagtagctgggactacaggcatgcgccaccacgcctgactaatttttgtatttttagtagagatgggatttcattatgttggccagctggtcttgaacttctgagctcaggtgatccacccgccttagcctcccagagtgctaggataacaggcatgagccgccgcgcctggccaaaatagcataatgttttaagaaagtttacgaatttgtcttgggccacattcaaaaccatcatgggccaagggttggacaagctagccttaggtcatgtccagaatgcaatttaacaggaatttcaagcaaaactaacaaaaaattaaatccacaaaaaaatatcatttggtaaatgcactgtctcacacactttactactaagtcccattcaaaccatgacgaccctttacataaaattagggcattctcaccaagtttctaaagatgatttctaaacattaccaaggtctaagtgctaattccccacaaaccatttcttatcttgtttaaatgagactggctttagatatcatgactcatatttatgtgtttaaggaattaaacgtgaaggagatgtataaggcaaccacaaatgtagaaaacaaatgtatgtattagtaatattctcccatgtattaactagaacaagaatgtgagatttttacatttcttctagtgtgccttagcaaatctgctggaaagagtctagttgttttgagaattgaaaaaaaaatgtgtctctcaatttgtcaattctaagcctgtaaaggcagaaactatccacagtaatgagtttggtagtgcctggagagaggcaaatgatcattggatgtaacaaaagctacaagagaatagactaaaaaaagattcaggcaaataacaaaaaataaatcacaaaatatcattgggaatgccctgttcacacatttactactagttccatcaaacaggagacctttagttactn

SEQ ID NO: 47392 - DNA, 1406 bp, Homo sapiens
cgcgttacagtcacttccggggcggatcggaagttgctttgttttgcttcgagatggctgcggggatgtatttggaacattatctggacagtattgaaaaccttccctttgaattacagagaaactttcagctcatgagggacctagaccaaagaacagaggacctgaaggctgaaattgacaagttggccactgagtatatgagtagtgcccgcagcctgagctccgaggaaaaattggcccttctcaaacagatccaggaagcctatggcaagtgcaaggaatttggtgacgacaaggtgcagcttgccatgcagacctatgagatggtggacaaacacattcggcggctggacacagacctggcccgttttgaggctgatctcaaggagaaacagattgagtcaagtgactatgacagctcttccagcaaaggcaaaaagaaggccggactcaaaaggagaagaaagctgctcgtgctcgttccaaagggaaaaactcggatgaagaagcccccaagactgcccagaagaagttaaagctcgtgcgcacaagtcctgagtatgggatgccctcagtgacctttggcagtgtccacccctctgatgtgttggatatgcctgtggatcccaacgaacccacctattgcctttgtcaccaggtctcctatggagagatgattggctgtgacaaccctgattgttccattgagtggttccattttgcctgtgtggggctgacaaccaagcctcgggggaaatggttttgcccacgctgctcccaagaacggaagaagaaatagataagggccttggattccaacacagtttcttccacatcccctgacttgggctagtgggcagaggaatgcctgtgctggggccaggggttcagggaggagtggatggcacagtgctgtcatcccttctcctcccctctccccactcccggtgctgaggctgcatcagaccctggtagggaggggtgccgcagccactaacggtatgtgctctccttcagccctctcccttcggagggacgtggtcttgcccactgtccttttgcctccatgctgaggtcggtgctgtatttcagagggagggtccttttcattctccttgctttgtatttaaggactggggcatagcatgggggcagtcccccagacctcttcattccccctcctgtggtgagggctaggtgtgatcaacacttttcttctccattcccttcctgcttttttcatggtgggggatccaccaggtcatctaggctctggccctagttgaaggggcaccccttcctctgtgccaagaggattcatcctgggagagggggcaaggtggaatgcagataactcacatgtaaaaggaacttgggtaggtaaataaaagctatacatgttg

SEQ ID NO: 47393 - DNA, 432 bp, Homo sapiens
cagtgcgattgtgatccacgtgcattgtgatccacgtgcattgtgatccacgtgcattgtgatccagtagcattgtgaccaggcctctgtctctgttgtagacctgaaggctgaaattgacaagttggccactgagtatatgagtagtgcccgcagcctgagctccgaggaaaaattggcccttctcaaacagatccaggaagcctatggcaagtgcaaggaatttggtgacgacaaggtgcagcttgccatgcagacctatgagatggtatggccctgttcatggctccccacctacttcccatctaatcctcagggtcttagacccctccttcaactgtgttgggatctgtttggggtctgtgagatccataaactctgccttaacctattttctttaattggagatagttttgtacctctcctttctcc

SEQ ID NO: 47394 - DNA, 238 bp, Homo sapiens
atgaagagattacatgatttaaaaaataatacgacaaaatagaagaaagtaagacaaaagccaagggagaaacagaattaggaaaaaaaaaaaactcccctctccccactcccggtgctgaggctgcatcagaccctctgtgccaagaggattcatcctgggagagggggcaaggtggaatgcagataactcacatgtaaaaggaacttgggtaggtaaataaaagctatacatgttg

SEQ ID NO: 47395 - DNA, 1682 bp, Homo sapiens
cgcgttacagtcacttccggggcggatcggaagttgctttgttttgcttcgagatggctgcggggatgtatttggaacattatctggacagtattgaaaaccttccctttgaattacagagaaactttcagctcatgagggacctagaccaaagaacagaggaagcattagataccatctccagcctggaacattgagcaaatttggctgcattggggcattcacttggtttcttcaaagatgtctgttggagctattcccatacccactgaaggatctgtagtcttgtcttcattctatgtagccatgttcaaggatgtaacagactggttttgagatacatgaagctgtgtcttaagttactctgagtttacacatgaaaaggtgaacatcatcaaaaaccctggacatagttccctgagaactgcctgccgaatgacctgaaggctgaaattgacaagttggccactgagtatatgagtagtgcccgcagcctgagctccgaggaaaaattggcccttctcaaacagatccaggaagcctatggcaagtgcaaggaatttggtgacgacaaggtgcagcttgccatgcagacctatgagatggtggacaaacacattcggcggctggacacagacctggcccgttttgaggctgatctcaaggagaaacagattgagtcaagtgactatgacagctcttccagcaaaggcaaaaagaaggccggactcaaaaggagaagaaagctgctcgtgctcgttccaaagggaaaaactcggatgaagaagcccccaagactgcccagaagaagttaaagctcgtgcgcacaagtcctgagtatgggatgccctcagtgacctttggcagtgtccacccctctgatgtgttggatatgcctgtggatcccaacgaacccacctattgcctttgtcaccaggtctcctatggagagatgattggctgtgacaaccctgattgttccattgagtggttccattttgcctgtgtggggctgacaaccaagcctcgggggaaatggttttgcccacgctgctcccaagaacggaagaagaaatagataagggccttggattccaacacagtttcttccacatcccctgacttgggctagtgggcagaggaatgcctgtgctggggccaggggttcagggaggagtggatggcacagtgctgtcatcccttctcctcccctctccccactcccggtgctgaggctgcatcagaccctggtagggaggggtgccgcagccactaacggtatgtgctctccttcagccctctcccttcggagggacgtggtcttgcccactgtccttttgcctccatgctgaggtcggtgctgtatttcagagggagggtccttttcattctccttgctttgtatttaaggactggggcatagcatgggggcagtcccccagacctcttcattccccctcctgtggtgagggctaggtgtgatcaacacttttcttctccattcccttcctgcttttttcatggtgggggatccaccaggtcatctaggctctggccctagttgaaggggcaccccttcctctgtgccaagaggattcatcctgggagagggggcaaggtggaatgcagataactcacatgtaaaaggaacttgggtaggtaaataaaagctatacatgttg

SEQ ID NO: 47396 - DNA, 1334 bp, Homo sapiens
cgcgttacagtcacttccggggcggatcggaagttgctttgttttgcttcgagatggctgcggggatgtatttggaacattatctggacaacctgaaggctgaaattgacaagttggccactgagtatatgagtagtgcccgcagcctgagctccgaggaaaaattggcccttctcaaacagatccaggaagcctatggcaagtgcaaggaatttggtgacgacaaggtgcagcttgccatgcagacctatgagatggtggacaaacacattcggcggctggacacagacctggcccgttttgaggctgatctcaaggagaaacagattgagtcaagtgactatgacagctcttccagcaaaggcaaaaagaaggccggactcaaaaggagaagaaagctgctcgtgctcgttccaaagggaaaaactcggatgaagaagcccccaagactgcccagaagaagttaaagctcgtgcgcacaagtcctgagtatgggatgccctcagtgacctttggcagtgtccacccctctgatgtgttggatatgcctgtggatcccaacgaacccacctattgcctttgtcaccaggtctcctatggagagatgattggctgtgacaaccctgattgttccattgagtggttccattttgcctgtgtggggctgacaaccaagcctcgggggaaatggttttgcccacgctgctcccaagaacggaagaagaaatagataagggccttggattccaacacagtttcttccacatcccctgacttgggctagtgggcagaggaatgcctgtgctggggccaggggttcagggaggagtggatggcacagtgctgtcatcccttctcctcccctctccccactcccggtgctgaggctgcatcagaccctggtagggaggggtgccgcagccactaacggtatgtgctctccttcagccctctcccttcggagggacgtggtcttgcccactgtccttttgcctccatgctgaggtcggtgctgtatttcagagggagggtccttttcattctccttgctttgtatttaaggactggggcatagcatgggggcagtcccccagacctcttcattccccctcctgtggtgagggctaggtgtgatcaacacttttcttctccattcccttcctgcttttttcatggtgggggatccaccaggtcatctaggctctggccctagttgaaggggcaccccttcctctgtgccaagaggattcatcctgggagagggggcaaggtggaatgcagataactcacatgtaaaaggaacttgggtaggtaaataaaagctatacatgttg

SEQ ID NO: 47397 - DNA, 2071 bp, Homo sapiens
  misc_feature (27)..(27): n is a, c, g, or t
aattcgcggccgcgtcgaccgcggcgnttcggacctgcgagaagacgacagaggttgaggccaggagtttgagatcagcctggccacatggtgaaaccccatctctactaaaaatacaaaaactagccaggtgtggtggcacgcaccagtaatcccagctacttgggaggctgagacgtgagaatcgtttgaacctgggaggtggaggttgtagtgagcccaaatcatgccacatgtcactgcactccagcctaggcaacagagcaagactctgtctcaaaaaaaaaaaaaaagaagaattaaagaaagtcaactcgagtcatttctgctctccacgtttgatatatttataggatgactagaatgtttctacttctctcattgttaatgttactgtcacaaattcccagtgtgactttagactgcaacatatgttggtagatgggaggtttgctatatgagaagtccttaaaaagagaaagaaaaaagaaagaggaaagaaaaaaaagcagtaattgacaatgggatctctataccgttcacacttacagaagcattagataccatctccagcctggaacattgagcaaatttggctgcattggggcattcacttggtttcttcaaagatgtctgttggagctattcccatacccactgaaggatctgtagtcttgtcttcattctatgtagccatgttcaaggatgtaacagactggttttgagatacatgaagctgtgtcttaagttactctgagtttacacatgaaaaggtgaacatcatcaaaaaccctggacatagttccctgagaactgcctgccgaatgacctgaaggctgaaattgacaagttggccactgagtatatgagtagtgcccgcagcctgagctccgaggaaaaattggcccttctcaaacagatccaggaagcctatggcaagtgcaaggaatttggtgacgacaaggtgcagcttgccatgcagacctatgagatggtggacaaacacattcggcggctggacacagacctggcccgttttgaggctgatctcaaggagaaacagattgagtcaagtgactatgacagctcttccagcaaaggcaaaaagaaggccggactcaaaaggagaagaaagctgctcgtgctcgttccaaagggaaaaactcggatgaagaagcccccaagactgcccagaagaagttaaagctcgtgcgcacaagtcctgagtatgggatgccctcagtgacctttggcagtgtccacccctctgatgtgttggatatgcctgtggatcccaacgaacccacctattgcctttgtcaccaggtctcctatggagagatgattggctgtgacaaccctgattgttccattgagtggttccattttgcctgtgtggggctgacaaccaagcctcgggggaaatggttttgcccacgctgctcccaagaacggaagaagaaatagataagggccttggattccaacacagtttcttccacatcccctgacttgggctagtgggcagaggaatgcctgtgctggggccaggggttcagggaggagtggatggcacagtgctgtcatcccttctcctcccctctccccactcccggtgctgaggctgcatcagaccctggtagggaggggtgccgcagccactaacggtatgtgctctccttcagccctctcccttcggagggacgtggtcttgcccactgtccttttgcctccatgctgaggtcggtgctgtatttcagagggagggtccttttcattctccttgctttgtatttaaggactggggcatagcatgggggcagtcccccagacctcttcattccccctcctgtggtgagggctaggtgtgatcaacacttttcttctccattcccttcctgcttttttcatggtgggggatccaccaggtcatctaggctctggccctagttgaaggggcaccccttcctctgtgccaagaggattcatcctgggagagggggcaaggtggaatgcagataactcacatgtaaaaggaacttgggtaggtaaataaaagctatacatgttg

SEQ ID NO: 47398 - DNA, 1574 bp, Homo sapiens
cgcgttacagtcacttccggggcggatcggaagttgctttgttttgcttcgagatggctgcggggatgtatttggaacattatctggacagtattgaaaaccttccctttgaattacagagaaactttcagctcatgagggacctagaccaaagaacagaggacctgaaggctgaaattgacaagttggccactgagtatatgagtagtgcccgcagcctgagctccgaggaaaaattggcccttctcaaacagatccaggaagcctatggcaagtgcaaggaatttggtgacgacaaggtgcagcttgccatgcagacctatgagatggtggacaaacacattcggcggctggacacagacctggcccgttttgaggctgatctcaaggagaaacagattgagtcaagtgactatgacagctcttccagcaaaggcaaaaagaagtgaggagggggcggggctgtgagaggtggggcgaggactgaaagggagaagaagtcagctcttcatctggtggggagtttggcaccaggttggaaagggggagagaagaggacttaacccatctttctgtctccctgccttctggctttctccctcttccctagaagggccggactcaaaaggagaagaaagctgctcgtgctcgttccaaagggaaaaactcggatgaagaagcccccaagactgcccagaagaagttaaagctcgtgcgcacaagtcctgagtatgggatgccctcagtgacctttggcagtgtccacccctctgatgtgttggatatgcctgtggatcccaacgaacccacctattgcctttgtcaccaggtctcctatggagagatgattggctgtgacaaccctgattgttccattgagtggttccattttgcctgtgtggggctgacaaccaagcctcgggggaaatggttttgcccacgctgctcccaagaacggaagaagaaatagataagggccttggattccaacacagtttcttccacatcccctgacttgggctagtgggcagaggaatgcctgtgctggggccaggggttcagggaggagtggatggcacagtgctgtcatcccttctcctcccctctccccactcccggtgctgaggctgcatcagaccctggtagggaggggtgccgcagccactaacggtatgtgctctccttcagccctctcccttcggagggacgtggtcttgcccactgtccttttgcctccatgctgaggtcggtgctgtatttcagagggagggtccttttcattctccttgctttgtatttaaggactggggcatagcatgggggcagtcccccagacctcttcattccccctcctgtggtgagggctaggtgtgatcaacacttttcttctccattcccttcctgcttttttcatggtgggggatccaccaggtcatctaggctctggccctagttgaaggggcaccccttcctctgtgccaagaggattcatcctgggagagggggcaaggtggaatgcagataactcacatgtaaaaggaacttgggtaggtaaataaaagctatacatgttg

SEQ ID NO: 47399 - DNA, 1223 bp, Homo sapiens
ggctcactgcaacctctgcctcccaggttcaagtgattctcctgcctcagcctcctgaatagctgggattacaggtattgaaaaccttccctttgaattacagagaaactttcagctcatgagggacctagaccaaagaacagagggtggacaaacacattcggcggctggacacagacctggcccgttttgaggctgatctcaaggagaaacagattgagtcaagtgactatgacagctcttccagcaaaggcaaaaagaaggccggactcaaaaggagaagaaagctgctcgtgctcgttccaaagggaaaaactcggatgaagaagcccccaagactgcccagaagaagttaaagctcgtgcgcacaagtcctgagtatgggatgccctcagtgacctttggcagtgtccacccctctgatgtgttggatatgcctgtggatcccaacgaacccacctattgcctttgtcaccaggtctcctatggagagatgattggctgtgacaaccctgattgttccattgagtggttccattttgcctgtgtggggctgacaaccaagcctcgggggaaatggttttgcccacgctgctcccaagaacggaagaagaaatagataagggccttggattccaacacagtttcttccacatcccctgacttgggctagtgggcagaggaatgcctgtgctggggccaggggttcagggaggagtggatggcacagtgctgtcatcccttctcctcccctctccccactcccggtgctgaggctgcatcagaccctggtagggaggggtgccgcagccactaacggtatgtgctctccttcagccctctcccttcggagggacgtggtcttgcccactgtccttttgcctccatgctgaggtcggtgctgtatttcagagggagggtccttttcattctccttgctttgtatttaaggactggggcatagcatgggggcagtcccccagacctcttcattccccctcctgtggtgagggctaggtgtgatcaacacttttcttctccattcccttcctgcttttttcatggtgggggatccaccaggtcatctaggctctggccctagttgaaggggcaccccttcctctgtgccaagaggattcatcctgggagagggggcaaggtggaatgcagataactcacatgtaaaaggaacttgggtaggtaaataaaagctatacatgttg

SEQ ID NO: 47400 - DNA, 1182 bp, Homo sapiens
ccacgcgtccgtggaacattatctggacagtatgtattgaaaaccttccctttgaattacagagaaactttcagctcatgagggacctagaccaaagaacagagggtggacaaacacattcggcggctggacacagacctggcccgttttgaggctgatctcaaggagaaacagattgagtcaagtgactatgacagctcttccagcaaaggcaaaaagaaggccggactcaaaaggagaagaaagctgctcgtgctcgttccaaagggaaaaactcggatgaagaagcccccaagactgcccagaagaagttaaagctcgtgcgcacaagtcctgagtatgggatgccctcagtgacctttggcagtgtccacccctctgatgtgttggatatgcctgtggatcccaacgaacccacctattgcctttgtcaccaggtctcctatggagagatgattggctgtgacaaccctgattgttccattgagtggttccattttgcctgtgtggggctgacaaccaagcctcgggggaaatggttttgcccacgctgctcccaagaacggaagaagaaatagataagggccttggattccaacacagtttcttccacatcccctgacttgggctagtgggcagaggaatgcctgtgctggggccaggggttcagggaggagtggatggcacagtgctgtcatcccttctcctcccctctccccactcccggtgctgaggctgcatcagaccctggtagggaggggtgccgcagccactaacggtatgtgctctccttcagccctctcccttcggagggacgtggtcttgcccactgtccttttgcctccatgctgaggtcggtgctgtatttcagagggagggtccttttcattctccttgctttgtatttaaggactggggcatagcatgggggcagtcccccagacctcttcattccccctcctgtggtgagggctaggtgtgatcaacacttttcttctccattcccttcctgcttttttcatggtgggggatccaccaggtcatctaggctctggccctagttgaaggggcaccccttcctctgtgccaagaggattcatcctgggagagggggcaaggtggaatgcagataactcacatgtaaaaggaacttgggtaggtaaataaaagctatacatgttg

SEQ ID NO: 47401 - DNA, 1074 bp, Homo sapiens
cgcgttacagtcacttccggggcggatcggaagttgctttgttttgcttcgagatggctgcggggatgtatttggaacattatctggacagtattgaaaaccttccctttgaattacagagaaactttcagctcatgagggacctagaccaaagaacagaggacctgaaggctgaaattgacaagttggccactgagtatatgagtagtgcccgcagcctgagctccgaggaaaaattggcccttctcaaacagatccaggaagcctatggcaagtgcaaggaatttggtgacgacaaggtgcagcttgccatgcagacctatgagatggtggacaaacacattcggcggctggacacagacctggcccgttttgaggctgatctcaaggagaaacagattgagtcaagtgactatgacagctcttccagcaaaggcaaaaagaaggccggactcaaaaggagaagaaagctgctcgtgctcgttccaaagggaaaaactcggatgaagaagcccccaagactgcccagaagaagttaaagctcgtgcgcacaagtcctgagtatgggatgccctcagtgacctttggcagtgtccacccctctgatgtgttggatatgcctgtggatcccaacgaacccacctattgcctttgtcaccaggtctcctatggagagatgattggctgtgacaaccctgattgttccattgagtggttccattttgcctgtgtggggctgacaaccaagcctcgggggaaatggttttgcccacgctgctcccaagaacggaagaagaaatagataagggccttggattccaacacagtttcttccacatcccctgacttgggctagtgggcagaggaatgcctgtgctggggccaggggttcagggaggagtggatggcacagtgctgtcatcccttctcctcccctctccccactcccggtgctgaggctgcatcagaccctctgtgccaagaggattcatcctgggagagggggcaaggtggaatgcagataactcacatgtaaaaggaacttgggtaggtaaataaaagctatacatgttg

SEQ ID NO: 47402 - DNA, 948 bp, Homo sapiens
ccacgcgtccgtggaacattatctggacagtatggaaaaactcggatgaagaagcccccaagactgcccagaagaagttaaagctcgtgcgcacaagtcctgagtatgggatgccctcagtgacctttggcagtgtccacccctctgatgtgttggatatgcctgtggatcccaacgaacccacctattgcctttgtcaccaggtctcctatggagagatgattggctgtgacaaccctgattgttccattgagtggttccattttgcctgtgtggggctgacaaccaagcctcgggggaaatggttttgcccacgctgctcccaagaacggaagaagaaatagataagggccttggattccaacacagtttcttccacatcccctgacttgggctagtgggcagaggaatgcctgtgctggggccaggggttcagggaggagtggatggcacagtgctgtcatcccttctcctcccctctccccactcccggtgctgaggctgcatcagaccctggtagggaggggtgccgcagccactaacggtatgtgctctccttcagccctctcccttcggagggacgtggtcttgcccactgtccttttgcctccatgctgaggtcggtgctgtatttcagagggagggtccttttcattctccttgctttgtatttaaggactggggcatagcatgggggcagtcccccagacctcttcattccccctcctgtggtgagggctaggtgtgatcaacacttttcttctccattcccttcctgcttttttcatggtgggggatccaccaggtcatctaggctctggccctagttgaaggggcaccccttcctctgtgccaagaggattcatcctgggagagggggcaaggtggaatgcagataactcacatgtaaaaggaacttgggtaggtaaataaaagctatacatgttg

SEQ ID NO: 47403 - DNA, 964 bp, Homo sapiens
ggagaagccacaaatcatttgccctaccaggatctcctgccacctctgaaagcctcaggctttagcttcccttcctgtagatgacactttctcttcctcttggcatgcagaagtcctgagtatgggatgccctcagtgacctttggcagtgtccacccctctgatgtgttggatatgcctgtggatcccaacgaacccacctattgcctttgtcaccaggtctcctatggagagatgattggctgtgacaaccctgattgttccattgagtggttccattttgcctgtgtggggctgacaaccaagcctcgggggaaatggttttgcccacgctgctcccaagaacggaagaagaaatagataagggccttggattccaacacagtttcttccacatcccctgacttgggctagtgggcagaggaatgcctgtgctggggccaggggttcagggaggagtggatggcacagtgctgtcatcccttctcctcccctctccccactcccggtgctgaggctgcatcagaccctggtagggaggggtgccgcagccactaacggtatgtgctctccttcagccctctcccttcggagggacgtggtcttgcccactgtccttttgcctccatgctgaggtcggtgctgtatttcagagggagggtccttttcattctccttgctttgtatttaaggactggggcatagcatgggggcagtcccccagacctcttcattccccctcctgtggtgagggctaggtgtgatcaacacttttcttctccattcccttcctgcttttttcatggtgggggatccaccaggtcatctaggctctggccctagttgaaggggcaccccttcctctgtgccaagaggattcatcctgggagagggggcaaggtggaatgcagataactcacatgtaaaaggaacttgggtaggtaaataaaagctatacatgttg

SEQ ID NO: 47404 - DNA, 1073 bp, Homo sapiens
ccacgcgtccgtggaacattatctggacagtatgtattgaaaaccttccctttgaattacagagaaactttcagctcatgagggacctagaccaaagaacagagggtggacaaacacattcggcggctggacacagacctggcccgttttgaggctgatctcaaggagaaacagattgagtcaagtgactatgacagctcttccagcaaaggcaaaaagaaggccggactcaaaaggagaagaaagctgctcgtgctcgttccaaagggaaaaactcggatgaagaagcccccaagactgcccagaagaagttaaagctcgtgcgcacgtctcctatggagagatgattggctgtgacaaccctgattgttccattgagtggttccattttgcctgtgtggggctgacaaccaagcctcgggggaaatggttttgcccacgctgctcccaagaacggaagaagaaatagataagggccttggattccaacacagtttcttccacatcccctgacttgggctagtgggcagaggaatgcctgtgctggggccaggggttcagggaggagtggatggcacagtgctgtcatcccttctcctcccctctccccactcccggtgctgaggctgcatcagaccctggtagggaggggtgccgcagccactaacggtatgtgctctccttcagccctctcccttcggagggacgtggtcttgcccactgtccttttgcctccatgctgaggtcggtgctgtatttcagagggagggtccttttcattctccttgctttgtatttaaggactggggcatagcatgggggcagtcccccagacctcttcattccccctcctgtggtgagggctaggtgtgatcaacacttttcttctccattcccttcctgcttttttcatggtgggggatccaccaggtcatctaggctctggccctagttgaaggggcaccccttcctctgtgccaagaggattcatcctgggagagggggcaaggtggaatgcagataactcacatgtaaaaggaacttgggtaggtaaataaaagctatacatgttg

SEQ ID NO: 47405 - DNA, 493 bp, Homo sapiens
cgcgttacagtcacttccggggcggatcggaagttgctttgttttgcttcgagatggctgcggggatgtatttggaacattatctggacagtattgaaaaccttccctttgaattacagagaaactttcagctcatgagggacctagaccaaagaacagaggacctgaaggctgaaattgacaagttggccactgagtatatgagtagtgcccgcagcctgagctccgaggaaaaattggcccttctcaaacagatccaggaagcctatggcaagtgcaaggaatttggtgacgacaaggtgcagcttgccatgcagacctatgagatggtatggccctgttcatggctccccacctacttcccatctaatcctcagggtcttagacccctccttcaactgtgttgggatctgtttggggtctgtgagatccataaactctgccttaacctattttctttaattggagatagttttgtacctctcctttctcc

SEQ ID NO: 47406 - DNA, 633 bp, Homo sapiens
taggatgactagaatgtttctacttctctcattgttaatgttactgtcacaaattcccagtgtgactttagactgcaacatatgttggtagatgggaggtttgctatatgagaagtccttaaaaagagaaagaaaaaagaaagaggaaagaaaaaaaagcagtaattgacaatgggatctctataccgttcacacttacagaagcattagataccatctccagcctggaacattgagcaaatttggctgcattggggcattcacttggtttcttcaaagatgtctgttggagctattcccatacccactgaaggatctgtagtcttgtcttcattctatgtagccatgttcaaggatgtaacagactggttttgagatacatgaagctgtgtcttaagttactctgagtttacacatgaaaaggtgaacatcatcaaaaaccctggacatagttccctgagaactgcctgccgaatggtgagaaccagattgctttttttgtaatacagttgtaactcttgagttcatgcatggaaagacagttggagattatggaactatatgctttttcagcttcttccaagagcctggaatgaagtggagtataaacagtgtcttcacagatcctcctgg

SEQ ID NO: 47407 - DNA, 1041 bp, Homo sapiens
cgcgttacagtcacttccggggcggatcggaagttgctttgttttgcttcgagatggctgcggggatgtatttggaacattatctggacagtattgaaaaccttccctttgaattacagagaaactttcagctcatgagggacctagaccaaagaacagaggaagcattagataccatctccagcctggaacattgagcaaatttggctgcattggggcattcacttggtttcttcaaagatgtctgttggagctattcccatacccactgaaggatctgtagtcttgtcttcattctatgtagccatgttcaaggatgtaacagactggttttgagatacatgaagctgtgtcttaagttactctgagtttacacatgaaaaggtgaacatcatcaaaaaccctggacatagttccctgagaactgcctgccgaatgacctgaaggctgaaattgacaagttggccactgagtatatgagtagtgcccgcagcctgagctccgaggaaaaattggcccttctcaaacagatccaggaagcctatggcaagtgcaaggaatttggtgacgacaaggtgcagcttgccatgcagacctatgagatggtggacaaacacattcggcggctggacacagacctggcccgttttgaggctgatctcaaggagaaacagattgagtcaagtgactatgacagctcttccagcaaaggcaaaaagaaggccggactcaaaaggagaagaaagctgctcgtgctcgttccaaagggaaaaactcggatgaagaagcccccaagactgcccagaagaagttaaagctcgtgcgcacaagtcctgagtatgggatgcctgttgggggccagtgccctcctaattggggggtaggggctaggctggagtggtaaaaggctcacaaaaatcctgcgaagaaaaaaacttctgaggtaataaataggattatcccgtatcgaaggcctttttggacaggtggtgtgtggtggccttggtatgtgctttctcgtgttacatcgcgccatcattg

SEQ ID NO: 47408 - DNA, 1719 bp, Homo sapiens
cgcgttacagtcacttccggggcggatcggaagttgctttgttttgcttcgagatggctgcggggatgtatttggaacattatctggacagtattgaaaaccttccctttgaattacagagaaactttcagctcatgagggacctagaccaaagaacagaggacctgaaggctgaaattgacaagttggccactgagtatatgagtagtgcccgcagcctgagctccgaggaaaaattggcccttctcaaacagatccaggaagcctatggcaagtgcaaggaatttggtgacgacaaggtgcagcttgccatgcagacctatgagatggtggacaaacacattcggcggctggacacagacctggcccgttttgaggctgatctcaaggagaaacagattgagtcaagtgactatgacagctcttccagcaaaggcaaaaagaaggccggactcaaaaggagaagaaagctgctcgtgctcgttccaaagggaaaaactcggatgaagaagcccccaagactgcccagaagaagttaaagctcgtgcgcacaagtcctgagtatgggatgccctcagtgacctttggcagtgtccacccctctgatgtgttggatatgcctgtggatcccaacgaacccacctattgcctttgtcaccaggtctcctatggagagatgattggctgtgacaaccctgattgttccattgagtggttccattttgcctgtgtggggctgacaaccaagcctcgggggaaatggttttgcccacgctgctcccaagaacggaagaagaaatagataagggccttggattccaacacagtttcttccacatcccctgacttgggctagtgggcagaggaatgcctgtgctggggccaggggttcagggaggagtggatggcacagtgctgtcatcccttctcctcccctctccccactcccggtgctgaggctgcatcagaccctggtagggaggggtgccgcagccactaacggtatgtgctctccttcagccctctcccttcggagggacgtggtcttgcccactgtccttttgcctccatgctgaggtcggtgctgtatttcagagggagggtccttttcattctccttgctttgtatttaaggactggggcatagcatgggggcagtcccccagacctcttcattccccctcctgtggtgagggctaggtgtgatcaacacttttcttctccattcccttcctgcttttttcatggtgggggatccaccaggtcatctaggctctggccctagttgaaggggcaccccttcctctgtgccaagaggattcatcctgggagagggggcaaggtggaatgcagataactcacatgtaaaaggaacttgggtaggtaaataaaagctatacatgttggcctgctgtgtttattgtagagacactgttttagtaaacatgctgagcattcattttgcgtcctctgggttggatgcgatgtgagaggatggcatgccagaattaggacacgacatgaaaccagagtggtgcctctgtccgagaacttgtaagttctcaacttgggaaagacagaggtgctggagggtgggcctcagaccagggggtctccaaaactttgtaaatcatgcatcttttctccataaaacatctttcacttaatttccaataaatgatgtatttgtgctatacatacgtactgctatactataca

SEQ ID NO: 47409 - DNA, 1217 bp, Homo sapiens
cgcgttacagtcacttccggggcggatcggaagttgctttgttttgcttcgagatggctgcggggatgtatttggaacattatctggacagtattgaaaaccttccctttgaattacagagaaactttcagctcatgagggacctagaccaaagaacagaggacctgaaggctgaaattgacaagttggccactgagtatatgagtagtgcccgcagcctgagctccgaggaaaaattggcccttctcaaacagatccaggaagcctatggcaagtgcaaggaatttggtgacgacaaggtgcagcttgccatgcagacctatgagatggtggacaaacacattcggcggctggacacagacctggcccgttttgaggctgatctcaaggagaaacagattgagtcaagtgactatgacagctcttccagcaaaggcaaaaagaaggccggactcaaaaggagaagaaagctgctcgtgctcgttccaaagggaaaaactcggatgaagaagcccccaagactgcccagaagaagttaaagctcgtgcgcacaagtcctgagtatgggatgccctcagtgacctttggcagtgtccacccctctgatgtgttggatatgcctgtggatcccaacgaacccacctattgcctttgtcaccaggtctcctatggagagatgattggctgtgacaaccctgattgttccattgagtggttccattttgcctgtgtggggctgacaaccaagcctcgggggaaatggttttgcccacgctgctcccaagaacggaagaagaaatagataagggccttggattccaacacagtttcttccacatcccctgacttgggctagtgggcagaggaatgcctgtgctggggccaggggttcagggaggagtggatggcacagtgctgtcatcccttctcctcccctctccccactcccggtgctgaggctgcatcagaccctggtagggaggggtgccgcagccactaacggtatgtgctctccttcagccctctcccttcggagggacgtggtcttgcccactgtccttttgcctccatcaggtcatctaggctctggccctagttgaaggggcaccccttcctctgtgccaagaggattcatcctgggagagggggcaaggtggaatgcagataactcacatgtaaaaggaacttgggtaggtaaataaaagctatacatgttg

SEQ ID NO: 47410 - DNA, 2495 bp, Homo sapiens
cgcgttacagtcacttccggggcggatcggaagttgctttgttttgcttcgagatggctgcggggatgtatttggaacattatctggacagtattgaaaaccttccctttgaattacagagaaactttcagctcatgagggacctagaccaaagaacagagggtatgtatagagtaaaaagtttttgtatctaatgagtgtgtgtaatcatttatttttctacttgatgttaccgtatcatctggtatgatctggagaactgtggcttctctcgctccttttttacgctcttggaattcttaaaacaggataatgatcctcatttctgtgtcagctttttcataacaaatagagtattgtgaaaacgcctcaagaattcaaagatgctgtgttctttatgtcttcctggagaataattagccaggctggctcacacctgtaatcccagcactttgggaggcctaggcgggcaggtaacttgaggccaggagtttgagatcagcctggccacatggtgaaaccccatctctactaaaaatacaaaaactagccaggtgtggtggcacgcaccagtaatcccagctacttgggaggctgagacgtgagaatcgtttgaacctgggaggtggaggttgtagtgagcccaaatcatgccacatgtcactgcactccagcctaggcaacagagcaagactctgtctcaaaaaaaaaaaaaaagaagaattaaagaaagtcaactcgagtcatttctgctctccacgtttgatatatttataggatgactagaatgtttctacttctctcattgttaatgttactgtcacaaattcccagtgtgactttagactgcaacatatgttggtagatgggaggtttgctatatgagaagtccttaaaaagagaaagaaaaaagaaagaggaaagaaaaaaaagcagtaattgacaatgggatctctataccgttcacacttacagaagcattagataccatctccagcctggaacattgagcaaatttggctgcattggggcattcacttggtttcttcaaagatgtctgttggagctattcccatacccactgaaggatctgtagtcttgtcttcattctatgtagccatgttcaaggatgtaacagactggttttgagatacatgaagctgtgtcttaagttactctgagtttacacatgaaaaggtgaacatcatcaaaaaccctggacatagttccctgagaactgcctgccgaatgacctgaaggctgaaattgacaagttggccactgagtatatgagtagtgcccgcagcctgagctccgaggaaaaattggcccttctcaaacagatccaggaagcctatggcaagtgcaaggaatttggtgacgacaaggtgcagcttgccatgcagacctatgagatggtggacaaacacattcggcggctggacacagacctggcccgttttgaggctgatctcaaggagaaacagattgagtcaagtgactatgacagctcttccagcaaaggcaaaaagaaggccggactcaaaaggagaagaaagctgctcgtgctcgttccaaagggaaaaactcggatgaagaagcccccaagactgcccagaagaagttaaagctcgtgcgcacaagtcctgagtatgggatgccctcagtgacctttggcagtgtccacccctctgatgtgttggatatgcctgtggatcccaacgaacccacctattgcctttgtcaccaggtctcctatggagagatgattggctgtgacaaccctgattgttccattgagtggttccattttgcctgtgtggggctgacaaccaagcctcgggggaaatggttttgcccacgctgctcccaagaacggaagaagaaatagataagggccttggattccaacacagtttcttccacatcccctgacttgggctagtgggcagaggaatgcctgtgctggggccaggggttcagggaggagtggatggcacagtgctgtcatcccttctcctcccctctccccactcccggtgctgaggctgcatcagaccctggtagggaggggtgccgcagccactaacggtatgtgctctccttcagccctctcccttcggagggacgtggtcttgcccactgtccttttgcctccatgctgaggtcggtgctgtatttcagagggagggtccttttcattctccttgctttgtatttaaggactggggcatagcatgggggcagtcccccagacctcttcattccccctcctgtggtgagggctaggtgtgatcaacacttttcttctccattcccttcctgcttttttcatggtgggggatccaccaggtcatctaggctctggccctagttgaaggggcaccccttcctctgtgccaagaggattcatcctgggagagggggcaaggtggaatgcagataactcacatgtaaaaggaacttgggtaggtaaataaaagctatacatgttg

SEQ ID NO: 47411 - DNA, 1504 bp, Homo sapiens
cgcgttacagtcacttccggggcggatcggaagttgctttgttttgcttcgagatggctgcggggatgtatttggaacattatctggacagtattgaaaaccttccctttgaattacagagaaactttcagctcatgagggacctagaccaaagaacagaggacctgaaggctgaaattgacaagttggccactgagtatatgagtagtgcccgcagcctgagctccgaggaaaaattggcccttctcaaacagatccaggaagcctatggcaagtgcaaggaatttggtgacgacaaggtgcagcttgccatgcagacctatgagatggtggacaaacacattcggcggctggacacagacctggcccgttttgaggctgatctcaaggagaaacagattgagtcaagtgactatgacagctcttccagcaaaggcaaaaagaaggccggactcaaaaggagaagaaagctgctcgtgctcgttccaaagggaaaaactcggatgaagaagcccccaagactgcccagaagaagttaaagctcgtgcgcacaagtcctgagtatgggatgccctcagtgacctttggcagtgtccacccctctgatgtgttggatatgcctgtggatcccaacgaacccacctattgcctttgtcaccaggtctcctatggagagatgattggctgtgacaaccctgattgttccattgagtggttccattttgcctgtgtggggctgacaaccaagcctcgggggaaatggttttgcccacgctgctcccaagaacggaagaagaaatagataagggccttggattccaacacagtttcttccacatcccctgacttgggctagtgggcagaggaatgcctgtgctggggccaggggttcagggaggagtggatggcacagtgctgtcatcccttctcctcccctctccccactcccggtgctgaggctgcatcagaccctggtagggaggggtgccgcagccaacttttcttctccattcccttcctgcttttttcatggtgggggatccaccaggtcatctaggctctggccctagttgaaggggcaccccttcctctgtgccaagaggattcatcctgggagagggggcaaggtggaatgcagataactcacatgtaaaaggaacttgggtaggtaaataaaagctatacatgttggcctgctgtgtttattgtagagacactgttttagtaaacatgctgagcattcattttgcgtcctctgggttggatgcgatgtgagaggatggcatgccagaattaggacacgacatgaaaccagagtggtgcctctgtccgagaacttgtaagttctcaacttgggaaagacagaggtgctggagggtgggcctcagaccagggggtctccaaaactttgtaaatcatgcatcttttctccataaaacatctttcacttaatttccaataaatgatgtatttgtgctatacatacgtactgctatactataca

SEQ ID NO: 47412 - DNA, 765 bp, Homo sapiens
cgcgttacagtcacttccggggcggatcggaagttgctttgttttgcttcgagatggctgcggggatgtatttggaacattatctggacagtattgaaaaccttccctttgaattacagagaaactttcagctcatgagggacctagaccaaagaacagaggacctgaaggctgaaattgacaagttggccactgagtatatgagtagtgcccgcagcctgagctccgaggaaaaattggcccttctcaaacagatccaggaagcctatggcaagtgcaaggaatttggtgacgacaaggtgcagcttgccatgcagacctatgagatggtggacaaacacattcggcggctggacacagacctggcccgttttgaggctgatctcaaggagaaacagattgagtcaagtgactatgacagctcttccagcaaaggcaaaaagaaggccggactcaaaaggagaagaaagctgctcgtgctcgttccaaagggaaaaactcggatgaagaagcccccaagactgcccagaagaagttaaagctcgtgcgcacaagtcctgagtatgggatgcctgttgggggccagtgccctcctaattggggggtaggggctaggctggagtggtaaaaggctcacaaaaatcctgcgaagaaaaaaacttctgaggtaataaataggattatcccgtatcgaaggcctttttggacaggtggtgtgtggtggccttggtatgtgctttctcgtgttacatcgcgccatcattg

SEQ ID NO: 47413 - DNA, 719 bp, Homo sapiens
tgtgccagtttaagggctacccacaggcatctctatgctttgccatttgcccctgtaaggagtaaggtcgggagtcctggagaagtcaagctcaagtcgtcctttgtaacgacactaaagctcaccttgagttcacttcacacgggccagtcacaaccacttaattctgtcctcacagcccatcagcaggcactgtggtgtttctatcttacggaggaggacgccagggcttgcccaacgctatcaccttgccagagtcgtgctgctgaattatggcagatctggggtgctgtcgtgggtgtctctgtctccctcccacatcccggtctctacccaccatactccctggaagtggagagcaatcacagatctgctggtttctttctctgcacctggcaacctctggagggcaaggcctgcacttttccagctgtgacaccagcccatgtgtctcatatcatttctctctcatgtagcaagaatttctccccagaaaggaggtggcaaagatgggcagggggtgcaaaggtgggggctctgacagccaggttccagggtgcactgctgagccagcccacaaccatggtgaggcagggagattccgcaggactccgtatccgtgctttgaagatggctttcgtgcttttagtcttttctttgttcatttgttgtttgttttctgatgatgttttagtaaaaagttcttttgaaaatcccaa

SEQ ID NO: 47414 - DNA, 534 bp, Homo sapiens
cttatctactcagtcattgtgtttctttgttgtttttatatgtactttgtgttaagacatgttcagggtcctttctattcaaactgtacaaattgtttgaaactagcaccctggttttttccttctttcctgtccacgatggtccttgtccagtgcatgcacactgcaggccctgaatcaacgcaggcgactggcccacaggtggactgacgggctcactaggatgctgggcagcgtgtctggctggtttctagctagggctctgtttcctgtgtgcccagagaaataaaggggaaaaagcacacccactcacacacacagtcagttcctaactaaatgccacaagcgagtgactggtggcaggaaaatagaccctttgctgtgttttaggcccctttctgtcctgggtttttgtttgtgtggtagtgatggttgatcttaaatcatgtaaaaagtttgttttcaccaaaataactcagaccttttgcttctaaagaagggagagaaaagggggccagaaaggaaaaaaaaaaa

SEQ ID NO: 47415 - DNA, 378 bp, Homo sapiens
tatttactgctgccaaactgtcatctttgctgttccaggaacttgctaagcatgcctctacctcaggactttcgcatttctgttccctttgcctctaatttcagatatccacgtggtttattccctcatcttcttcaggtatttgcttaaatgtcatcttctttgtgaggactctctttcctaattttagatgaaacagccctgtggttcttcatattctcctttcctgctgtatttcctctccatagcatttatcacctgatacaccatacagattatttatttactttgcatttccccccaatagcaatgtgaactccacaagggcaggaatttttgtctgtttactactgcattactggtgccttgtacagtccc

SEQ ID NO: 47416 - DNA, 205 bp, Homo sapiens
aggggtggccaggacccccgctgcttgtgtgggatggaaaaaccaaagctgccgaccacatagaggcggggtcgggaagctgggggcgtcaaataaagtcatgtggagggccgaggatggtttttgctgacatggaagcaccttcttcaaaaagagcaacaggaagatacaaagagctctcgtctctcaaaatagactctaagtg

SEQ ID NO: 47417 - DNA, 341 bp, Homo sapiens
aggagcctctgtaaaagggaattgaggtgcctcttgccaacagccagtacaaatatgccaaccctgtgagtgagtgtgatgggttcaactgtgtcccccaaaactcctatattgaagtcctagcccccagactttcacggtgtgacagtatctgaagatagggtctttaaaaaggtaattaagtttaagtgaggtctttcaggtaggcccaaatctgatatgactgggtgtccttataagagggagcctgggcaacatgggcaagaccccatcactcccaaaaaaattttttaaaaattagccacatgttgtgggtacacgcctacagtcccaactactct

SEQ ID NO: 47418 - DNA, 394 bp, Homo sapiens
gcgagatagcaccgctgcactctggcctgggcgacaaagtgagaccctgtctcaacaaaataaaataaaaccaaaaaacaacccccatagaagacacaaatttcaattcccatctctggattgctcagactacacatgggcatatatggaaagcttcaacattcatttcatttatcaacttatttagaaaggcacattgtatctacccactggggtgtggtacattccagggttcaagtccctggtttataatccaaaacctgtcctggccctccacatgcgtgggtgctcagaaactccgagcgcctcagaggtattctcttaacatctgatcaaataatgactataaagaataatatgcagtacatactgtagatagttccctgtgcacata

SEQ ID NO: 47419 - DNA, 491 bp, Homo sapiens
ctgggttgtgtctgtctctgtggtcccaggaggacagtgcagacctgaagtgccagttgcactttgcaaaggaggagtcagccctcatgtgcaagaagctcactaagcttgccaaggagaatgacagcatgaaggaggagctgctgaagtaccgctcgctctatggggacctggacagcgcgctgtcagccgaggagctggccgatgccccccactcgcgggagaccgagctgaaggtgcacctgaagctggtggaggaggaagccaacctgctgagccgccgcatcgtggagctggaggtggagaaccgaggcctgcgggctgagatggacgacatgaaggatcatggaggtggctgtgggggtcctgaggcacgcctggccttctccgcgctgggtggcggagagtgcggggagagcttggcagagctgcggcgacacctgcagtttgtcgaagaggaggccgagctgctgcggcgctcctctgccgag

SEQ ID NO: 47420 - DNA, 368 bp, Homo sapiens
  misc_feature (263)..(263): n is a, c, g, or t
  misc_feature (342)..(342): n is a, c, g, or t
ctgggagcagactattattgcaaagatgacaagataccaaaaacagagaaaggctgttttgtaaggttacagtttaaaaaagaatcatggaagaaataaattggctactaagaaaaattcttctgccttgggatcctgttgatctgtgaccttatccccaaccctgtgctctctgaaacatgtgctgtgtccactcagggttaaatggattaagggcggtgcaagatgtgctttgttaaacagatgcttgaaggcagcatgcnccgttaagagtcatcaccactccctaatccttaaggacccaggggacacaaacactgcggaaggccaaggcgcaagggnccctctgccctagggaaaaccagaga

SEQ ID NO: 47421 - DNA, 338 bp, Homo sapiens
tctttattaacttatatctcattttcttcctattaaaattaaaatattcttcttcctttgttgtctgattaaaaattctgctcactgttcaaaaatacaggttaaataccatatctttgtaaaacccttcttaacctcctcccctgtcctcagtcccgccaccaacacacgcacatacttccttttcttttgccagtcagaattatttactatcttttctgggcccacctaattttatatacttctattaaaatacattgtattttatttagtactgtagtatgtttgtgtcttccactatattgtgatattcttccacgatatcaccatatagtgga

SEQ ID NO: 47422 - DNA, 494 bp, Homo sapiens
aaataagcagctttcacacattgttgatagaaatgtgaattgatagactctttatgtaggtcattttatcagcctttactaaatgttaagccattctacttctaggaatctgccctacgaaaatgtttgtagaaatgtacaaaaatctcttacatgggtattcatttgtagtgtataaagtagttaaaaaaattacaaataacccaaatgattatcaatagaagattggttaaatcacaatatattagaggattctggggagatggcagagtaggcagcaccaggaatctatctccctacctcaacaacaattgcattggcagaatctatctgatgtaactattttggaactctggagtctattcaactcttgcagcttctacagtaggggtgtccagtgttttggcttccctgagtcacattggaagaagaactgtcttgggccacacataaaatacactaacactatgatagctgatgagctaaaaaaaaaa

SEQ ID NO: 47423 - DNA, 172 bp, Homo sapiens
gttgccttaaccttctacaagggaatatgtgggccgtgtgtattttaagtaggtaatattgtgaaatgacactgggcagaatttttattttccggatcttttttgattcaagatcttttttgttattccctcaatacaatttttgggtgaccgctagattggtaaattggca

SEQ ID NO: 47424 - DNA, 382 bp, Homo sapiens
gggagtgagcatgaacaagtaagagacctttcctgcaagactcatacagatggtgcctcagcatatctgggaaggagattcaagcacaagctagccaaaacctgccagacatccagcatggtgcttttcaatcagcagcccccagacgtgagtgaatacctctgtgcggtcaatcagacttcattgtcccttctctgggctgacctggagtcagttgtttacaccttgcagtacctgacagcttcactctgtctttgcctcaatcctgggggatccgtaatagccactgctagacctgttttaatgtggccaaggagacaactccttaggcaaacgaagcctcaaaaagtttagatcaaaaagaaaaaggtcctgcaacatt

SEQ ID NO: 47425 - DNA, 1248 bp, Homo sapiens
atcaattacagtggttgcagacatcatgagtactcctttggcacagagctcggtcttttacttcctgcccctaattgacccctgacctggacatatctgtctttcggcctggagtggtgtgtctaagggactggctgagagtctgcagccagactacagtgaacgactctgcctcgtcagtgagattcccccaaaaggaggggcccttggggaggggcctggggcctccccatgcaaccagcatagcccctactgggcccccccatgttacaccctaaagcctgaaacctgaaccccaatcctctgacagaagaaccccagggtcctgtagccctaagtggtactaactttccttcattcaacccacctgcgtctcatactcacctcaccccactgtggctgatttggaattttgtgcccccatgtaagcaccccttcatttggcattccccacttgagaattacccttttgccccgaacatgtttttcttctccctcagtctggcccttccttttcgcaggattcttcctccctccctctttccctcccttcctctttccatctaccctccgattgttcctgaaccgatgagaaataaagtttctgttgataatcatcaaaaatgtctgtcatgggggtggggagcaggggaagcctgggatgcaatgagggtgggaggggaagaaaaaggagtagtacattcatgctgtggaggcaggagtattaccaatttgctagaaagagtactgttctggaaactgacttttttccaggtgccctgcactcattccagggtttagtttagagttagacttacaatgggctgggcgtggtggctcacgcctgtaatcccagcactttgggaggccaaagcgggtggatcacgaggtcaggagatcgagaccagcctggccaacatggtgaaaccccgtctctactaaaaatacaaaaattagccaggcgtgatggtgtgctcctgtaattccagctacttgggaggctgaggcaggagaatcgcttgaacccaggaggtagaggatgcagtgagccaagattgtgccactgcactccagcctgggcgacagagggagactccatctaaaaaaataaaaaaaataaaaaaagttagacttaccatgttgtcccccctttccaactaatctttaacataccccacccaagtttttctctccttacccttactccactttttggccacacctgccacttctgacctcataatccct

SEQ ID NO: 47426 - DNA, 1502 bp, Homo sapiens
gtgagggacccaggttcctgacacagacagactacacccgagggaatgaagagcaagcgccatgttgaagccatcattaccattcacatccctcttattcctgcagctgcccctgctgggagtggggctgaacacgacaattctgacgcccaatgggaatgaagacaccacagctgatttcttcctgaccactatgcccactgactccctcagtgtttccactctgcccctcccagaggttcagtgttttgtgttcaatgtcgagtacatgaattgcacttggaacagcagctctgagccccagcctaccaacctcactctgcattattggtacaagaactcggataatgataaagtccagaagtgcagccactatctattctctgaagaaatcacttctggctgtcagttgcaaaaaaaggagatccacctctaccaaacatttgttgttcagctccaggacccacgggaacccaggagacaggccacacagatgctaaaactgcagaatctggtgatcccctgggctccagagaacctaacacttcacaaactgagtgaatcccagctagaactgaactggaacaacagattcttgaaccactgtttggagcacttggtgcagtaccggactgactgggaccacagctggactgaacaatcagtggattatagacataagttctccttgcctagtgtggatgggcagaaacgctacacgtttcgtgttcggagccgctttaacccactctgtggaagtgctcagcattggagtgaatggagccacccaatccactgggggagcaatacttcaaaagagaatcctttcctgtttgcattggaagccgtggttatctctgttggctccatgggattgattatcagccttctctgtgtgtatttctggctggaacggacgatgccccgaattcccaccctgaagaacctagaggatcttgttactgaataccacgggaacttttcggcctggagtggtgtgtctaagggactggctgagagtctgcagccagactacagtgaacgactctgcctcgtcagtgagattcccccaaaaggaggggcccttggggaggggcctggggcctccccatgcaaccagcatagcccctactgggcccccccatgttacaccctaaagcctgaaacctgaaccccaatcctctgacagaagaaccccagggtcctgtagccctaagtggtactaactttccttcattcaacccacctgcgtctcatactcacctcaccccactgtggctgatttggaattttgtgcccccatgtaagcaccccttcatttggcattccccacttgagaattacccttttgccccgaacatgtttttcttctccctcagtctggcccttccttttcgcaggattcttcctccctccctctttccctcccttcctctttccatctaccctccgattgttcctgaaccgatgagaaataaagtttctgttgataatcatcaaaa

SEQ ID NO: 47427 - DNA, 623 bp, Homo sapiens
atcaattacagtggttgcagacatcatgagtactcctttggcacagagctcggtcttttacttcctgcccctaattgacccctgacctggacatatctgtctttcggcctggagtggtgtgtctaagggactggctgagagtctgcagccagactacagtgaacgactctgcctcgtcagtgagattcccccaaaaggaggggcccttggggaggggcctggggcctccccatgcaaccagcatagcccctactgggcccccccatgttacaccctaaagcctgaaacctgaaccccaatcctctgacagaagaaccccagggtcctgtagccctaagtggtactaactttccttcattcaacccacctgcgtctcatactcacctcaccccactgtggctgatttggaattttgtgcccccatgtaagcaccccttcatttggcattccccacttgagaattacccttttgccccgaacatgtttttcttctccctcagtctggcccttccttttcgcaggattcttcctccctccctctttccctcccttcctctttccatctaccctccgattgttcctgaaccgatgagaaataaagtttctgttgataatcatcaaaa

SEQ ID NO: 47428 - DNA, 392 bp, Homo sapiens
ccaacaccccatacctttgctataggtagcatttgcccttgatccggagtagatttgccaaaccattagaacaactgctgacctgtatagaaattcttatggtctgaaattaataatggtggaactttctcaggactgttaggaaaagtatcttttggcttttctttttatgtgttctctaagaagccatcatacattgtgcctcagcctctgcaacccctgaacctgctttgggtattcatagcccactcttgactaatgcttacctctgtctttgcatgcaccggggggattcttcctccctccctctttccctcccttcctctttccatctaccctccgattgttcctgaaccgatgagaaataaagtttctgttgataatcatcaaaa

SEQ ID NO: 47429 - DNA, 1892 bp, Homo sapiens
gtgagggacccaggttcctgacacagacagactacacccgagggaatgaagagcaagcgccatgttgaagccatcattaccattcacatccctcttattcctgcagctgcccctgctgggagtggggctgaacacgacaattctgacgcccaatgggaatgaagacaccacagctgatttcttcctgaccactatgcccactgactccctcagtgtttccactctgcccctcccagaggttcagtgttttgtgttcaatgtcgagtacatgaattgcacttggaacagcagctctgagccccagcctaccaacctcactctgcattattggtacaagaactcggataatgataaagtccagaagtgcagccactatctattctctgaagaaatcacttctggctgtcagttgcaaaaaaaggagatccacctctaccaaacatttgttgttcagctccaggacccacgggaacccaggagacaggccacacagatgctaaaactgcagaatctggtgatcccctgggctccagagaacctaacacttcacaaactgagtgaatcccagctagaactgaactggaacaacagattcttgaaccactgtttggagcacttggtgcagtaccggactgactgggaccacagctggactgaacaatcagtggattatagacataagttctccttgcctagtgtggatgggcagaaacgctacacgtttcgtgttcggagccgctttaacccactctgtggaagtgctcagcattggagtgaatggagccacccaatccactgggggagcaatacttcaaaagagaatcctttcctgtttgcattggaagccgtggttatctctgttggctccatgggattgattatcagccttctctgtgtgtatttctggctggaacggacgatgccccgaattcccaccctgaagaacctagaggatcttgttactgaataccacgggaacttttcggcctggagtggtgtgtctaagggactggctgagagtctgcagccagactacagtgaacgactctgcctcgtcagtgagattcccccaaaaggaggggcccttggggaggggcctggggcctccccatgcaaccagcatagcccctactgggcccccccatgttacaccctaaagcctgaaacctgaaccccaatcctctgacagaagaaccccagggtcctgtagccctaagtggtactaactttccttcattcaacccacctgcgtctcatactcacctcaccccactgtggctgatttggaattttgtgcccccatgtaagcaccccttcatttggcattccccacttgagaattacccttttgccccgaacatgtttttcttctccctcagtctggcccttccttttcgcaggattcttcctccctccctctttccctcccttcctctttccatctaccctccgattgttcctgaaccgatgagaaataaagtttctgttgataatcatcaaaagaaaaaagaaaaaaaaaagaaaaaaaatgaaaaaaaaaaaaaaaaaaataaaaaaaaaaaaaaaaaaaaaaaaaaaaaaaaacccttgtgggccgcttggcccaagtggattttagcttggggcaggtttatgcttgggcccgaatttggggctaatttgcccaattcgccctatggggggccgattaccattcaatggccgggggtttaaaacggggggactgggaaaaccctgggggttcccaaatttaatggccttggagaaaatcccctttttcgcaggtgggggtaatacagaaagcccccccccatcgcctttccaacagtgcgcaccctatggcgaagggaatttgaggcgtattttttgttaaaatcccggtaaattttgtt

SEQ ID NO: 47430 - DNA, 1430 bp, Homo sapiens
gtgagggacccaggttcctgacacagacagactacacccgagggaatgaagagcaagcgccatgttgaagccatcattaccattcacatccctcttattcctgcagctgcccctgctgggagtggggctgaacacgacaattctgacgcccaatgggaatgaagacaccacagctgatttcttcctgaccactatgcccactgactccctcagtgtttccactctgcccctcccagaggttcagtgttttgtgttcaatgtcgagtacatgaattgcacttggaacagcagctctgagccccagcctaccaacctcactctgcattattggtacaagaactcggataatgataaagtccagaagtgcagccactatctattctctgaagaaatcacttctggctgtcagttgcaaaaaaaggagatccacctctaccaaacatttgttgttcagctccaggacccacgggaacccaggagacaggccacacagatgctaaaactgcagaatctggtgatcccctgggctccagagaacctaacacttcacaaactgagtgaatcccagctagaactgaactggaacaacagattcttgaaccactgtttggagcacttggtgcagtaccggactgactgggaccacagctggactgaacaatcagtggattatagacataagttctccttgcctagtgtggatgggcagaaacgctacacgtttcgtgttcggagccgctttaacccactctgtggaagtgctcagcattggagtgaatggagccacccaatccactgggggagcaatacttcaaaagagaatcctttcctgtttgcattggaagccgtggttatctctgttggctccatgggattgattatcagccttctctgtgtgtatttctggctggaacggacgatgccccgaattcccaccctgaagaacctagaggatcttgttactgaataccacgggaacttttcggcctggagtggtgtgtctaagggactggctgagagtctgcagccagactacagtgaacgactctgcctcgtcagtgagattcccccatgttacaccctaaagcctgaaacctgaaccccaatcctctgacagaagaaccccagggtcctgtagccctaagtggtactaactttccttcattcaacccacctgcgtctcatactcacctcaccccactgtggctgatttggaattttgtgcccccatgtaagcaccccttcatttggcattccccacttgagaattacccttttgccccgaacatgtttttcttctccctcagtctggcccttccttttcgcaggattcttcctccctccctctttccctcccttcctctttccatctaccctccgattgttcctgaaccgatgagaaataaagtttctgttgataatcatcaaaa

SEQ ID NO: 47431 - DNA, 1127 bp, Homo sapiens
gtgagggacccaggttcctgacacagacagactacacccgagggaatgaagagcaagcgccatgttgaagccatcattaccattcacatccctcttattcctgcagctgcccctgctgggagtggggctgaacacgacaattctgacgcccaatgggaatgaagacaccacagctgatttcttcctgaccactatgcccactgactccctcagtgtttccactctgcccctcccagaggttcagtgttttgtgttcaatgtcgagtacatgaattgcacttggaacagcagctctgagccccagcctaccaacctcactctgcattattggtacaagaactcggataatgataaagtccagaagtgcagccactatctattctctgaagaaatcacttctggctgtcagttgcaaaaaaaggagatccacctctaccaaacatttgttgttcagctccaggacccacgggaacccaggagacaggccacacagatgctaaaactgcagaatctggtgatcccctgggctccagagaacctaacacttcacaaactgagtgaatcccagctagaactgaactggaacaacagattcttgaaccactgtttggagcacttggtgcagtaccggactgactgggaccacagctggactgaacaatcagtggattatagacataagttctccttgcctagtgtggatgggcagaaacgctacacgtttcgtgttcggagccgctttaacccactctgtggaagtgctcagcattggagtgaatggagccacccaatccactgggggagcaatacttcaaaagagaatcctttcctgtttgcattggaagccgtggttatctctgttggctccatgggattgattatcagccttctctgtgtgtatttctggctggaacggacgatgccccgaattcccaccctgaagaacctagaggatcttgttactgaataccacgggaacttttcggcccggagtggtgtgtttaagggtactggttgaaagtcttttagccagaacttcagtttaaccgaacttctgccttctgtaagtggaggaatttcccccccaaaaagggtaggtgggccccctttatgggtgagagggtgct

SEQ ID NO: 47432 - DNA, 1875 bp, Homo sapiens
gtgagggacccaggttcctgacacagacagactacacccgagggaatgaagagcaagcgccatgttgaagccatcattaccattcacatccctcttattcctgcagctgcccctgctgggagtggggctgaacacgacaattctgacgcccaatgggaatgaagacaccacagctggtgggaaatctgggactggagggggctggtgagaagggtggctgtgggaaggggccgtacagagatctggtgcctgccactggccattacaatcatgtgggcagaattgaaaagtggagtgggaagggcaagggggagggttccctgcctcacgctacttcttctttctttcttgtttgttgtttctttctttcttttgaggcagggtctcactatgttgcctaggctggtctcaaactcctggcctctagtgatcctcctgcctcagcctttcaaagcaccaggattacagacatgagccaccgtgcttggcctcctccttctgaccatcatttctctttccctccctgccttcattttctccccaatctagatttcttcctgaccactatgcccactgactccctcagtgtttccactctgcccctcccagaggttcagtgttttgtgttcaatgtcgagtacatgaattgcacttggaacagcagctctgagccccagcctaccaacctcactctgcattattggtacaagaactcggataatgataaagtccagaagtgcagccactatctattctctgaagaaatcacttctggctgtcagttgcaaaaaaaggagatccacctctaccaaacatttgttgttcagctccaggacccacgggaacccaggagacaggccacacagatgctaaaactgcagaatctggtgatcccctgggctccagagaacctaacacttcacaaactgagtgaatcccagctagaactgaactggaacaacagattcttgaaccactgtttggagcacttggtgcagtaccggactgactgggaccacagctggactgaacaatcagtggattatagacataagttctccttgcctagtgtggatgggcagaaacgctacacgtttcgtgttcggagccgctttaacccactctgtggaagtgctcagcattggagtgaatggagccacccaatccactgggggagcaatacttcaaaagagaatcctttcctgtttgcattggaagccgtggttatctctgttggctccatgggattgattatcagccttctctgtgtgtatttctggctggaacggacgatgccccgaattcccaccctgaagaacctagaggatcttgttactgaataccacgggaacttttcggcctggagtggtgtgtctaagggactggctgagagtctgcagccagactacagtgaacgactctgcctcgtcagtgagattcccccaaaaggaggggcccttggggaggggcctggggcctccccatgcaaccagcatagcccctactgggcccccccatgttacaccctaaagcctgaaacctgaaccccaatcctctgacagaagaaccccagggtcctgtagccctaagtggtactaactttccttcattcaacccacctgcgtctcatactcacctcaccccactgtggctgatttggaattttgtgcccccatgtaagcaccccttcatttggcattccccacttgagaattacccttttgccccgaacatgtttttcttctccctcagtctggcccttccttttcgcaggattcttcctccctccctctttccctcccttcctctttccatctaccctccgattgttcctgaaccgatgagaaataaagtttctgttgataatcatcaaaa

SEQ ID NO: 47433 - DNA, 1140 bp, Homo sapiens
gtgaagatggctttggaaccagctggatctaggctgtgccacatactacctctttggccttggccacatccctaaactcttggattctgtttcctaagatgtaagatggaggtaattgttcctgcctcacaggagctgttgtgaggattaaacagagagtatgtctttagcgcggtgcctggcaccagtgcctggcatgtagtaggggcacaacaaatataaggtccactttgcttttcttttttctatagagaatcctttcctgtttgcattggaagccgtggttatctctgttggctccatgggattgattatcagccttctctgtgtgtatttctggctggaacggtgagatttggagaagcccagaaaaatgaggggaacggtagctgacaatagcagaggagggttttgcagggtctttaggagtaaaggatgagacagtaagtaatgagagattacccaagagggtttggtgatggaaggaagccacaggcacagagaacacagaatcactttatttcatatgggacaactgggagaagggtgataagacgatgccccgaattcccaccctgaagaacctagaggatcttgttactgaataccacgggaacttttcggcctggagtggtgtgtctaagggactggctgagagtctgcagccagactacagtgaacgactctgcctcgtcagtgagattcccccaaaaggaggggcccttggggaggggcctggggcctccccatgcaaccagcatagcccctactgggcccccccatgttacaccctaaagcctgaaacctgaaccccaatcctctgacagaagaaccccagggtcctgtagccctaagtggtactaactttccttcattcaacccacctgcgtctcatactcacctcaccccactgtggctgatttggaattttgtgcccccatgtaagcaccccttcatttggcattccccacttgagaattacccttttgccccgaacatgtttttcttctccctcagtctggcccttccttttcgcaggattcttcctccctccctctttccctcccttcctctttccatctaccctccgattgttcctgaaccgatgagaaataaagtttctgttgataatcatcaaaa

SEQ ID NO: 47434 - DNA, 548 bp, Homo sapiens
atgtctcggtggatgacacgggaacttttcggcctggagtggtgtgtctaagggactggctgagagtctgcagccagactacagtgaacgactctgcctcgtcagtgagattcccccaaaaggaggggcccttggggaggggcctggggcctccccatgcaaccagcatagcccctactgggcccccccatgttacaccctaaagcctgaaacctgaaccccaatcctctgacagaagaaccccagggtcctgtagccctaagtggtactaactttccttcattcaacccacctgcgtctcatactcacctcaccccactgtggctgatttggaattttgtgcccccatgtaagcaccccttcatttggcattccccacttgagaattacccttttgccccgaacatgtttttcttctccctcagtctggcccttccttttcgcaggattcttcctccctccctctttccctcccttcctctttccatctaccctccgattgttcctgaaccgatgagaaataaagtttctgttgataatcatcaaaa

SEQ ID NO: 47435 - DNA, 833 bp, Homo sapiens
cacccgagggaatgaagagcaagcgccatgttgaagccatcattaccattcacatccctcttattcctgcagctgcccctgctgggagtggggctgaacacgacaattctgacgcccaatgggaatgaagacaccacagctggtgggaaatctgggactggagggggctggtgagaagggtggctgtgggaaggggccgtacagagatctggtgcctgccactggccattacaatcatgtgggcagaattgaaaagtggagtgggaagggcaagggggagggttccctgcctcacgctacttcttctttctttcttgtttgttgtttctttctttcttttgaggcagggtctcactatgttgcctaggctggtctcaaactcctggcctctagtgatcctcctgcctcagcctttcaaagcaccaggattacagacatgagccaccgtgcttggcctcctccttctgaccatcatttctctttccctccctgccttcattttctccccaatctagatttcttcctgaccactatgcccactgactccctcagtgtttccactctgcccctcccagaggttcagtgttttgtgttcaatgtcgagtacatgaattgcacttggaacagcagctctgagccccagcctaccaacctcactctgcattattggtatgagaagggacgagggggaggggatgaagaagaggtgggttggatcagagaccaagagagagggtagcaagtctcccaggtaccccactgttttctcctggggtaagtcataagtcggttgaggggagatgaggctaggctctggatatctgcagtaccca

SEQ ID NO: 47436 - DNA, 2127 bp, Homo sapiens
gtgagggacccaggttcctgacacagacagactacacccgagggaatgaagagcaagcgccatgttgaagccatcattaccattcacatccctcttattcctgcagctgcccctgctgggagtggggctgaacacgacaattctgacgcccaatgggaatgaagacaccacagctgatttcttcctgaccactatgcccactgactccctcagtgtttccactctgcccctcccagaggttcagtgttttgtgttcaatgtcgagtacatgaattgcacttggaacagcagctctgagccccagcctaccaacctcactctgcattattggtacaagaactcggataatgataaagtccagaagtgcagccactatctattctctgaagaaatcacttctggctgtcagttgcaaaaaaaggagatccacctctaccaaacatttgttgttcagctccaggacccacgggaacccaggagacaggccacacagatgctaaaactgcagaatctggtgatcccctgggctccagagaacctaacacttcacaaactgagtgaatcccagctagaactgaactggaacaacagattcttgaaccactgtttggagcacttggtgcagtaccggactgactgggaccacagctggactgaacaatcagtggattatagacataagttctccttgcctagtgtggatgggcagaaacgctacacgtttcgtgttcggagccgctttaacccactctgtggaagtgctcagcattggagtgaatggagccacccaatccactgggggagcaatacttcaaaagagaatcctttcctgtttgcattggaagccgtggttatctctgttggctccatgggattgattatcagccttctctgtgtgtatttctggctggaacggacgatgccccgaattcccaccctgaagaacctagaggatcttgttactgaataccacgggaacttttcggcctggagtggtgtgtctaagggactggctgagagtctgcagccagactacagtgaacgactctgcctcgtcagtgagattcccccaaaaggaggggcccttggggaggggcctggggcctccccatgcaaccagcatagcccctactgggcccccccatgttacaccctaaagcctgaaacctgaaccccaatcctctgacagaagaaccccagggtcctgtagccctaagtggtactaactttccttcattcaacccacctgcgtctcatactcacctcaccccactgtggctgatttggaattttgtgcccccatgtaagcaccccttcatttggcattccccacttgagaattacccttttgccccgaacatgtttttcttctccctcagtctggcccttccttttcgcaggattcttcctccctccctctttccctcccttcctctttccatctaccctccgattgttcctgaaccgatgagaaataaagtttctgttgataatcatcaaaaatgtctgtcatgggggtggggagcaggggaagcctgggatgcaatgagggtgggaggggaagaaaaaggagtagtacattcatgctgtggaggcaggagtattaccaatttgctagaaagagtactgttctggaaactgacttttttccaggtgccctgcactcattccagggtttagtttagagttagacttacaatgggctgggcgtggtggctcacgcctgtaatcccagcactttgggaggccaaagcgggtggatcacgaggtcaggagatcgagaccagcctggccaacatggtgaaaccccgtctctactaaaaatacaaaaattagccaggcgtgatggtgtgctcctgtaattccagctacttgggaggctgaggcaggagaatcgcttgaacccaggaggtagaggatgcagtgagccaagattgtgccactgcactccagcctgggcgacagagggagactccatctaaaaaaataaaaaaaataaaaaaagttagacttaccatgttgtcccccctttccaactaatctttaacataccccacccaagtttttctctccttacccttactccactttttggccacacctgccacttctgacctcataatccct

SEQ ID NO: 47437 - DNA, 1369 bp, Homo sapiens
gtgagggacccaggttcctgacacagacagactacacccgagggaatgaagagcaagcgccatgttgaagccatcattaccattcacatccctcttattcctgcagctgcccctgctgggagtggggctgaacacgacaattctgacgcccaatgggaatgaagacaccacagctgatttcttcctgaccactatgcccactgactccctcagtgtttccactctgcccctcccagaggttcagtgttttgtgttcaatgtcgagtacatgaattgcacttggaacagcagctctgagccccagcctaccaacctcactctgcattattggtacaagaactcggataatgataaagtccagaagtgcagccactatctattctctgaagaaatcacttctggctgtcagttgcaaaaaaaggagatccacctctaccaaacatttgttgttcagctccaggacccacgggaacccaggagacaggccacacagatgctaaaactgcagaatctggtgatcccctgggctccagagaacctaacacttcacaaactgagtgaatcccagctagaactgaactggaacaacagattcttgaaccactgtttggagcacttggtgcagtaccggactgactgggaccacagctggactgaacaatcagtggattatagacataagttctccttgcctagtgtggatgggcagaaacgctacacgtttcgtgttcggagccgctttaacccactctgtggaagtgctcagcattggagtgaatggagccacccaatccactgggggagcaatacttcaaaagagaatcctttcctgtttgcattggaagccgtggttatctctgttggctccatgggattgattatcagccttctctgtgtgtatttctggctggaacggacgatgccccgaattcccaccctgaagaacctagaggatcttgttactgaataccacgggaacttttcggcctggagtggtgtgtctaagggactggctgagagtctgcacctgaaacctgaaccccaatcctctgacagaagaaccccagggtcctgtagccctaagtggtactaactttccttcattcaacccacctgcgtctcatactcacctcaccccactgtggctgatttggaattttgtgcccccatgtaagcaccccttcatttggcattccccacttgagaattacccttttgccccgaacatgtttttcttctccctcagtctggcccttccttttcgcaggattcttcctccctccctctttccctcccttcctctttccatctaccctccgattgttcctgaaccgatgagaaataaagtttctgttgataatcatcaaaa

SEQ ID NO: 47438 - DNA, 1472 bp, Homo sapiens
aagagtggtatcaacgcagagtggccattacgtccggggagtctcaacagggacccagctcaggcagcagctaaggctgcccctgctgggagtggggctgaacacgacaattctgacgcccaatgggaatgaagacaccacagctgatttcttcctgaccactatgcccactgactccctcagtgtttccactctgcccctcccagaggttcagtgttttgtgttcaatgtcgagtacatgaattgcacttggaacagcagctctgagccccagcctaccaacctcactctgcattattggtacaagaactcggataatgataaagtccagaagtgcagccactatctattctctgaagaaatcacttctggctgtcagttgcaaaaaaaggagatccacctctaccaaacatttgttgttcagctccaggacccacgggaacccaggagacaggccacacagatgctaaaactgcagaatctggtgatcccctgggctccagagaacctaacacttcacaaactgagtgaatcccagctagaactgaactggaacaacagattcttgaaccactgtttggagcacttggtgcagtaccggactgactgggaccacagctggactgaacaatcagtggattatagacataagttctccttgcctagtgtggatgggcagaaacgctacacgtttcgtgttcggagccgctttaacccactctgtggaagtgctcagcattggagtgaatggagccacccaatccactgggggagcaatacttcaaaagagaatcctttcctgtttgcattggaagccgtggttatctctgttggctccatgggattgattatcagccttctctgtgtgtatttctggctggaacggacgatgccccgaattcccaccctgaagaacctagaggatcttgttactgaataccacgggaacttttcggcctggagtggtgtgtctaagggactggctgagagtctgcagccagactacagtgaacgactctgcctcgtcagtgagattcccccaaaaggaggggcccttggggaggggcctggggcctccccatgcaaccagcatagcccctactgggcccccccatgttacaccctaaagcctgaaacctgaaccccaatcctctgacagaagaaccccagggtcctgtagccctaagtggtactaactttccttcattcaacccacctgcgtctcatactcacctcaccccactgtggctgatttggaattttgtgcccccatgtaagcaccccttcatttggcattccccacttgagaattacccttttgccccgaacatgtttttcttctccctcagtctggcccttccttttcgcaggattcttcctccctccctctttccctcccttcctctttccatctaccctccgattgttcctgaaccgatgagaaataaagtttctgttgataatcatcaaaa

SEQ ID NO: 47439 - DNA, 1530 bp, Homo sapiens
gtgagggacccaggttcctgacacagacagactacacccgagggaatgaagagcaagcgccatgttgaagccatcattaccattcacatccctcttattcctgcagctgcccctgctgggagtggggctgaacacgacaattctgacgcccaatgggaatgaagacaccacagctggtgggaaatctgggactggagggggctgatttcttcctgaccactatgcccactgactccctcagtgtttccactctgcccctcccagaggttcagtgttttgtgttcaatgtcgagtacatgaattgcacttggaacagcagctctgagccccagcctaccaacctcactctgcattattggtacaagaactcggataatgataaagtccagaagtgcagccactatctattctctgaagaaatcacttctggctgtcagttgcaaaaaaaggagatccacctctaccaaacatttgttgttcagctccaggacccacgggaacccaggagacaggccacacagatgctaaaactgcagaatctggtgatcccctgggctccagagaacctaacacttcacaaactgagtgaatcccagctagaactgaactggaacaacagattcttgaaccactgtttggagcacttggtgcagtaccggactgactgggaccacagctggactgaacaatcagtggattatagacataagttctccttgcctagtgtggatgggcagaaacgctacacgtttcgtgttcggagccgctttaacccactctgtggaagtgctcagcattggagtgaatggagccacccaatccactgggggagcaatacttcaaaagagaatcctttcctgtttgcattggaagccgtggttatctctgttggctccatgggattgattatcagccttctctgtgtgtatttctggctggaacggacgatgccccgaattcccaccctgaagaacctagaggatcttgttactgaataccacgggaacttttcggcctggagtggtgtgtctaagggactggctgagagtctgcagccagactacagtgaacgactctgcctcgtcagtgagattcccccaaaaggaggggcccttggggaggggcctggggcctccccatgcaaccagcatagcccctactgggcccccccatgttacaccctaaagcctgaaacctgaaccccaatcctctgacagaagaaccccagggtcctgtagccctaagtggtactaactttccttcattcaacccacctgcgtctcatactcacctcaccccactgtggctgatttggaattttgtgcccccatgtaagcaccccttcatttggcattccccacttgagaattacccttttgccccgaacatgtttttcttctccctcagtctggcccttccttttcgcaggattcttcctccctccctctttccctcccttcctctttccatctaccctccgattgttcctgaaccgatgagaaataaagtttctgttgataatcatcaaaa

SEQ ID NO: 47440 - DNA, 4084 bp, Homo sapiens
  misc_feature (19)..(19): n is a, c, g, or t
  misc_feature (24)..(25): n is a, c, g, or t
aattatctttgcagacttnaacannaaagtcaaagaccataagtgtaaggttttatttctgaattcttgaatctatcccatttatctgtctgcaaggaacccacgcgtgggttccttgcaggcttagagagaaggtgcaagagctgtctgaaaaggtcagagcaaagcatgaagctggtgagcagctgtgaccatagctggaagcttctctctgagctttctcctggttacctcctcctcccctacgtgaccagtcagccaagtgttaagtccaggggaacattttgctgcttccaagtactgtctcactagtgttatttgccataacttgcggccacagggcaaggtccaggtgctcagacctttacatcctggactttccaaggcctcccaaagctctctggcacccagggaacagtgtgcgtgtcgagagcttaatccgcaggagcatagccatggttctctggggtccagtgctgggagctctgctggtggtcattgctggatacctgtgcctgccagggatgctccgacaacgcaggccatgggagccccctctggacaagggtaccgtgccctggcttggccatgccatggctttccggaagaatatgtttgaatttctgaagcgcatgaggaccaagcatggggatgtgttcacagtgcagctagggggccagtacttcaccttcgtcatggaccccctctcctttggccccatcctcaaggacacacagagaaaactagactttgggcaatatgcaaaaaaactggtgctgaaggtatttggataccgttcagtgcaaggggaccatgagatgatacactcagccagcaccaagcatctgaggggggatggcttgaaggatcttaatgagaccatgctggacagcctgtcctttgtaatgctgacgtccaaaggctggagtctggatgccagttgctggcatgaggacagcctctttcgcttctgctattacatcttgttcacagctggctacctgagcttgttcggctacacgaaggacaaggagcaggacctgctacaggcaggagagttattcatggagttccgcaagtttgaccttcttttcccaaggtttgtctactccctgctgtggccccgggagtggctagaagtgggccgactccagcgtctctttcacaagatgctctccgtgagccacagccaggagaaggagggcatcagcaactggctgggcaacatgcttcagtttctgagggagcagggggtaccctcagctatgcaggacaagttcaacttcatgatgctctgggcctcccaggggaacacggggcctacctctttctgggccctcttgtacctcctgaagcacccagaagctattcgggctgtgagggaggaagctacccaggtcctgggtgaggccaggctggagaccaagcagtcctttgccttcaaactcggtgccctgcaacacaccccagttctagacagcgtggtggaggagacgctgcggctgagggctgcacccaccctcctcaggttggttcatgaagactataccctgaagatgtccagtgggcaggagtatctgttccgccatggagacatcctggccctctttccctacctctcagtgcacatggaccctgacatccaccctgagcccaccgtcttcaagtacgatcgcttcctcaaccctaatggcagccggaaagtggacttcttcaagacaggcaagaagatccaccactacaccatgccctggggttcgggcgtttccatctgccctgggaggttctttgcactcagtgaggtgaagctctttatcctgcttatggtcacacactttgacttagagttggtggaccctgacacaccactaccccatgttgacccgcagcgctggggttttggcaccatgcagcccagccacgatgtgcgcttccgctaccgcctgcatcctacagagtgagcttggccaagccagctgcaaacctggccagaggagttctattgcatctctcacctgttctcacccctctgcagccccaagaccccactggccacccctccctctggtcctgtggcaccccctacctctgttctgcctgtcctcgctctctccccgcctagtcatctgacaggcttatcattctctttaaaataccatctctcagagtgggttctgccgaaccctcctctcacaggaagtccagaggaagggggagtatctgtgggcaacttggtttgggagatgatgcctgccttgagaagtcctgagtacagagactggttccccccagacacgagtaacatggcatcttgcaaacatcagcctccactctcccagcttgctttagttttttcagcaacacttatcccacatcctatggaattcaggttctagaacagtgtcatccaacataaatatgaagcaagctacatgagtagtggggttttttggttttgtttgtttgttttgagacagagtcttgctctgtcgccgaggctgcagtgcagcggtgcgatctctgctcactgcaacctctgcctcctgggtttaagcaattctcctgcctcagcctccccagtagctgggattacaggcacctaccaccttgcccagctaatttagtttcctggtaaacacatttttaaaaagtaaaatgaaacaattcatttttataatatactttacttaatccaatatatccaaaatattggcatttcaacgtgatcactattaaaaattttaacgtaatagtttttaccttccctttttcatcctgtcttcaaagtctggtatgtactgtacttttgcagttcttcccagttcagactagccacattccaagtgcttaattgccgtgtgtggcaggtggctgccctattggatagcacaggtctagagaaatgatacctttttttttttttgagacagagtctcactctgttgcccaggctgcagtgcagtggtgtgatcttggctcactacaacctctgcctcccgggttcaagtaattctcctgcctcaggcttctgagtagctgggattataggtgcgcaccaccacacccggctagtttctgtatttttagtagagacggcgtttcaccattttggccggcctcctcggcctcccaaagttctgggattacaggcatgagccactgtgcccagtcaggatgtctttaatgtaggaatcattcaagatccctcctcagtgcccatgtctcccccacctcagggtgctgtcaaccctcccttggtttccatgatcattgctgaactcagagctttcttctatccccagacccacatgggagtctcccagcacctctgactcagcttggccaatgcagaacttggcatctgaacccctgcctcttccctgaaccactcctcctcctgatttccctgctctctctgctcagaacactaccattcaccccatctcccagagacactctccctcctcctctttcaccttcatacaagcaggcccccgtcctatcagtacacccccctgtgatgcctctgaaatatgtaccctcctcccctctcctactgtcattcttatacctgtgatctctgcgtttctcttctacactgctgccagaggcctttttgccaaaagcactgctgattgtcactcttttactttcctggttcccctttgacttcacacacttgacgtttacattttgtcacagttggtcccccttgccttcacatacctgatgtttaaattttgtcacggttagtctccaaacttctcaactttgccagctttctccaatgaaaccatcagtagagacattgctgttcctgcccatcccagtgccagctactccttcctggaagccttcctggatttcacgcatcccatcctctggccagaaatggcctccgaactgtgcagctcctgcagcaccatttgtatcatagcatatctgttatgtgtcgttgctttctgtgtcttggtttctgcctgctgcccacttccctagactggagcctactggggcatggtattttattcatttctgacctccaattccctaagtggagattaaatgttagaaacctgaaaac

SEQ ID NO: 47441 - DNA, 282 bp, Homo sapiens
ctggactcttgcgtaaccttcaaacaatcctccctgcctccagtctgcacacggcaggcttccgggatgacctctgaacagaacgcgtccccattcccacacctaccaagcatggcgtttcaaagtgtctccagctctgccctccccagggcccattttctggttcaacactcatgccaagccaaccgccccatcctcgttccttgccccaaactctgcaggctgggctcatcatgcttgctcctagcttcaccagccctgttgccctcactgccaggcaag

SEQ ID NO: 47442 - DNA, 602 bp, Homo sapiens
attccttaggttgaaatgacttttattggagttttttggtttgtttggtttttttttcacatttctgaagtgcttgtttgtgtaccttgtgttactctgttattccactggtcttactctaaatcagaataattttctgtattgatttcctaaccactaaaaagactgcaattcccataagcacttaaagtagttctgcaagcttgtactttcactccacctatactttgtccccaagtgaacaagtatttgttaaaaactacatgttctgattttgataatgatactacaataataacagaatgactctgattttaggatatatagcctgaaatattataaagaggcattatgtctgcaacttattctcatgttattcagaaaaaaataacatgcatgtatacatatatatagagaaaaaaacatggtaaatgtaataaacatttggcaaatctggatgaaggatatatagaagttctttgtactgtatctttaagtatgaaattatttctaactttaacaagcacgaatgattcattaaaatgtatgacccttagctctctttcacaaccacagcaatcttgagaaggtggtcctctccc

SEQ ID NO: 47443 - DNA, 346 bp, Homo sapiens
cattttggccaggctggtctcgaattcctgacctcaagtgatccacctgccttggtctcccaagtgattccaggtggaaatctcccaagtgattacaggtgtgagccactgtgcctagccaggagctggcatttgaacaaagccctgacggaggtgagggagttctggggatgtctgcagggaagggtattttaagtaaagggaacagccagtgcaaggccctgagacaggagtgtgtccggtaagtctgaggagcttcagggagctagagtgttgagaggggaggaagcagagaagagagcgctaggagatgagggcagagaggcgatggggcagatctgtcagg

SEQ ID NO: 47444 - DNA, 800 bp, Homo sapiens
cagtgaaagcaaatactcagcaaaaaccatgtgccaggctctcttctaagcactttacatattaacccattgatccttataacaccttaggaaatggtaaaagactagtggttggaagacaaaatgacttctccttgccatacccagcagaaaaagaaaatatgtttgtagaccctctttcaactaacagagatgggtaatcttttttaaaaagagaaagttgagctagttgagatatgtgcagggtggtctggggagacagagaaatctgagagtttgtggggcagtgtgaggctacagggtatgttggaaccactggagtcccatctgggtcctgggctacaatgatgccaaagatcaagagggactcttaaagccgagccctagcaaagaaccagggatattcagagtggaggcaagacagagaagggtgttgaagccaggtctgcaacggagaattgccttaaggtcatttggaaccaggccgaaaagtttcaccagctagggtgaacctaaagttatatcagccaggcgcagtggcttatgcctataatcccaacacttggggaggccaaagtgggaagcccaggagttcaagaccagccttgccaacatagcgagaccatgtccctacaaaaatgtgaaaattaggcaggcgtgatggcacgtgcctgtagtcccagctacttgggaggctgaagtgggaggatcacctgagcctgggaggttgaggctgccatgagccatagtcacgccactgcattctagcctggacaacagagcaagaccttgtcttaaaa

SEQ ID NO: 47445 - DNA, 890 bp, Homo sapiens
acatcttcctcttttgacatagcaaggcatggattctgtcaggttcatctttatagcctctgaccctggcccagaggtgcctaggaaacatttaaagagtaaataattgattctcaaagataagcctttccacctcggtcaccacccaatccatgtgcgcagaactcagaaggaggagccaggttggattgtcatgtacaaacagcatctgctgtggtctagtccctttgtctcccaaatctctttgcttctgttctgctgtgtttcagggcaggaaatagaaatcagtctagatattttattttttaatttaatttaatttttttttttgagacagagtctcactctgtcgcccaggctggaatgtagtggcaccgtctggctcctctgcctcctgggttcaagcgattctcctgcctcagccttctaagtagctgggattacaggtgcccgccatcacgcccagccaatttttgtatttttagtagagacagggtttcaccatgttggccaggctggtctcgaactcctgacctcaggtgatctgcccgccacggcctcccaaaatgctaggattacaggcataagccaccgtgtccagcaccagtctaggtattttaagcagaaagatatttactagagggaattttgtgcttatagaggcataagggggctggaggaatggggctccaggaatgtctcccagctaatggtagtagtttatataataattaataaacaaacgtatgttggcatggctgttcaaaaaaacacctctcttctcaaacaaaacatgtcggccgcttggcccagtcgctttagattcggcaagtttatgatgcggcccgaattgagctacttggccacttgcccttatggggccgatttcc

SEQ ID NO: 47446 - DNA, 1400 bp, Homo sapiens
gtgtactgtcaccacgtgggatggaaccagaggcatggaagcaagacgctaaatgaagagggccataagggctgggattcccaggcaccttaggaacagcttgtctttttttttttcctctccaaaaaaaatgtttaagggacggtgtctcctgtcacccaggctggagtgcaatggcacgatcatggctcattgcagcctctaactccggggctcgggcaatcctcccacctcagcctaccaagtagctgtgaccacagctgcccctcaccatgctaagctaatttttttaattagatagtacataaacgtcccaaaattagaagataaaaagacatgagggatccattctaatttgtgtttggagtgtaatggtccagctccattcttctgcacatggatatccagttttacacaacactgtgaatgtaatgaatgccactgaatcatacactcaaaaatagctaaaatggcaaattgtctgttatctctttttaaccaccatttttgaaaattaattataccaaaaaaccattgaatagtgcactttatttatttatttatttgtttatttatttatttattttagaaataagagcctgggtgacaagagtgagactctgtctccaaaaaaaaaaaaaaaaaaaaaaaaaaactggattgcctggctctactccgggcacagcatgcaggcccagttctgctgctctgctgtttgttctgctttcctccacatattggcatcaccctctggtgccaagatggctgctgcattccaggcatcacatccagactcagacccagagaagctgcccatccctacctgggtgagcctttgtaggaacgagaaaccgcatccagcagcagaaacctcacccagcagcgtcttttccggtctcattcaccagcgccgcccaccgctcaaccaatccctggccaaaagaatgggaccgcctggaaggctggaccaaacaggacctgccctctggggctggggagaggcccagatgaaggctgcaggacaggatggactcctagacctctgttaccagcagtgactacctctgtctgggtggttggaacatgtttgaattttattctaagtactgtctacaagttctgcaataaaccttgactcttcttttaataatgcaaaaggaatcgaagtgattgtttgaaagggagaggaagaaagagagagggagggagggaagaatggagggaggcagggaaggagacagagagagtagaatccagccaccggaaaatccagaatagctggctttgcttaatccatgcctggaaataactgctgggtttgcaacaacttctctcccggagacagaccaaggaaactacaaaactgcaggaaggattgaagggccgggcacagtggctca

SEQ ID NO: 47447 - DNA, 2771 bp, Homo sapiens
gtgtactgtcaccacgtgggatggaaccagaggcatggaagcaagacgctaaatgaagagggccataagggctgggattcccaggcaccttaggaacagcttgtctttttttttttcctctccaaaaaaaatgtttaagggacggtgtctcctgtcacccaggctggagtgcaatggcacgatcatggctcattgcagcctctaactccggggctcgggcaatcctcccacctcagcctaccaagtagctgtgaccacagctgcccctcaccatgctaagctaatttttttaattagatagtacataaacgtcccaaaattagaagataaaaagacatgagggatccattctaatttgtgtttggagtgtaatggtccagctccattcttctgcacatggatatccagttttacacaacactgtgaatgtaatgaatgccactgaatcatacactcaaaaatagctaaaatggcaaattgtctgttatctctttttaaccaccatttttgaaaattaattataccaaaaaaccattgaatagtgcactttatttatttatttatttgtttatttatttatttattttagaaataagagcctcactttgttgcccaggctggagtgcagtggcgtgatcatggctcattgcagcctcgacctgctgggctcgggctatccttccatctcagcctcccgagtagctgggactataggtgggcgccaccccacctggctaaatctctttttaacttttgtagagataggcatctcgctatgttgcctaggctgggctggaactcctgggctcaagtgctcctcctgccttggcctcccaaagcgctaggattacagatgtgagccaccgcgcccaccctgaaccttactttttttgctcagtttctggtaattcagagaatgcctcctgagttgttctacacccacctcatattccatgggagggctgtacagggcttttttaacgaggcctctaaggacaggcatttgtatcctttccagcctttcactattacaatgttgtagtgaataactttacacactgtcatttattttacttttttttttttttattttagagaaaggaatcttgccatcttgcccaggctggtctcaaattcctgggcccaaacaatcctcccgcctgtggcctcctaaagtactgggatttataggcataagccaccgtgcctggccaatgcacactgtcatttagctcatgttaacacctgagtgtaggacacactcctggaggtggaattgctgggccaaagagtatgtttcttgtcattgtgatagatattgacaaatgaaccctcacagaagttgtgctgagttctgttcccaccagcgacgtaggcgatgacctttttctggagggagggggcatccttggagtccacagagccaggaatggagagtgggcccagaattttggtataggtgttgtataaacttatagtaaggttaagaaaaccgcaactatccttatcagagacttggcggggggcagggtatgatggagatcataaggaggctaaaacactccacaccctccctctgcattgctcctgcacgggagtcgggaatcttttcaggttgatacgatctcaccttgaggagctgtgaggtcccagaagcctctgggttgcagattgcttggggtgaaaatgtctgtgctactgaaatctaactttttacaaaaaattacgggctgggcgcggtggctcacgcctgtaatcccagcactttgggaggctgcagcgggtggatcacttgaggtaaggagttcaagaccagaccatagtgaaaccgtgtctctacaaaaaaaattagccaggtgtggtggtgcatgcttgtgatcccagctactcggaaggctgaggtgggagaatcccttgagcccgggaagtggaggctggagtaaaccatgatcgagttactgcactccagcctgggtgacaagagtgagactctgtctccaaaaaaaaaaaaaaaaaaaaaaaaaaactggattgcctggctctactccgggcacagcatgcaggcccagttctgctgctctgctgtttgttctgctttcctccacatattggcatcaccctctggtgccaagatggctgctgcattccaggcatcacatccagactcagacccagagaagctgcccatccctacctgggtgagcctttgtaggaacgagaaaccgcatccagcagcagaaacctcacccagcagcgtcttttccggtctcattcaccagcgccgcccaccgctcaaccaatccctggccaaaagaatgggaccgcctggaaggctggaccaaacaggacctgccctctggggctggggagaggcccagatgaaggctgcaggacaggatggactcctagacctctgttaccagcagtgactacctctgtctgggtggttggaacatgtttgaattttattctaagtactgtctacaagttctgcaataaaccttgactcttcttttaataatgcaaaaggaatcgaagtgattgtttgaaagggagaggaagaaagagagagggagggagggaagaatggagggaggcagggaaggagacagagagagtagaatccagccaccggaaaatccagaatagctggctttgcttaatccatgcctggaaataactgctgggtttgcaacaacttctctcccggagacagaccaaggaaactacaaaactgcaggaaggattgaagggccgggcacagtggctca

SEQ ID NO: 47448 - DNA, 715 bp, Homo sapiens
agacgctgctgggtgaggtttctgctgctggatgcggtttctcgttcctacaaaggctcacccaggtagggatgggcagcttctctgggtctgagtctggatgtgatgcctggaatgcagcagccatcttggcaccagagggtgatgccaatatgtggaggaaagcagaacaaacagcagagcagcagaactgggcctgcatgctgtgcccggagtagagccaggcaatccaccgctcaaccaatccctggccaaaagaatgggaccgcctggaaggctggaccaaacaggacctgccctctggggctggggagaggcccagatgaaggctgcaggacaggatggactcctagacctctgttaccagcagtgactacctctgtctgggtggttggaacatgtttgaattttattctaagtactgtctacaagttctgcaataaaccttgactcttcttttaataatgcaaaaggaatcgaagtgattgtttgaaagggagaggaagaaagagagagggagggagggaagaatggagggaggcagggaaggagacagagagagtagaatccagccaccggaaaatccagaatagctggctttgcttaatccatgcctggaaataactgctgggtttgcaacaacttctctcccggagacagaccaaggaaactacaaaactgcaggaaggattgaagggccgggcacagtggctca

SEQ ID NO: 47449 - DNA, 418 bp, Homo sapiens
gaggccctataagggatactttcgtttttcactagtggtgtcttagagagttgtttcatgcataatttattggatgagtatcatttgttccctaaaggatgctaggttatatttttgaattttgtcaacaaagcaatttttatgaagctgaagatcatatttttcacatttactttgacatatccgtgactcagattgcggaaacaggcctgaacccccagtgcttcttagctcagtaacagtggtgataattttgggtgcttgctctatgcctgatactgttccaagcactttccatgcctcagcctcacagcaaacccggagtaggttctattattagctccattttgcatcagaggagaaaactgccccaggtcaaatagctggtgtgtggggtggagctgggtttgagcccagg

SEQ ID NO: 47450 - DNA, 410 bp, Homo sapiens
gtaacttgctcctcaccttccaccgtgattgtgaggcctccccagccatgtggaactattatctgagtaggctgaaccatcggtgaaaaggaggccaagcatctcaaaaataggacacgtgagagtatggagccaatgtgacactcagatttgacacatacagaagcgtgaaaaactcttgtgtgactgggatagctcctctgcaatgagaacatgcctgggataatgtactgaaaagatgtgagaaatacatgaagcagagtccagtcatcccagccaagaaccagctgtgaatgtaaccgcatgactttgaggcaagtccagaccaagaacaaagaaccactggtcttaaagacagacctgcagattcctgagctaaataaaagtttattgttgaaaggcactgagtt

SEQ ID NO: 47451 - DNA, 3599 bp, Homo sapiens
  misc_feature (1349)..(1349): n is a, c, g, or t
  misc_feature (2088)..(2088): n is a, c, g, or t
gctagaatgcactgtctttgaagcattgagcaggccctcaccagacaccaaatctgctggttcctggatcttggacttcccagcctcataactaggcatcacaaatctccgagaggaacgcatccacttcctggcctggtagagcggagagcagaggtgggcccaggagtccaagaacttcccctaaggctgctagtcgcacccatctcttgagcagagacccaagagggcaggacaggaagaatggaagtgagatttggccccggtcatgttttccaaagtgctgacatcaggaaaataatagaagttaacgcagatatggggctgccactgaggagagagaagactgaaagaagcatatagataaaagtttcagttacctgaggtcaaccttggtctgaaattagattatctgagtaggctgaaccatcggtgaaaaggaggccaagcatctcaaaaataggacacgtgagagtatggagccaatgtgacactcaggtgagttagccttatgatccctaagcatgcagtccttggaccagatgcatcaggatcttctggtaagtgtgctaaaatataggctactgagacccaccctatgtctgtcaaatcagaatattctaaggaagcaggtcccagggaatatatattttaaagctccctaaatacacttcatgggctgccagatttgggaatcgcaggattaggtagctacctaaatgaagacacttaaatgtgccaaaagcttctctttcacccatccatttatccatctattcacccatccatcaaccaaacatgtgccagtatctggtatttgcttcatgacctgctactgctgtggtgggtgcaaagataaatgatcaatgttctcaaagagtcaatagtctaagagaatggatgaatgaagtataaataataaaagatgtgctatgaagtacgatgggggtccagaaaagtatatacttattccagattgtggcagaagactctggagaggtttcgttttatataatggcatgaattccccttcagatccatctctaaatcaagcttcacctacttctgactgtttgtgttagataccaatcctatggatttctatagttttctggaattactttttacacactacagtagagttatgtggctgcttccatgttttacttagaagctgagagcttgataaaagtgaaggctgcatcttaatcatcaccttttcccccacctcctagctagggtctggctctgcctaagcagctgccattggtgctcaataaacattgaagaagttgggttgttgcactggttatgcaaagaaagggacacagtgggtgtaagcgtggggnggggagcaaagctgggaccaatcatggaacacctagaatttgaatcaaatttgggctttagtttttaggcaatgagcctaagacaattttggaagcatcctttgttcacaaaaaagttagaaatggtgagaactagggcagtctatcacaaagtgtgggagaggtaattttatatgtaaactattataaatcacatttgagttatgaagtgagacaattattccctttgcagtttcatttcattctgtctaattatttcagggagacattctgaattgggtgctagtattttaacacttctctaacactttctctttttaaattttgtttatttttaattgacaaataataattgtgtatatttatggggtacattgggcatggagggtgggttattctgtgatgtcttgacctgtgtgtacattgtaacacttctctaatactttctaatccagccatccccaacctttttggcaccaggaaccagttttgtggaagacgatttttccacagatggttgggggatgattttgggatggaactattccacctcagatcatcaggcattagattctcataagaagcatgcaacgtagatccctcacatatacagttcacaatagggttcatggttctatgagaatctaatgctgccactgatctaacaggaggcagagctcagctgataatgctttttcacctgctactgacttcctgctgtgttgcccagttcctaacnggccatagactggtaccagtccatagcctggggcttgaggacccctgctctatgatgtctatacaacaataaaattgcctaatgatacatttctcagaatgtatacccatcattaagtgacacatggctgcttgtgtatttttatatatagctaaatgtggctagattagatgtgatatctctttggatgcagggataggtgggcaagtttctaaaacacgaaactaactgtgtcttttctctgcttaagaaccttccatgactccctgttgttcataaccggataaattctaagctgcctaactcagaattctagcttagagatgtctacgcctggctgctcccaacagttagtctcatgtcctgtctcaaacatggggcttcagtaagaatgaaatttccaaggagaattttatattctgcatgcctttaaaggctcaagcctggagaccccccttcttgcctctcttacccttttcaccagggcaccctctattcatccttccagagccttctctgggaagtcctttcccaaagcccacttcccagcctaagcttagtgctatttctgtagatacccagaaacacatcaactatatgtacagtttaccctagtatgtcaaagttatagttactgccttaggagggattttgagcttttcatctttattactcgggcttctgctactgtgtcaagcaggtagttgacactcaacaaatgtttgtttagcctaactcagcagaacacatggagtgtgttcacatggagtaacctgattttgcttagtctgcaacatttcttgcatgcatcccctgcttgcagtctcaattacagtcatcctgtttcagttttcttaacttgtcactcccttcctctgataacttttgccatacctctgtataacatggcctactttttgaaaaagatttttttacattcacctacatttgtctcaaatttttttttaaaagaaactttgtattactaccgtcattgaaaaccttcatcacttggcacaaaagaaagtttaaaaaatacaacaaaagacattctactaaattctggctagacaaccttgcctgctctagtagatgcactgagaccattaatgaatctttcatcccaccttgtgtcatattctttgccacatgactttgggtctccctcactactaggcaagttcctgtctccatctcttgattctgaattcagccataatacttgctctccccaatgttgttttagcagatttgacacatacagaagcgtgaaaaactcttgtgtgactgggatagctcctctgcaatgagaacatgcctgggataatgtactgaaaagatgtgagaaatacatgaagcagagtccagtcatcccagccaagaaccagctgtgaatgtaaccgcatgactttgaggcaagtccagaccaagaacaaagaaccactggtcttaaagacagacctgcagattcctgagctaaataaaagtttattgttgaaaggcactgagtt

SEQ ID NO: 47452 - DNA, 487 bp, Homo sapiens
accccatgactggtatagaactgaaagtaaatcaagctggacttatgaaggattcctctctccattcgtggatgaatttgagtggcactggaacaagtttcagttacctgaggtcaaccttggtctgaaattagattatctgagtaggctgaaccatcggtgaaaaggaggccaagcatctcaaaaataggacacgtgagagtatggagccaatgtgacactcagatttgacacatacagaagcgtgaaaaactcttgtgtgactgggatagctcctctgcaatgagaacatgcctgggataatgtactgaaaagatgtgagaaatacatgaagcagagtccagtcatcccagccaagaaccagctgtgaatgtaaccgcatgactttgaggcaagtccagaccaagaacaaagaaccactggtcttaaagacagacctgcagattcctgagctaaataaaagtttattgttgaaaggcactgagtt

SEQ ID NO: 47453 - DNA, 723 bp, Homo sapiens
gctagaatgcactgtctttgaagcattgagcaggccctcaccagacaccaaatctgctggttcctggatcttggacttcccagcctcataactaggcatcacaaatctccgagaggaacgcatccacttcctggcctggtagagcggagagcagaggtgggcccaggagtccaagaacttcccctaaggctgctagtcgcacccatctcttgagcagagacccaagagggcaggacaggaagaatggaagtgagatttggccccggtcatgttttccaaagtgctgacatcaggaaaataatagaagttaacgcagatatggggctgccactgaggagagagaagactgaaagaagcatatagataaaagattatctgagtaggctgaaccatcggtgaaaaggaggccaagcatctcaaaaataggacacgtgagagtatggagccaatgtgacactcagatttgacacatacagaagcgtgaaaaactcttgtgtgactgggatagctcctctgcaatgagaacatgcctgggataatgtactgaaaagatgtgagaaatacatgaagcagagtccagtcatcccagccaagaaccagctgtgaatgtaaccgcatgactttgaggcaagtccagaccaagaacaaagaaccactggtcttaaagacagacctgcagattcctgagctaaataaaagtttattgttgaaaggcactgagtt

SEQ ID NO: 47454 - DNA, 501 bp, Homo sapiens
gtggcgcacacctgtaatcccagctactcggaggctgaggcaggagaattggttggccccaggaggcagaggttgcagtgagccaagatcacaccattgcactccagcctgggcgacaagagtaaaactcagtctcaaaacaaaaacaaaaacaaaaacaaaacaaaacaaaacaaaaaaatacactatgtcaagttattaggtaacccataacatcctttgttttaacatagccttgccaagggccgggcacagtggctcacgcctgtaatcctaacactttgggaggctgaggcgggcagatcacttgaggtcaggagttcgagaccagtctggccaatatggtgagaccctgtctctactaaaaataaaaaaattagccaggcgtggtggtgggtgcgtgtagtcccatctacttgggtagctgaggaacgagaattgcttgaacctgggaggtggaggttgcagtgagctgagtgagatcatgccactgcactccag

SEQ ID NO: 47455 - DNA, 357 bp, Homo sapiens
agagatggggtttcatcaagttggccaggatggtctcactctcctgaccttgtgatccacctgcttcggcctcccaaagtgctgggattaaaggtgtgagccaccgtgcctggccaataacaaccattatataatttttaaatgtccttaattaataagactttgttaagtaccatttggccagtttatacttctccccagcaagagcaagaacagaagaacaccttaatcagatttgttttttgtgggcttttgttgagagggagtctctctctgtcacccaggctggaatgcagtggcacgatctctgctcactgcaacctctgcctcccagatttgagcgattctcctgcctca

SEQ ID NO: 47456 - DNA, 867 bp, Homo sapiens
ccaagggctactgttcccagcgaggcccgcgcggcggcaccgcgaagggaggagtggcaacatggcgtcttcgggagctggtgaccctctggattctaagcgtggagaggccccgttcgctcagcgtatcgacccgactcgggagaagctgacacccgagcaactgcattccatgcggcaggcggagcttgcccagtggcagaaggtcctaccacggcggcgaacccggaacatcgtgaccggcctaggcatcggggccctggtgttggctatttatggttacaccttctactcgatttcccaggagcgtttcctagatgagctagaagacgaggccaaagctgcccgagcccgagctctggcaagggcgtcagggtcctaatctggatgggtattgatcatgtccaacctgctggagccccttcacatggtggatgatgccccatgaccctgtagaaattgaatcctgctcacaacattgttggccttcttactaaccttggaccgtgattgagcccaagaaaccagggacttacgcatttggccaatgtcaaaagaacagaactttgcccactgcacacttgctgtgtacaatgactgagccctttcttgtagtttgtttccttgtttgagaggtgtgcatgcgaccgtggcttttcccaaagtttctgactttgtggtttacccccttcaccttccagggacgcagttgttacgaggttagacgtggcagctctgtgcagtgtttgagcctacagtgggatacatagggtcaaattgagaataataaactgagtcattctcctggaaaaaaaaaaggtttttctacttgaaggacactgttttccctagcacatttgcagggtt

SEQ ID NO: 47457 - DNA, 809 bp, Homo sapiens
ccaagggctactgttcccagcgaggcccgcgcggcggcaccgcgaagggaggagtggcaacatggcgtcttcgggagctggtgaccctctggattctaagcgtggagaggccccgttcgctcagcgtatcgacccgactcgggagaagctgacacccgagcaactgcattccatgcggcaggcggagcttgcccagtggcagaaggtcctaccacggcggcgaacccggaacatcgtgaccggcctaggcatcggggccctggtgttggctatttatggttacaccttctactcgatttcccaggagcgtttcctagatgagctagaagacgaggccaaagctgcccgagcccgagctctggcaagggcgtcagggtcctaatctggatgggtattgatcatgtccaacctgctggagccccttcacatggtggatgatgccccatgaccctgtagaaattgaatcctgctcacaacattgttggccttcttactaaccttggaccgtgattgagcccaagaaaccagggacttacgcatttggccaatgtcaaaagaacagaactttgcccactgcacacttgctgtgtacaatgactgagccctttcttgtagtttgtttccttgtttgagaggtgtgcatgcgaccgtggcttttcccaaagtttctgactttgtggtttacccccttcaccttccagggacgcagttgttacgaggttagacgtggcagctctgtgcagtgtttgagcctacagtgggatacatagggtcaaattgagaataataaactgagtcattctcctgga

SEQ ID NO: 47458 - DNA, 555 bp, Homo sapiens
aggctcgggcctggtgggctaatggttacaccttctactcgatttcccaggagcgtttcctagatgagctagaagacgaggccaaagctgcccgagcccgagctctggcaagggcgtcagggtcctaatctggatgggtattgatcatgtccaacctgctggagccccttcacatggtggatgatgccccatgaccctgtagaaattgaatcctgctcacaacattgttggccttcttactaaccttggaccgtgattgagcccaagaaaccagggacttacgcatttggccaatgtcaaaagaacagaactttgcccactgcacacttgctgtgtacaatgactgagccctttcttgtagtttgtttccttgtttgagaggtgtgcatgcgaccgtggcttttcccaaagtttctgactttgtggtttacccccttcaccttccagggacgcagttgttacgaggttagacgtggcagctctgtgcagtgtttgagcctacagtgggatacatagggtcaaattgagaataataaactgagtcattctcctgga

SEQ ID NO: 47459 - DNA, 1379 bp, Homo sapiens
ccaagggctactgttcccagcgaggcccgcgcggcggcaccgcgaagggaggagtggcaacatggcgtcttcgggagctggtgaccctctggattctaagcgtggagaggccccgttcgctcagcgtatcgacccgactcgggagaagctgacacccgagcaactgcattccatgcggcaggcggagcttgcccagtggcagaaggtcctaccacggcggcgaacccggaacatcgtgaccggcctaggcatcggggccctggtgttggctatttatggttacaccttctactcgatttcccaggagcgtttcctagatgagctagaagacgaggccaaagctgcccgagcccgagctctggcaagggcgtcagggtcctaatctggatgggtattgatcatgtccaacctgctggagccccttcacatggtggatgatgccccatgaccctgtagaaattgaatcctgctcacaacattgttggccttcttactaaccttggaccgtgattgagcccaagaaaccagggacttacgcatttggccaatgtcaaaagaacagaactttgcccactgcacacttgctgtgtacaatgactgagccctttcttgtagtttgtttccttgtttgagaggtgtgcatgcgaccgtggcttttcccaaagtttctgactttgtggtttacccccttcaccttccagggacgcagttgttacgaggttagacgtggcagctctgtgcagtgtttgagcctacagtgggatacatagggtcaaattgagaataataaactgagtcattctcctggaagtcaagtgagtatggaggctgagaggcagcatatggcacttcatgctggaaagcttcacaagcagtagctgcagtggtggcattgccccagggagctgtaaatgtttaactagaattactttttccatgagatctttccacctgatttaagggagagatcactgggcagtttgagactgaacccacgtcttaggggaaggaaggtcactcttctgtcctctacccacaagaacatactgtaactctactgcttttcccatccccagagagagggagggagagagaggtggatgaagggtgaaagacaagcagtcttcattcttttaactttccctggtacctgcctatacaggtctagggtggggtctggaggggatcctaacttagtcaagtggatcactgaccttgcagtttcctcattaactgatggcaggaagccagagggctgggcagcttccacccctgcctcccattgtgaaaagaaagtcccttttaaatcctcccctgcctcaccccacaagtctttgctcccccaattcctaaggcatggcatatggattcacggcatt

SEQ ID NO: 47460 - DNA, 1191 bp, Homo sapiens
ccaagggctactgttcccagcgaggcccgcgcggcggcaccgcgaagggaggagtggcaacatggcgtcttcgggagctggtgaccctctggattctaagcgtggagaggccccgttcgctcagcgtatcgacccgactcgggagaagctgacacccgagcaactgcattccatgcggcaggcggagcttgcccagtggcagaaggtcctaccacggcggcgaacccggaacatcgtgaccggcctaggcatcggggccctggtgttggctatttatggttacaccttctactcgatttcccaggagcgtttcctagatgagctagaagacgaggccaaagctgcccgagcccgagctctggcaagggcgtcagggtcctaatctggatgggtattgatcatgtccaacctgctggagccccttcacatggtggatgatgccccatgaccctgtagaaattgaatcctgctcacaacattgttggccttcttactaaccttggaccgtgattgagcccaagaaaccagggacttacgcatttggccaatgtcaaaagaacagaactttgcccactgcacacttgctgtgtacaatgactgagccctttcttgtagtttgtttccttgtttgagaggtgtgcatgcgaccgtggcttttcccaaagtttctgactttgtggtttacccccttcaccttccagggacgcagttgttacgaggttagacgtggcagctctgtgcagtgtttgagcctacagtgggatacatagggtcaaattgagaataataaactgagtcattctcctggaaaaaaaaaaaaaaaaaactcgaggacgccgcgtgtacccggttgtcctcaggcgctgtcagatctgtggtttttctacttgaaggacacaatgttttccaaactagcacatttgcagaggtttgctgtacttaatcggggagttcattcttcagggcttctggtacatcttgtgcaactaaaaaaacaagtcaaggcccttccacctttgatgacatttttgtaagggaatctaagtttgtgcacacaactaccaatctttacctggagcccctgggagagggaaagggttttccttattggatgttgaaggccgaattttggccttctggggtttttccaggggtgtcaacccggcattgtacccccggttggtgctcctt

SEQ ID NO: 47461 - DNA, 591 bp, Homo sapiens
ccaagggctactgttcccagcgaggcccgcgcggcggcaccgcgaagggaggagtggcaacatggcgtcttcgggagctggtgaccctctggattctaagcgtggagaggccccgttcgctcagcgtatcgacccgactcgggagaagctgacacccgagcaactgcattccatgcggcaggcggagcttgcccagtggcagaaggtcctaccacggcggcgaacccggaacatcgtgaccggcctaggcatcggggccctggtgttggctatttatggttacaccttctactcgatttcccaggagcgtttcctagatgagctagaagacgaggccaaagctgcccgagcccgagctctggcaagggcgtcagggtcctaatctggatgggtattgatcatgtccaacctgctggagccccttcacatggtggatgatgccccatgaccctgtagaaattgaatcctgctcacaacattgttggccttcttactaaccttggaccgtgattgagcccaagaaaccagggacttacgcatttggccaatgtcaaaagacagactccgcggggcgcgcgggggcgggggtgg

SEQ ID NO: 47462 - DNA, 459 bp, Homo sapiens
  misc_feature (4)..(4): n is a, c, g, or t
  misc_feature (26)..(26): n is a, c, g, or t
  misc_feature (28)..(28): n is a, c, g, or t
  misc_feature (30)..(30): n is a, c, g, or t
gcancttgctgcctgcaggttttttngngnaccccccctgggtattgatcatgtccaacctgctggagccccttcacatggtggatgatgccccatgaccctgtagaaattgaatcctgctcacaacattgttggccttcttactaaccttggaccgtgattgagcccaagaaaccagggacttacgcatttggccaatgtcaaaagaacagaactttgcccactgcacacttgctgtgtacaatgactgagccctttcttgtagtttgtttccttgtttgagaggtgtgcatgcgaccgtggcttttcccaaagtttctgactttgtggtttacccccttcaccttccagggacgcagttgttacgaggttagacgtggcagctctgtgcagtgtttgagcctacagtgggatacatagggtcaaattgagaataataaactgagtcattctcctgga

SEQ ID NO: 47463 - DNA, 715 bp, Homo sapiens
tggcaacatggcgtcttcgggagctggtgaccctctggattctaagcgtggagaggccccgttcgctcagcgtatcgacccgactcgggagaagctgacacccgagcaactgcattccatgcggcaggcggagcttgcccagtggcagaaggtcctaccacggcggcgaacccggaacatcgtgaccggcctaggcatcggggccctggtgttggctatttgtatccgtccgtgttgtagactcaaggggaccgcatataggggcaggggaacagagtgtgcaagagggctgaaccacccgtttaattttggggtaaaatgggtagtactttcctttgttattcctaaggtactcttttaatttgatttattaataataacggaattggggttcagggtttagaaacagcagcggcgggaagccggaatcactgatttgggagagtaacaagagtggtagagcaaatctaggaaaggggaatgtgcatattctgtgtggtttcctgaacctacctccccagatggttacaccttctactcgatttcccaggagcgtttcctagatgagctagaagacgaggccaaagctgcccgagcccgagctctggcaagggcgtcagggtcctaatctggatgggtattgatcatgtccaacctgctggagccccttcacatggtggatgatgccccatgaccctgtagaaattgaatcctg

SEQ ID NO: 47464 - DNA, 791 bp, Homo sapiens
cataagctagtacgagcctcggtgaaatcggccgagtggcaacatggcgtcttcgggagctggtgaccctctggattctaagcgtggagaggccccgttcgctcagcgtatcgacccgactcgggagaagctgacacccgagcaactgcattccatgcggcaggcggagcttgcccagtggcagaaggtcctaccacggcggcgaacccggaacatcgtgaccggcctaggcatcggggccctggtgttggctatttatggttacaccttctactcgatttcccaggagcgtttcctagatgagctagaagacgaggccaaagctgcccgagcccgagctctggcaagggcgtcagggtcctaatctggatgggtattgatcatgtccaacctgctggagccccttcacatggtggatgatgccccatgaccctgtagaaattgaatcctgctcacaacattgttggccttcttactaaccttggaccgtgattgagcccaagaaaccagggacttacgcatttggccaatgtcaaaagaacagaactttgcccactgcacacttgctgtgtacaatgactgagccctttcttgtagtttgtttccttgtttgagaggtgtgcatgcgaccgtggcttttcccaaagtttctgactttgtggtttacccccttcaccttccagggacgcagttgttacgaggttagacgtggcagctctgtgcagtgtttgagcctacagtgggatacatagggtcaaattgagaataataaactgagtcattctcctgga

SEQ ID NO: 47465 - DNA, 1304 bp, Homo sapiens
ccaagggctactgttcccagcgaggcccgcgcggcggcaccgcgaagggaggagtggcaacatggcgtcttcgggagctggtgaccctctggattctaagcgtggagaggccccgttcgctcagcgtatcgacccgactcgggagaagctgacacccgagcaactgcattccatgcggcaggcggagcttgcccagtggcagaaggtcctaccacggcggcgaacccggaacatcgtgaccggcctaggcatcggggccctggtgttggctatttatggttacaccttctactcgatttcccaggagcgtttcctagatgagctagaagacgaggccaaagctgcccgagcccgagctctggcaagggcgtcagggtcctaatctggatgggtattgatcatgtccaacctgctggagccccttcacatggtggatgatgccccatgaccctgtagaaattgaatcctgctcacaacattgttggccttcttactaaccttggaccgtgattgagcccaagaaaccagggacttacgcatttggccaatgtcaaaagaacagaactttgcccactgcacacttgctgtgtacaatgactgagccctttcttgtagtttgtttccttgtttgagaggtgtgcatgcgaccgtggcttttcccaaagtttctgactttgtggtttacccccttcaccttccagggacgcagttgttacgaggttagacgtggcagctctgtgcagtgtttgagcctacagtgggatacatagggtcaaattgagaataataaactgagtcattctcctggaaaaaaaaaaaaaaaaaaaaaaaaaaaaaaaaaaaaaaaaaaaaaaaaaaaaaaaaaaaaaaaaaaaaaaaaaaaaaaaaaaaaaaaaaaaaaaaaaaaacacaaaaaaaaaagaaaaaaaaaaaaaaagaaaaacaaaaaaaaagagaagagacagagacagaagaagagaaagaagagaaaaaaaaagaagaaaaagagagaaaaagagagaagaaaaaagaagagaagagaaatacaagaagaagaaagaaaataagggggaagagaaaaaagagagagaaagagagaggagaacaagagagaaagaaaggaaggagaaaaggagaaaacacgagagacagaaaacgagagaggtgcgggagtccagagacagagagggagaaggagagaagaagacaagaccggacgacgaaacgcacgaagaaggaggaaaagaagcagagagtgagtgtgcgataacgaccgagaggacgacgcgcgagcaaccagcaga

SEQ ID NO: 47466 - DNA, 1325 bp, Homo sapiens
ccaagggctactgttcccagcgaggcccgcgcggcggcaccgcgaagggaggagtggcaacatggcgtcttcgggagctggtgaccctctggattctaagcgtggagaggccccgttcgctcagcgtatcgacccgactcgggagaagctgacacccgagcaactgcattccatgcggcaggcggagcttgcccagtggcagaaggtcctaccacggcggcgaacccggaacatcgtgaccggcctaggcatcggggccctggtgttggctatttatggttacaccttctactcgatttcccaggagcgtttcctagatgagctagaagacgaggccaaagctgcccgagcccgagctctggcaagggcgtcagggtcctaatctggatgggtattgatcatgtccaacctgctggagccccttcacatggtggatgatgccccatgaccctgtagaaattgaatcctgctcacaacattgttggccttcttactaaccttggaccgtgattgagcccaagaaaccagggacttacgcatttggccaatgtcttcttgtagtttgtttccttgtttgagaggtgtgcatgcgaccgtggcttttcccaaagtttctgactttgtggtttacccccttcaccttccagggacgcagttgttacgaggttagacgtggcagctctgtgcagtgtttgagcctacagtgggatacatagggtcaaattgagaataataaactgagtcattctcctggaagtcaagtgagtatggaggctgagaggcagcatatggcacttcatgctggaaagcttcacaagcagtagctgcagtggtggcattgccccagggagctgtaaatgtttaactagaattactttttccatgagatctttccacctgatttaagggagagatcactgggcagtttgagactgaacccacgtcttaggggaaggaaggtcactcttctgtcctctacccacaagaacatactgtaactctactgcttttcccatccccagagagagggagggagagagaggtggatgaagggtgaaagacaagcagtcttcattcttttaactttccctggtacctgcctatacaggtctagggtggggtctggaggggatcctaacttagtcaagtggatcactgaccttgcagtttcctcattaactgatggcaggaagccagagggctgggcagcttccacccctgcctcccattgtgaaaagaaagtcccttttaaatcctcccctgcctcaccccacaagtctttgctcccccaattcctaaggcatggcatatggattcacggcatt

SEQ ID NO: 47467 - DNA, 496 bp, Homo sapiens
ctatgtgcaaagtgttagaggaatagcacaagaccagtttggcttatcagagtgagcaatggtaataaggtaatggtaggggagggcaaagctgcagggccttttaggtgataggattcagccttttacccttagtgagatacgaaaccaatggatgatgtttgactagaggagtgacatgttctgacttaaattttcaaaagatcactctgttactttgttgagaataaactatagtgaggcaagggctgaagaattttgacaataatctgtatgaaagaaagactagagtagtagcatttgccgtggtgagaagggtttgattttggatatattttaaagataatgctgatagactttgccgctgattgaaatcgggaagtgaattagcctttgatatatgtggaatgacaagacgcccaaagaaggaatcttagtgaatatttacaggtttgagtggaagaagagctagcaaggaggctgaggaggagagagt

SEQ ID NO: 47468 - DNA, 332 bp, Homo sapiens
caaaggacagttcaatactattattacatgcccagtacctaccatagtgcttggttcatgagaggagctgtgtaaatgtctgatgaatgagtgaatgaatgtacgtatgcataaatgctataaaaaaagccagacttaagataacagataccatttgttctacatggcaaattaaagttaaaaggtatgaatgcaggtgcaagaatcacctgtgggtacaaacggaattctgatattatttttgaattctgggtatgatattttatttccgaaatgaaatacctaaatcatttaaaaagcaatatagatatataacagttcctcattcgctc

SEQ ID NO: 47469 - DNA, 2126 bp, Homo sapiens
ggcacgaggacactgcaaggcttagaccagttcgagcggagctccctgtagggcttagaccagttcggtccaacagagaaagcaggcaaccaccatgtcatttgaaaacagtttcatcgggatataattcgcaacccatacagtgaatccatttaagatactctgacccatggatcccctgggtgcagccaagccacaatggccatggcgccgctgtctggccgcactgctatttcagctgctggtggctgtgtgtttcttctcctacctgcgtgtgtcccgagacgatgccactggatcccctagggctcccagtgggtcctcccgacaggacaccactcccacccgccccaccctcctgatcctgctatggacatggcctttccacatccctgtggctctgtcccgctgttcagagatggtgcccggcacagccgactgccacatcactgccgaccgcaaggtgtacccacaggcagacacggtcatcgtgcaccactgggatatcatgtccaaccctaagtcacgcctcccaccttccccgaggccgcaggggcagcgctggatctggttcaacttggagccaccccctaactgccagcacctggaagccctggacagatacttcaatctcaccatgtcctaccgcagcgactccgacatcttcacgccctacggctggctggagccgtggtccggccagcctgcccacccaccgctcaacctctcggccaagaccgagctggtggcctgggcggtgtccaactggaagccggactcagccagggtgcgctactaccagagcctgcaggctcatctcaaggtggacgtgtacggacgctcccacaagcccctgcccaaggggaccatgatggagacgctgtcccggtacaagttctacctggccttcgagaactccttgcaccccgactacatcaccgagaagctgtggaggaacgccctggaggcctgggccgtgcccgtggtgctgggccccagcagaagcaactacgagaggttcctgccacccgacgccttcatccacgtggacgacttccagagccccaaggacctggcccggtacctgcaggagctggacaaggaccacgcccgctacctgagctactttcgctggcgggagacgctgcggcctcgctccttcagctgggcactggatttctgcaaggcctgctggaaactgcagcaggaatccaggtaccagacggtgcgcagcatagcggcttggttcacctgagaggccggcatggtgcctgggctgccgggaacctcatctgcctggggcctcacctgctggagtcctttgtggccaaccctctctcttacctgggacctcacacgctgggcttcacggctgccaggagcctctcccctccagaagacttgcctgctagggacctcgcctgctggggacctcgcctgttggggacctcacctgctggggacctcacctgctggggaccttggctgctggaggctgcacctactgaggatgtcggcggtcggggactttacctgctgggacctgctcccagagaccttgccacactgaatctcacctgctggggacctcaccctggagggccctgggccctggggaactggcttacttggggccccacccgggagtgatggttctggctgatttgtttgtgatgttgttagccgcctgtgaggggtgcagagagatcatcacggcacggtttccagatgtaatactgcaaggaaaaatgatgacgtgtctcctcactctagaggggttggtcccatgggttaagagctcaccccaggttctcacctcaggggttaagagctcagagttcagacaggtccaagttcaagcccaggaccaccacttatagggtacaggtgggatcgactgtaaatgaggacttctggaacattccaaatattctggggttgagggaaattgctgctgtctacaaaatgccaagggtggacaggcgctgtggctcacgcctgtaatcccagcactttgggaggctgaggtaggaggattgattgaggccaagagttaaagaccagcctggtcaatatagcaagaccacgtctctaaataaaaaataataggccggccaggcaaaaag

SEQ ID NO: 47470 - DNA, 2686 bp, Homo sapiens
  misc_feature (5)..(5): n is a, c, g, or t
gtccncagcaggcaagtcttctggaggggagaggctcctggcagccgtgaagcccagcgtgtgaggtcccaggtaagagagagggttggccacaaaggactccagcaggtgaggccccaggaaacctgccatggcctcctggtgagctgtcctcatccactgctcgctgcctctccagatcttcagttgcttcaggccactttgaatgtatatgagccggtcgtaggggatatcgatggcttagcttgggctcagaggcctgaaaatcgcccccaccaatcacctgtttcccccaatctaccctcctgaaggtcactgacaaagacttcattgtctcctaggagaggctgccatatatcagggctgacgtaattccatcttaatatcagttacattataaaaatttacctcgtgcctgaggccccagagcccaagggtgcaaagcagtaattagtcaaagttcaacttcccctcccactctgggctcaggctgtccctgagggcctgtgttttgagtctctttccagaaccttggtgtgaacttaggtcttggcgtcgggatcccttttcgtcacactcaggtgacctacaggctccgctcgacactgcaaggcttagaccagttcggtccaacagagaaagcaggcaaccaccatgtcatttgaaaacagtttcatcgggatataattcgcaacccatacagtgaatccatttaagatactctgacccatggatcccctgggtgcagccaagccacaatggccatggcgccgctgtctggccgcactgctatttcagctgctggtggctgtgtgtttcttctcctacctgcgtgtgtcccgagacgatgccactggatcccctagggctcccagtgggtcctcccgacaggacaccactcccacccgccccaccctcctgatcctgctatggacatggcctttccacatccctgtggctctgtcccgctgttcagagatggtgcccggcacagccgactgccacatcactgccgaccgcaaggtgtacccacaggcagacacggtcatcgtgcaccactgggatatcatgtccaaccctaagtcacgcctcccaccttccccgaggccgcaggggcagcgctggatctggttcaacttggagccaccccctaactgccagcacctggaagccctggacagatacttcaatctcaccatgtcctaccgcagcgactccgacatcttcacgccctacggctggctggagccgtggtccggccagcctgcccacccaccgctcaacctctcggccaagaccgagctggtggcctgggcggtgtccaactggaagccggactcagccagggtgcgctactaccagagcctgcaggctcatctcaaggtggacgtgtacggacgctcccacaagcccctgcccaaggggaccatgatggagacgctgtcccggtacaagttctacctggccttcgagaactccttgcaccccgactacatcaccgagaagctgtggaggaacgccctggaggcctgggccgtgcccgtggtgctgggccccagcagaagcaactacgagaggttcctgccacccgacgccttcatccacgtggacgacttccagagccccaaggacctggcccggtacctgcaggagctggacaaggaccacgcccgctacctgagctactttcgctggcgggagacgctgcggcctcgctccttcagctgggcactggatttctgcaaggcctgctggaaactgcagcaggaatccaggtaccagacggtgcgcagcatagcggcttggttcacctgagaggccggcatggtgcctgggctgccgggaacctcatctgcctggggcctcacctgctggagtcctttgtggccaaccctctctcttacctgggacctcacacgctgggcttcacggctgccaggagcctctcccctccagaagacttgcctgctagggacctcgcctgctggggacctcgcctgttggggacctcacctgctggggacctcacctgctggggaccttggctgctggaggctgcacctactgaggatgtcggcggtcggggactttacctgctgggacctgctcccagagaccttgccacactgaatctcacctgctggggacctcaccctggagggccctgggccctggggaactggcttacttggggccccacccgggagtgatggttctggctgatttgtttgtgatgttgttagccgcctgtgaggggtgcagagagatcatcacggcacggtttccagatgtaatactgcaaggaaaaatgatgacgtgtctcctcactctagaggggttggtcccatgggttaagagctcaccccaggttctcacctcaggggttaagagctcagagttcagacaggtccaagttcaagcccaggaccaccacttatagggtacaggtgggatcgactgtaaatgaggacttctggaacattccaaatattctggggttgagggaaattgctgctgtctacaaaatgccaagggtggacaggcgctgtggctcacgcctgtaatcccagcactttgggaggctgaggtaggaggattgattgaggccaagagttaaagaccagcctggtcaatatagcaagaccacgtctctaaataaaaaataataggccggccaggcaaaaag

SEQ ID NO: 47471 - DNA, 2337 bp, Homo sapiens
  misc_feature (5)..(5): n is a, c, g, or t
gtccncagcaggcaagtcttctggaggggagaggctcctggcagccgtgaagcccagcgtgtgaggtcccaggtaagagagagggttggccacaaaggactccagcaggtgaggccccaggaaacctgccatggcctcctggtgagctgtcctcatccactgctcgctgcctctccagaaccttggtgtgaacttaggtcttggcgtcgggatcccttttcgtcacactcaggtgacctacaggctccgctcgacactgcaaggcttagaccagttcggtccaacagagaaagcaggcaaccaccatgtcatttgaaaacagtttcatcgggatataattcgcaacccatacagtgaatccatttaagatactctgacccatggatcccctgggtgcagccaagccacaatggccatggcgccgctgtctggccgcactgctatttcagctgctggtggctgtgtgtttcttctcctacctgcgtgtgtcccgagacgatgccactggatcccctagggctcccagtgggtcctcccgacaggacaccactcccacccgccccaccctcctgatcctgctatggacatggcctttccacatccctgtggctctgtcccgctgttcagagatggtgcccggcacagccgactgccacatcactgccgaccgcaaggtgtacccacaggcagacacggtcatcgtgcaccactgggatatcatgtccaaccctaagtcacgcctcccaccttccccgaggccgcaggggcagcgctggatctggttcaacttggagccaccccctaactgccagcacctggaagccctggacagatacttcaatctcaccatgtcctaccgcagcgactccgacatcttcacgccctacggctggctggagccgtggtccggccagcctgcccacccaccgctcaacctctcggccaagaccgagctggtggcctgggcggtgtccaactggaagccggactcagccagggtgcgctactaccagagcctgcaggctcatctcaaggtggacgtgtacggacgctcccacaagcccctgcccaaggggaccatgatggagacgctgtcccggtacaagttctacctggccttcgagaactccttgcaccccgactacatcaccgagaagctgtggaggaacgccctggaggcctgggccgtgcccgtggtgctgggccccagcagaagcaactacgagaggttcctgccacccgacgccttcatccacgtggacgacttccagagccccaaggacctggcccggtacctgcaggagctggacaaggaccacgcccgctacctgagctactttcgctggcgggagacgctgcggcctcgctccttcagctgggcactggatttctgcaaggcctgctggaaactgcagcaggaatccaggtaccagacggtgcgcagcatagcggcttggttcacctgagaggccggcatggtgcctgggctgccgggaacctcatctgcctggggcctcacctgctggagtcctttgtggccaaccctctctcttacctgggacctcacacgctgggcttcacggctgccaggagcctctcccctccagaagacttgcctgctagggacctcgcctgctggggacctcgcctgttggggacctcacctgctggggacctcacctgctggggaccttggctgctggaggctgcacctactgaggatgtcggcggtcggggactttacctgctgggacctgctcccagagaccttgccacactgaatctcacctgctggggacctcaccctggagggccctgggccctggggaactggcttacttggggccccacccgggagtgatggttctggctgatttgtttgtgatgttgttagccgcctgtgaggggtgcagagagatcatcacggcacggtttccagatgtaatactgcaaggaaaaatgatgacgtgtctcctcactctagaggggttggtcccatgggttaagagctcaccccaggttctcacctcaggggttaagagctcagagttcagacaggtccaagttcaagcccaggaccaccacttatagggtacaggtgggatcgactgtaaatgaggacttctggaacattccaaatattctggggttgagggaaattgctgctgtctacaaaatgccaagggtggacaggcgctgtggctcacgcctgtaatcccagcactttgggaggctgaggtaggaggattgattgaggccaagagttaaagaccagcctggtcaatatagcaagaccacgtctctaaataaaaaataataggccggccaggcaaaaag

SEQ ID NO: 47472 - DNA, 2283 bp, Homo sapiens
  misc_feature (5)..(5): n is a, c, g, or t
gtccncagcaggcaagtcttctggaggggagaggctcctggcagccgtgaagcccagcgtgtgaggtcccaggtaagagagagggttggccacaaaggactccagcaggtgaggccccaggaaacctgccatggcctcctggtgagctgtcctcatccactgctcgctgcctctccaggtgacctacaggctccgctcgacactgcaaggcttagaccagttcggtccaacagagaaagcaggcaaccaccatgtcatttgaaaacagtttcatcgggatataattcgcaacccatacagtgaatccatttaagatactctgacccatggatcccctgggtgcagccaagccacaatggccatggcgccgctgtctggccgcactgctatttcagctgctggtggctgtgtgtttcttctcctacctgcgtgtgtcccgagacgatgccactggatcccctagggctcccagtgggtcctcccgacaggacaccactcccacccgccccaccctcctgatcctgctatggacatggcctttccacatccctgtggctctgtcccgctgttcagagatggtgcccggcacagccgactgccacatcactgccgaccgcaaggtgtacccacaggcagacacggtcatcgtgcaccactgggatatcatgtccaaccctaagtcacgcctcccaccttccccgaggccgcaggggcagcgctggatctggttcaacttggagccaccccctaactgccagcacctggaagccctggacagatacttcaatctcaccatgtcctaccgcagcgactccgacatcttcacgccctacggctggctggagccgtggtccggccagcctgcccacccaccgctcaacctctcggccaagaccgagctggtggcctgggcggtgtccaactggaagccggactcagccagggtgcgctactaccagagcctgcaggctcatctcaaggtggacgtgtacggacgctcccacaagcccctgcccaaggggaccatgatggagacgctgtcccggtacaagttctacctggccttcgagaactccttgcaccccgactacatcaccgagaagctgtggaggaacgccctggaggcctgggccgtgcccgtggtgctgggccccagcagaagcaactacgagaggttcctgccacccgacgccttcatccacgtggacgacttccagagccccaaggacctggcccggtacctgcaggagctggacaaggaccacgcccgctacctgagctactttcgctggcgggagacgctgcggcctcgctccttcagctgggcactggatttctgcaaggcctgctggaaactgcagcaggaatccaggtaccagacggtgcgcagcatagcggcttggttcacctgagaggccggcatggtgcctgggctgccgggaacctcatctgcctggggcctcacctgctggagtcctttgtggccaaccctctctcttacctgggacctcacacgctgggcttcacggctgccaggagcctctcccctccagaagacttgcctgctagggacctcgcctgctggggacctcgcctgttggggacctcacctgctggggacctcacctgctggggaccttggctgctggaggctgcacctactgaggatgtcggcggtcggggactttacctgctgggacctgctcccagagaccttgccacactgaatctcacctgctggggacctcaccctggagggccctgggccctggggaactggcttacttggggccccacccgggagtgatggttctggctgatttgtttgtgatgttgttagccgcctgtgaggggtgcagagagatcatcacggcacggtttccagatgtaatactgcaaggaaaaatgatgacgtgtctcctcactctagaggggttggtcccatgggttaagagctcaccccaggttctcacctcaggggttaagagctcagagttcagacaggtccaagttcaagcccaggaccaccacttatagggtacaggtgggatcgactgtaaatgaggacttctggaacattccaaatattctggggttgagggaaattgctgctgtctacaaaatgccaagggtggacaggcgctgtggctcacgcctgtaatcccagcactttgggaggctgaggtaggaggattgattgaggccaagagttaaagaccagcctggtcaatatagcaagaccacgtctctaaataaaaaataataggccggccaggcaaaaag

SEQ ID NO: 47473 - DNA, 2147 bp, Homo sapiens
  misc_feature (5)..(5): n is a, c, g, or t
gtccncagcaggcaagtcttctggaggggagaggctcctggcagccgtgaagcccagcgtgtgaggtcccaggtaagagagagggttggccacaaaggactccagcaggtgaggccccaggaaacctgccatggcctcctggtgagctgtcctcatccactgctcgctgcctctccagatactctgacccatggatcccctgggtgcagccaagccacaatggccatggcgccgctgtctggccgcactgctatttcagctgctggtggctgtgtgtttcttctcctacctgcgtgtgtcccgagacgatgccactggatcccctagggctcccagtgggtcctcccgacaggacaccactcccacccgccccaccctcctgatcctgctatggacatggcctttccacatccctgtggctctgtcccgctgttcagagatggtgcccggcacagccgactgccacatcactgccgaccgcaaggtgtacccacaggcagacacggtcatcgtgcaccactgggatatcatgtccaaccctaagtcacgcctcccaccttccccgaggccgcaggggcagcgctggatctggttcaacttggagccaccccctaactgccagcacctggaagccctggacagatacttcaatctcaccatgtcctaccgcagcgactccgacatcttcacgccctacggctggctggagccgtggtccggccagcctgcccacccaccgctcaacctctcggccaagaccgagctggtggcctgggcggtgtccaactggaagccggactcagccagggtgcgctactaccagagcctgcaggctcatctcaaggtggacgtgtacggacgctcccacaagcccctgcccaaggggaccatgatggagacgctgtcccggtacaagttctacctggccttcgagaactccttgcaccccgactacatcaccgagaagctgtggaggaacgccctggaggcctgggccgtgcccgtggtgctgggccccagcagaagcaactacgagaggttcctgccacccgacgccttcatccacgtggacgacttccagagccccaaggacctggcccggtacctgcaggagctggacaaggaccacgcccgctacctgagctactttcgctggcgggagacgctgcggcctcgctccttcagctgggcactggatttctgcaaggcctgctggaaactgcagcaggaatccaggtaccagacggtgcgcagcatagcggcttggttcacctgagaggccggcatggtgcctgggctgccgggaacctcatctgcctggggcctcacctgctggagtcctttgtggccaaccctctctcttacctgggacctcacacgctgggcttcacggctgccaggagcctctcccctccagaagacttgcctgctagggacctcgcctgctggggacctcgcctgttggggacctcacctgctggggacctcacctgctggggaccttggctgctggaggctgcacctactgaggatgtcggcggtcggggactttacctgctgggacctgctcccagagaccttgccacactgaatctcacctgctggggacctcaccctggagggccctgggccctggggaactggcttacttggggccccacccgggagtgatggttctggctgatttgtttgtgatgttgttagccgcctgtgaggggtgcagagagatcatcacggcacggtttccagatgtaatactgcaaggaaaaatgatgacgtgtctcctcactctagaggggttggtcccatgggttaagagctcaccccaggttctcacctcaggggttaagagctcagagttcagacaggtccaagttcaagcccaggaccaccacttatagggtacaggtgggatcgactgtaaatgaggacttctggaacattccaaatattctggggttgagggaaattgctgctgtctacaaaatgccaagggtggacaggcgctgtggctcacgcctgtaatcccagcactttgggaggctgaggtaggaggattgattgaggccaagagttaaagaccagcctggtcaatatagcaagaccacgtctctaaataaaaaataataggccggccaggcaaaaag

SEQ ID NO: 47474 - DNA, 274 bp, Homo sapiens
ccgggctactgatgacctcctttggcagggtcaagattggccttaccttgcagtcaacagtcttaggtctctgattcccagtcaagattattcacttagttttatataaaagaactcggtgtttaaagaaaccagcaaaattcctcaaactcattgcttatgtttataggaggaaaggagattgtaaggcacttacattttatacttcaacaagaaaaaccaaaatatatatcaatttcagacaataatcatttaggtattatttccataacaa

SEQ ID NO: 47475 - DNA, 365 bp, Homo sapiens
aagatatctcttccccagaaaaaaataggaccattcattcctctgtatctgtacaaaatgcttcagagtagctacctcattctggagccaaaatggtacctggctcttgggaaaacctggggaggataaatggaaagctcctagagctatagtggcccacctagctccccagagccccgtattttaccccttgaagccaaaaacaaagggagacaattttgtactccatattgtactgatgctgtattttaagataatattctctgcatacttcaccttccagtaacacctactttccttaggttcccactgtgccttcgtatgtgtcctcagtcttacttaccccattgttccaatgacaagct

SEQ ID NO: 47476 - DNA, 594 bp, Homo sapiens
  misc_feature (586)..(587): n is a, c, g, or t
  misc_feature (590)..(594): n is a, c, g, or t
cacatagtttaggtcctggcttaactctacttatgatggttcaacttacactttttcaactttaagatggtgcaaaagcaatacacattcagtatgttcctcgacttaggatgcggttatgtccgataaacccattgtaaattgaaaccaccgaaagtcaaaaaccactttcgacttacgatgtttcccactcacgatgggtttctccggatgtagccccatcataagttgaggagcacctgttagttacttccaactgtctcaggcaacctgggcattcaggagaaaagcctggcacagggtgacagggaagcacccatgcaaagcacccccgctttgactgcttggcagacctagggtgcccgggaagcacaagggatacccttggccctgcggggtgtggcccaggtgcctgccatgagcctgaccccatcgagggggaacctcagcccaccctgggcctgggggtgacaagaacttccacaggttggccccaggcttataggaggcataagcagatcccgcgatggcttgtcattgtcccctgtcctggaacaataaagcaagtgccttgtggtctcactannaannnnn

SEQ ID NO: 47477 - DNA, 544 bp, Homo sapiens
  misc_feature (479)..(479): n is a, c, g, or t
ctactataggctctactatatgcagagccttgggtatttctgtgcgagggggattatgcaaaagaattttaaggcatgccacttgactttgtgaaaccaagtatttgtttaaagagacacgatattatagtgggaggctgttttgtgagaacccacactttcatgtcagcaccctgagatgggatcccattacgccctttaaccaggcaagggactttatgcagttcttcgtcaggaaaatggagacaattaaactgcttttctcataggttgttgtgtaaaaggcagcaagatgtggctgtgtaagaacatgactgaagccagactgcttatgcttaaaacctaggtgagctgtttacacctgatatgaccttggacaagtctcatctaacttctcttgcctcaggtgcctcatctgaagatagcagtgatgttagtgtctgcttcctgcctcataagcctgtcatgttagccagganggtctcaacatggtcgacgcggccgcgaattaatagttgtagtcgaccccggaattcctgaccgg

SEQ ID NO: 47478 - DNA, 282 bp, Homo sapiens
ctgtttacacctgatatgaccttggacaagtctcatctaacttctcttgcctcaggtgcctcatctgaagatagcagtgatgttagtgtctgcttcctgcctcataagcctgtcatgttgagaccatcctggccaacatggtgaaaccccgtctctactaaacatacaaaaattagccaggcatggtgacacgcgcctgtagtcccagctacttgggaggctgaggcaggagaattgtttgaacccgggaggcagaagttgcagtgagcagagatcgctcca

SEQ ID NO: 47479 - DNA, 289 bp, Homo sapiens
gaagaaggaagacacagaggaaggaaagagagggaaagtgagaagaggaggaagcggagaccaccaggaggggaacagggagacagaggaggtgtgggtggccagagcctgcgagaaagaagtgcagagcagagtgggggacagggatggaggcggcgtggagcagctgggggaggagcctgggtcagccggcagggatggaatggacaggagctctgtccaggctggcggaggtgctgctgtccagggtgggagatggaccgtgtggggccccgacaagctgcacaat

SEQ ID NO: 47480 - DNA, 698 bp, Homo sapiens
cttaaacagtagaagaaatagctgttggcataaaggtaccaatgaacttatgtttcctcgtgttaatagagcaaagaaccttcttggtgtttaaacacacatggacacacaggcgtgtgcacacacacacaagcccgaaaatcatgtggttatatttttttagttaagaagagtcacaatgaagccacaaccctgttccatactgctagattcagtatcatgttgtaaggaacatgctggttgaagaaattattttgtttattaattcaggttacatgtcctgccaggctggctggaagagaaaggaaagaaaggtgtaactttaagcacacactgatttgttcttattacataacaaaagtctatttctttatcatgttatcattcagttaataaaaattagctacaataacagcatcaacttaaaaacccctcaaagtccaggggattttctttcacaatgaacatgaatacggttcagaaatacaaacagtcaaaggataactttaggtctgaaagagaaacctggcaagggtaattgaataagcctgggtcccctgactgtgtcatggtgagggcagtcaacatgtcataattaggtttattgagggccattccaacaatctgcttctattcttcctgccttattgtccacagctaggcaaatagccaagggacaaaaggaatcaagtgctgac

SEQ ID NO: 47481 - DNA, 405 bp, Homo sapiens
tggatcagccacttgccagctacttcagctggagcaagttactcaactcacattactatgttctcatctgcaacatggcaataacaatacttttaattgtagagagtaaatatcttgcccagtacagtgtttggcgtacaacaggttctcaagaaaaagggtagctactctgacggcagtgatgatgatgaagcacacttagtaggtgttgtaggccagaatctggggaatgggctgtccaggttcatacgcgggctcccccattcaggagctgagatgccttatgcaagttacttcctgttgctgtgctgaggataaaatggacctactacagagttgttagaatagttaaatgagaatgtgcatgaaaagctcttagtcaagtaccatgttacagttaagtta

SEQ ID NO: 47482 - DNA, 597 bp, Homo sapiens
attgccacagccactccaaccttcagcagccattaccctcatcagccagcagccatccacatcaaggcaagaccttccaccacaaaaaaaattatgactagccataggctcagataacgattagcattttttttagcaataacatatttttaaattaaggtatgtacatttttttaaagacataatgctattacatacttaataaaatacagtatagtgtaaacataacttttatatgcactgggaaacaaaacaaaattatgtgactcagtttattgctatatttgccttgttgaggttgtcagacccacagtatctgtgcggattactggtacagtattcaggggatgcagagctcttagatgtggagggctgactttttgtattaatgggttctgcagggtgtactacaggacttcggcattcgtaggttttcatatcttcaaggggccctggaaccaatccttgcagatactaagggccaactgcattcttgggataaaaggtagattttaaccagccctatatttgtttaaggaaaggataaaaagtctttaaaacaaataatttactatgtctgaagccaatgatcatttt

SEQ ID NO: 47483 - DNA, 325 bp, Homo sapiens
tgagcatggaaatcctacctggactgaggtatcaaaggataccaagagatactagagacaacaaggaacctggaaaaagatagtgttccaacctgtaaataagaaaacagagaaggaggttcattaatatttaagataccagctagtaaattaaaacagcaatgtagttgtctggcttgagtattcagttttatttactacatctttttatcttttctagaagcaaggcattaagtgttgacacttgagtattgaaccaatctgtgatatgacatgaatatgcctttatctttcagaagtttgtctacagacttacaaggaaacc

SEQ ID NO: 47484 - DNA, 234 bp, Homo sapiens
aaacaatagaggattcaattatttaatgtttgtatagcacttagaacagtgccttcctatgataactactattatcatagaataatttgtccaatttagtgttgttgtgaaactttactaactgaattttgttcttcacaagttgatatctttccaacgaatttttcactaaaattttagataaactggaaaacctcattttcaaactgccagataggaggaggcttattttta

SEQ ID NO: 47485 - DNA, 516 bp, Homo sapiens
acctcaccccatcctcaaatcccttccatccagggagtggctcataagacaaccgtctctaaaacaagctcctgggggatagggagactcggagagagaagatcgcagttagggattggctcgggggttctcaatccgatcgttctccagagccattcgaacgccagagcctcccgggcgtcttgagttgggctgggcaggttctgcgaactgcgaccaagtcccactccgctgtcggacacagtctccactcgatgcctgaaacctcctgggaagtgaagttctagggccagcctcactgtaagtcacaggcttctacactacatcttcaggtaatcgaggactacttagatcgcgacctcagtacgagttactcagcccaggaacccccaaacctcatctttcccttggcaaagtgagaccaccccgtgttccccagatccccaagtcctattttctcctttggactaatatgaacttaaagagacacggacatgagaaagtatttgagagaaa

SEQ ID NO: 47486 - DNA, 390 bp, Homo sapiens
atgaatgaggtgttactaggtagtatttatagtaatggacttagctgtcttaacagtacctttagtgttcagaaaattatctgcatttaagatctagtccaactgtcattttagagaaggaagaactgagactcataaattacttggacaactagttagtaactattagggccttggaccctccagagtctcagttccatgctgcttccactctgctacattcattccacaaatatttgttgagtgttaagagccaggcacgatcatcacaacagaaaaacttgctccctcctttcgtgaaatggacagttgagaaggaaagacaaaatacaaaccagtaggaaatcgcagctgataattgagcaaaggagaggcattcagtgaacagag

SEQ ID NO: 47487 - DNA, 403 bp, Homo sapiens
gactgtgctgagctgggctggaggacaggggcagcttttatccctaaagctgggcagaacatgcaccaaggttggcagcctctgctctccttctcctccacccaggaccatacttgaggttgaaatcttgaaaccttgtaggcagctccataaaagcatgagccctagccagaggttgttactgaccctcctctctaggaaatgtagctcctgccagaattgaccgatcagattaaaaaccccttgggggctggagagggtggaatggaacagagtccaaggaaagaggcattaagagctgtggccctaatggctcttcttaacaaacagaaagcatgtgctaaataacattttaaaaatatgtgtaatttattcatataactttttttcccctgaaaaaaaa

SEQ ID NO: 47488 - DNA, 348 bp, Homo sapiens
ttattttgggtttctctggctatctaagtgtcctctcatttatcctacacagatgtcttcctctttcgagctctttcttgatacaggtgaaccagtggtggcccatttgtcaatcctattttacaaataaatatcatgcaataatcacagcacttgctaaataaatgtaacaatgaaagagattttgggtctggagggtgtactgccaaggaaatagaaaaagtgagttattatcatcacctttctatgaacctttgattggctggaacttaattttccagaaagggcatcatcagtgtgtaaacttccccaaaatgtatcctaattcatctttccatgtttatgatc

SEQ ID NO: 47489 - DNA, 684 bp, Homo sapiens
accactatactccagcctgggtggcagagtgagactctgtccccaaaaaacaaacaaacaaacaaaaaatcacatcactcccagagattgtaaccacctgagagcttctcattgcacttggcctgatgtccagactcttttctctggcgatccaaaccccccaagatctcgcccttcccttcctccccaccctcgtttcttcccacatcccctcatctgccgtgcagcaaccatgcaggctttctcttgttcttcagatacaccaagcctggttccaccttatggttttgcatttgctgttccctatgtgtgcaatgctcgacctgagcccgggttccctggctcagggaacagaggctgacaccacactcataacacctgatgggatggaggagatggaggtgggcggaagaatgtgtaatcccagacagcagcaagagtaagggagaagggaagcaagagagagaaaacaaaggctgcaaatgcattactgagctgacccatcacttcttgagaaactctagccagttgctctgacacatgggattctttggagtggcaatatggaacacacttataccataatgcaacatatgtgttcccccaaaccaccacactatgcagaattgcactttacaaatcacagggcttatggggaaaatgttgttagggactcaacactgg

SEQ ID NO: 47490 - DNA, 407 bp, Homo sapiens
acaccacactcataacacctgatgggatggaggagatggaggtgggcggaagaatgtgttcctggctcagggaacagaggctgacaccacactcataacacctgatgggatggaggagatggaggtgggcggaagaatgtgtaatcccagacagcagcaagagtaagggagaagggaagcaagagagagaaaacaaaggctgcaaatgcattactgagctgacccatcacttcttgagaaactctagccagttgctctgacacatgggattctttggagtggcaatatggaacacacttataccataatgcaacatatgtgttcccccaaaccaccacactatgcagaattgcactttacaaatcacagggcttatggggaaaatgttgttagggactcaacactgg

SEQ ID NO: 47491 - DNA, 187 bp, Homo sapiens
tttcctcgctgtcaaatgcatgggagagggtgtgtgaagagttaaaatgtatttagatttcactgtagtgtctcctccaacatgatctcacactccttttacagtataagcaggctgatgtcagaggctgtgactcgcccagggctacacagtggacaggtggcagagccaggagccaaggggtggt

SEQ ID NO: 47492 - DNA, 3934 bp, Homo sapiens
gcgcgggcactgggcatgcgcggcgcgcggttggcactggctgcgagcgggcgggcggctccagacttcacaggcagcagctagcgaggcggtctcgcccggcgcgaggccggcgctgtgctcgcctcggagatcgctgctctttagctgggtgcagaaggcggctccgcggctcgcggacgactggctgggcgcgaatcagattggggggctttctcccggtcccctcccacctcgtctgggctcgcggcgtctccggggaaagccgtggccccgagggcggatccgagaacacacaagtgaaagacacaatgaatggtcatatttctaatcatcccagtagttttggaatgtacccatctcagatgaatggctacggatcatcacctaccttttcccagacggacagagaacatggttcaaaaacaagtgcaaaggccctttatgaacaaaggaagaattatgcacgggacagtgtcagcagtgtgtcagatatatctcaataccgtgttgaacacttgactacctttgtcctggatcggaaagatgctatgatcactgttgatgatggaataaggaaattgaaattgcttgatgccaagggcaaagtgtggactcaagatatgattcttcaagtggatgacagagctgtgagcctgattgatttagaatcaaagaatgaactggagaattttcctttaaacacaatccagcactgccaagctgtgatgcattcatgcagctatgattcagttcttgcactggtgtgcaaagagccaacccagaacaagccagatcttcatctcttccagtgtgatgaggttaaggcaaacctaattagtgaagatattgaaagtgcaatcagtgacagtaaaggagggaaacagaagaggcggcccgacgccctgaggatgatttccaatgcagaccctagtataccgcctccacccagagctcctgcccctgcgccccctgggaccgtcacccaggtggatgttagaagtcgagtggcagcctggtctgcatgggcagccgaccaaggggactttgagaaaccaaggcagtatcatgagcaggaagaaacacctgagatgatggcagcccgcattgacagagatgtgcaaatcttaaaccacattttggatgacattgaattttttatcacaaaactccaaaaagcagcagaagcattttctgagctttctaaaaggaagaaaaacaagaaaggtaaaaggaaaggaccaggagagggtgttttaacgctgcgggcaaaacctccacctcctgatgaatttcttgactgtttccaaaagtttaaacacggatttaaccttctggccaaactgaagtctcatattcagaatcctagtgctgcagatttggttcactttttgtttactccattaaatatggtggtgcaggcaacaggaggtcctgaactagccagttcagtacttagtcccctattgaataaggacacaattgatttcttaaattatactgtcaatggtgatgaacggcagctgtggatgtcattgggaggaacttggatgaaagccagagcagagtggccaaaagaacagtttattccaccatatgttccacgattccgcaatggctgggagcccccaatgctgaactttatgggagccacaatggaacaagatctttatcaactggcagaatctgtggcaaatgtagcagaacatcagcgcaaacaggaaataaaaagattatccacagagcattccagtgtatcagagtatcatccagccgatggctatgcgttcagtagcaacatttacacaagaggatcccacctggaccaaggggaagctgctgttgcttttaagccaacttctaatcgccatatagatagaaattatgaaccactcaaaacacaacccaagaaatatgccaaatccaagtatgactttgtagcaaggaacaacagtgagctctcggttctaaaggatgatattttagagatacttgatgatcggaagcaatggtggaaagttcgaaatgcaagtggagactctggatttgtgccaaataacattttggatattgtgagacctccagaatctggattggggcgtgctgatccaccttatactcatactatacagaaacaaaggatggagtatggcccaagaccagctgatactccccctgctccatcacctcctccaacaccagctcctgttcctgttccccttcccccttccactccagcacctgttcctgtgtcaaaggtcccagcaaatataacacgtcaaaacagcagctccagtgacagtggtggcagtatcgtgcgagacagccagagacacaaacaacttccggtggaccgaaggaaatctcagatggaggaagtgcaagatgaactcatccacagactgaccattggtcggagtgccgctcagaagaaattccatgtgccacggcagaacgtgccagttatcaatatcacttacgactccacaccagaggatgtgaagacgtggttacagtcaaagggattcaaccctgtgactgtcaatagtcttggagtattaaatggtgcacaacttttctctctcaataaggatgaactgaggacagtctgccctgaaggggcgagagtctatagccaaatcactgtacaaaaagctgcattggaggatagcagtggcagctccgagttacaagaaattatgagaagacgacaggaaaaaatcagtgctgccgctagtgattcaggagtggaatcttttgatgaaggaagcagtcactaatttgtttgtttgtatttaaactccattgtttttggcattattccaacatgctttgttttaagaagccttgaagggaatgtcagattcatttttcttgatgtaatttatcaccataaaaaaaaaacccatgcaaacctgagtgagcacaggatttgcttctaggcccattatttttattaaaactgaaaaaatttaaactgaattttttgaccttggaaaatatttttcttactttaccaaggtgaagtttccttaattagactaattattttatccccatcccagggtataaacaggaattgttttgatagtggtggagttattcactgcaacaaagcaacaatgttgtccatgattcaaaatctaagcagtttcgattttgcctgtgaatatggtgtctgtcattcagggcatagctcactgtaggctagcctctgcttacttaagtctcttctctgacatactcaatggaagaatatttagatttatttaaagttcttaatgccaacagtttaaaaaaaaattaaaacatttgaatgaactgtaaagtacagccataccttggacatgcaaatataaatctatggagcattctcaagacagtttgtcatggctctgttgattgcaactccttgtatagcttgtattttgatttagtttatattctgcttattatgtatactgtgttcttatatatgagaaagcacaaatgcgaaagaggtcatgtcttctcaaaatctagcaaaggaagtagtctgcattggtgtgcattacagtattttgcttaatgaaagcctcagttctgaatgttgatatgagtagttaaaaggaagtggggccattttatgtgtttatctgtgtcaagtatttctggtaataagaagcacttaatttacacatattttaatcctgtgaaagattccacatagagaaaagaaagatacctaaccttcaacaaatgttatttttggaaacacaatttttgtcattaaatgttatattatttcacatatataaaacagatgttatgtaagaatgttgtatattttaacataaatcatttagagaaattatctagattcattaattttcatagtgcctttttcacatgagtcagctggaaagtctgcaataaacagtatttgctgtctgtt

SEQ ID NO: 47493 - DNA, 3797 bp, Homo sapiens
gcgcgggcactgggcatgcgcggcgcgcggttggcactggctgcgagcgggcgggcggctccagacttcacaggcagcagctagcgaggcggtctcgcccggcgcgaggccggcgctgtgctcgcctcggagatcgctgctctttagctgggtgcagaaggcggctccgcggctcgcggacgactggctgggcgcgaatcagattggggggctttctcccggtcccctcccacctcgtctgggctcgcggcgtctccggggaaagccgtggccccgagggcggatccgagaacacacaagtgaaagacacaatgaatggtcatatttctaatcatcccagtagttttggaatgtacccatctcagatgaatggctacggatcatcacctaccttttcccagacggacagagaacatggttcaaaaacaagtgcaaaggccctttatgaacaaaggaagaattatgcacgggacagtgtcagcagtgtgtcagatatatctcaataccgtgttgaacacttgactacctttgtcctggatcggaaagatgctatgatcactgttgatgatggaataaggaaattgaaattgcttgatgccaagggcaaagtgtggactcaagatatgattcttcaagtggatgacagagctgtgagcctgattgatttagaatcaaagaatgaactggagaattttcctttaaacacaatccagcactgccaagctgtgatgcattcatgcagctatgattcagttcttgcactggtgtgcaaagagccaacccagaacaagccagatcttcatctcttccagtgtgatgaggttaaggcaaacctaattagtgaagatattgaaagtgcaatcagtgacagtaaaggagggaaacagaagaggcggcccgacgccctgagttgagaaaccaaggcagtatcatgagcaggaagaaacacctgagatgatggcagcccgcattgacagagatgtgcaaatcttaaaccacattttggatgacattgaattttttatcacaaaactccaaaaagcagcagaagcattttctgagctttctaaaaggaagaaaaacaagaaaggtaaaaggaaaggaccaggagagggtgttttaacgctgcgggcaaaacctccacctcctgatgaatttcttgactgtttccaaaagtttaaacacggatttaaccttctggccaaactgaagtctcatattcagaatcctagtgctgcagatttggttcactttttgtttactccattaaatatggtggtgcaggcaacaggaggtcctgaactagccagttcagtacttagtcccctattgaataaggacacaattgatttcttaaattatactgtcaatggtgatgaacggcagctgtggatgtcattgggaggaacttggatgaaagccagagcagagtggccaaaagaacagtttattccaccatatgttccacgattccgcaatggctgggagcccccaatgctgaactttatgggagccacaatggaacaagatctttatcaactggcagaatctgtggcaaatgtagcagaacatcagcgcaaacaggaaataaaaagattatccacagagcattccagtgtatcagagtatcatccagccgatggctatgcgttcagtagcaacatttacacaagaggatcccacctggaccaaggggaagctgctgttgcttttaagccaacttctaatcgccatatagatagaaattatgaaccactcaaaacacaacccaagaaatatgccaaatccaagtatgactttgtagcaaggaacaacagtgagctctcggttctaaaggatgatattttagagatacttgatgatcggaagcaatggtggaaagttcgaaatgcaagtggagactctggatttgtgccaaataacattttggatattgtgagacctccagaatctggattggggcgtgctgatccaccttatactcatactatacagaaacaaaggatggagtatggcccaagaccagctgatactccccctgctccatcacctcctccaacaccagctcctgttcctgttccccttcccccttccactccagcacctgttcctgtgtcaaaggtcccagcaaatataacacgtcaaaacagcagctccagtgacagtggtggcagtatcgtgcgagacagccagagacacaaacaacttccggtggaccgaaggaaatctcagatggaggaagtgcaagatgaactcatccacagactgaccattggtcggagtgccgctcagaagaaattccatgtgccacggcagaacgtgccagttatcaatatcacttacgactccacaccagaggatgtgaagacgtggttacagtcaaagggattcaaccctgtgactgtcaatagtcttggagtattaaatggtgcacaacttttctctctcaataaggatgaactgaggacagtctgccctgaaggggcgagagtctatagccaaatcactgtacaaaaagctgcattggaggatagcagtggcagctccgagttacaagaaattatgagaagacgacaggaaaaaatcagtgctgccgctagtgattcaggagtggaatcttttgatgaaggaagcagtcactaatttgtttgtttgtatttaaactccattgtttttggcattattccaacatgctttgttttaagaagccttgaagggaatgtcagattcatttttcttgatgtaatttatcaccataaaaaaaaaacccatgcaaacctgagtgagcacaggatttgcttctaggcccattatttttattaaaactgaaaaaatttaaactgaattttttgaccttggaaaatatttttcttactttaccaaggtgaagtttccttaattagactaattattttatccccatcccagggtataaacaggaattgttttgatagtggtggagttattcactgcaacaaagcaacaatgttgtccatgattcaaaatctaagcagtttcgattttgcctgtgaatatggtgtctgtcattcagggcatagctcactgtaggctagcctctgcttacttaagtctcttctctgacatactcaatggaagaatatttagatttatttaaagttcttaatgccaacagtttaaaaaaaaattaaaacatttgaatgaactgtaaagtacagccataccttggacatgcaaatataaatctatggagcattctcaagacagtttgtcatggctctgttgattgcaactccttgtatagcttgtattttgatttagtttatattctgcttattatgtatactgtgttcttatatatgagaaagcacaaatgcgaaagaggtcatgtcttctcaaaatctagcaaaggaagtagtctgcattggtgtgcattacagtattttgcttaatgaaagcctcagttctgaatgttgatatgagtagttaaaaggaagtggggccattttatgtgtttatctgtgtcaagtatttctggtaataagaagcacttaatttacacatattttaatcctgtgaaagattccacatagagaaaagaaagatacctaaccttcaacaaatgttatttttggaaacacaatttttgtcattaaatgttatattatttcacatatataaaacagatgttatgtaagaatgttgtatattttaacataaatcatttagagaaattatctagattcattaattttcatagtgcctttttcacatgagtcagctggaaagtctgcaataaacagtatttgctgtctgtt

SEQ ID NO: 47494 - DNA, 3964 bp, Homo sapiens
gcgcgggcactgggcatgcgcggcgcgcggttggcactggctgcgagcgggcgggcggctccagacttcacaggcagcagctagcgaggcggtctcgcccggcgcgaggccggcgctgtgctcgcctcggagatcgctgctctttagctgggtgcagaaggcggctccgcggctcgcggacgactggctgggcgcgaatcagattggggggctttctcccggtcccctcccacctcgtctgggctcgcggcgtctccggggaaagccgtggccccgagggcggatccgagaacacacaagtgaaagacacaatgaatggtcatatttctaatcatcccagtagttttggaatgtacccatctcagatgaatggctacggatcatcacctaccttttcccagacggacagagaacatggttcaaaaacaagtgcaaaggccctttatgaacaaaggaagaattatgcacgggacagtgtcagcagtgtgtcagatatatctcaataccgtgttgaacacttgactacctttgtcctggatcggaaagatgctatgatcactgttgatgatggaataaggaaattgaaattgcttgatgccaagggcaaagtgtggactcaagatatgattcttcaagtggatgacagagctgtgagcctgattgatttagaatcaaagaatgaactggagaattttcctttaaacacaatccagcactgccaagctgtgatgcattcatgcagctatgattcagttcttgcactggtgtgcaaagagccaacccagaacaagccagatcttcatctcttccagtgtgatgaggttaaggcaaacctaattagtgaagatattgaaagtgcaatcagtgacagtaaaggagggaaacagaagaggcggcccgacgccctgaggatgatttccaatgcagaccctagtataccgcctccacccagagctcctgcccctgcgccccctgggaccgtcacccaggtggatgttagaagtcgagtggcagcctggtctgcatgggcagccgaccaaggggactttgagaaaccaaggcagtatcatgagcaggaagaaacacctgagatgatggcagcccgcattgacagagatgtgcaaatcttaaaccacattttggatgacattgaattttttatcacaaaactccaaaaagcagcagaagcattttctgagctttctaaaaggaagaaaaacaagaaaggtaaaaggaaaggaccaggagagggtgttttaacgctgcgggcaaaacctccacctcctgatgaatttcttgactgtttccaaaagtttaaacacggatttaaccttctggccaaactgaagtctcatattcagaatcctagtgctgcagatttggttcactttttgtttactccattaaatatggtggtgcaggcaacaggaggtcctgaactagccagttcagtacttagtcccctattgaataaggacacaattgatttcttaaattatactgtcaatggtgatgaacggcagctgtggatgtcattgggaggaacttggatgaaagccagagcagagtggccaaaagaacagtttattccaccatatgttccacgattccgcaatggctgggagcccccaatgctgaactttatgggagccacaatggaacaagatctttatcaactggcagaatctgtggcaaatgtagcagaacatcagcgcaaacaggaaataaaaagattatccacagagcattccagtgtatcagagtatcatccagccgatggctatgcgttcagtagcaacatttacacaagaggatcccacctggaccaaggggaagctgctgttgcttttaagccaacttctaatcgccatatagatagaaattatgaaccactcaaaacacaacccaagaaatatgccaaatccaagtatgactttgtagcaaggaacaacagtgagctctcggttctaaaggatgatattttagagatacttgatgatcggaagcaatggtggaaagttcgaaatgcaagtggagactctggatttgtgccaaataacattttggatattgtgagacctccagaatctggattggggcgtgctgatccaccttatactcatactatacagaaacaaaggatggagtatggcccaagaccagctgatactccccctgctccatcacctcctccaacaccagctcctgttcctgttccccttcccccttccactccagcacctgttcctgtgtcaaaggtcccagcaaatataacacgtcaaaacagcagctccagtgacagtggtggcagtatcgtgcgagacagccagagacacaaacaacttccggtggaccgaaggaaatctcagatggaggaagtgcaagatgaactcatccacagactgaccattggtcggagtgccgctcagaagaaattccatgtgccacggcagaacgtgccagttatcaatatcacttacgactccacaccagaggatgtgaagacgtggttacagtcaaagggattcaaccctgtgactgtcaatagtcttggagtattaaatggtgcacaacttttctctctcaataaggatgaactgaggacagtctgccctgaaggggcgagagtctatagccaaatcactgtacaaaaagctgcattggaggatagcagtggcagctccgagttacaagaaattatgagaagacgacaggaaaaaatcagtgctgccgctagtgattcaggagtggaatcttttgatgaaggaagcagtcactaatttgtttgtttgtatttaaactccattgtttttggcattattccaacatgctttgttttaagaagccttgaagggaatgtcagattcatttttcttgatgtaatttatcaccataaaaaaaaaacccatgcaaacctgagtgagcacaggatttgcttctaggcccattatttttattaaaactgaaaaaatttaaactgaattttttgaccttggaaaatatttttcttactttaccaaggtgaagtttccttaattagactaattattttatccccatcccagggtataaacaggaattgttttgatagtggtggagttattcactgcaacaaagcaacaatgttgtccatgattcaaaatctaagcagtttcgattttgcctgtgaatatggtgtctgtcattcagggcatagctcactgtaggctagcctctgcttacttaagtctcttctctgacatactcaatggaagaatatttagatttatttaaagttcttaatgccaacagtttaaaaaaaaattaaaacatttgaatgaactgtaaagtacagccataccttggacatgcaaatataaatctatggagcattctcaagacagtttgtcatggctctgttgattgcaactccttgtatagcttgtattttgatttagtttatattctgcttattatgtatactgtgttcttatatatgagaaagcacaaatgcgaaagaggtcatgtcttctcaaaatctagcaaaggaagtagtctgcattggtgtgcattacagtattttgcttaatgaaagcctcagttctgaatgttgatatgagtagttaaaaggaagtggggccattttatgtgtttatctgtgtcaagtatttctggtaataagaagcacttaatttacacatattttaatcctgtgaaagattccacatagagaaaagaaagatacctaaccttcaacaaatgttatttttggaaacacaatttttgtcattaaatgttatattatttcacatatataaaacagatgttatgtaagaatgttgtatattttaacataaatcatttagagaaattatctagattcattaattttcatagtgcctttttcacatgagtcagctggaaagtctgcaataaacagtatttgctgtctgtttaaaaaaaaaattctgtctcattagcaaaa

SEQ ID NO: 47495 - DNA, 3000 bp, Homo sapiens
cttgactgctggtttatatttctggcttgtgtaggaattaaagggtgctaagttaaggttggttctacaggtagctgactcagggaagagagagaatggggtgatattacaagttgagaaaccaaggcagtatcatgagcaggaagaaacacctgagatgatggcagcccgcattgacagagatgtgcaaatcttaaaccacattttggatgacattgaattttttatcacaaaactccaaaaagcagcagaagcattttctgagctttctaaaaggaagaaaaacaagaaaggtaaaaggaaaggaccaggagagggtgttttaacgctgcgggcaaaacctccacctcctgatgaatttcttgactgtttccaaaagtttaaacacggatttaaccttctggccaaactgaagtctcatattcagaatcctagtgctgcagatttggttcactttttgtttactccattaaatatggtggtgcaggcaacaggaggtcctgaactagccagttcagtacttagtcccctattgaataaggacacaattgatttcttaaattatactgtcaatggtgatgaacggcagctgtggatgtcattgggaggaacttggatgaaagccagagcagagtggccaaaagaacagtttattccaccatatgttccacgattccgcaatggctgggagcccccaatgctgaactttatgggagccacaatggaacaagatctttatcaactggcagaatctgtggcaaatgtagcagaacatcagcgcaaacaggaaataaaaagattatccacagagcattccagtgtatcagagtatcatccagccgatggctatgcgttcagtagcaacatttacacaagaggatcccacctggaccaaggggaagctgctgttgcttttaagccaacttctaatcgccatatagatagaaattatgaaccactcaaaacacaacccaagaaatatgccaaatccaagtatgactttgtagcaaggaacaacagtgagctctcggttctaaaggatgatattttagagatacttgatgatcggaagcaatggtggaaagttcgaaatgcaagtggagactctggatttgtgccaaataacattttggatattgtgagacctccagaatctggattggggcgtgctgatccaccttatactcatactatacagaaacaaaggatggagtatggcccaagaccagctgatactccccctgctccatcacctcctccaacaccagctcctgttcctgttccccttcccccttccactccagcacctgttcctgtgtcaaaggtcccagcaaatataacacgtcaaaacagcagctccagtgacagtggtggcagtatcgtgcgagacagccagagacacaaacaacttccggtggaccgaaggaaatctcagatggaggaagtgcaagatgaactcatccacagactgaccattggtcggagtgccgctcagaagaaattccatgtgccacggcagaacgtgccagttatcaatatcacttacgactccacaccagaggatgtgaagacgtggttacagtcaaagggattcaaccctgtgactgtcaatagtcttggagtattaaatggtgcacaacttttctctctcaataaggatgaactgaggacagtctgccctgaaggggcgagagtctatagccaaatcactgtacaaaaagctgcattggaggatagcagtggcagctccgagttacaagaaattatgagaagacgacaggaaaaaatcagtgctgccgctagtgattcaggagtggaatcttttgatgaaggaagcagtcactaatttgtttgtttgtatttaaactccattgtttttggcattattccaacatgctttgttttaagaagccttgaagggaatgtcagattcatttttcttgatgtaatttatcaccataaaaaaaaaacccatgcaaacctgagtgagcacaggatttgcttctaggcccattatttttattaaaactgaaaaaatttaaactgaattttttgaccttggaaaatatttttcttactttaccaaggtgaagtttccttaattagactaattattttatccccatcccagggtataaacaggaattgttttgatagtggtggagttattcactgcaacaaagcaacaatgttgtccatgattcaaaatctaagcagtttcgattttgcctgtgaatatggtgtctgtcattcagggcatagctcactgtaggctagcctctgcttacttaagtctcttctctgacatactcaatggaagaatatttagatttatttaaagttcttaatgccaacagtttaaaaaaaaattaaaacatttgaatgaactgtaaagtacagccataccttggacatgcaaatataaatctatggagcattctcaagacagtttgtcatggctctgttgattgcaactccttgtatagcttgtattttgatttagtttatattctgcttattatgtatactgtgttcttatatatgagaaagcacaaatgcgaaagaggtcatgtcttctcaaaatctagcaaaggaagtagtctgcattggtgtgcattacagtattttgcttaatgaaagcctcagttctgaatgttgatatgagtagttaaaaggaagtggggccattttatgtgtttatctgtgtcaagtatttctggtaataagaagcacttaatttacacatattttaatcctgtgaaagattccacatagagaaaagaaagatacctaaccttcaacaaatgttatttttggaaacacaatttttgtcattaaatgttatattatttcacatatataaaacagatgttatgtaagaatgttgtatattttaacataaatcatttagagaaattatctagattcattaattttcatagtgcctttttcacatgagtcagctggaaagtctgcaataaacagtatttgctgtctgtt

SEQ ID NO: 47496 - DNA, 2670 bp, Homo sapiens
cttcattcagtagcacattgcacagcatcaaaagttaatatgactattaaaaagtagtgcttgtttttgccatgggtttttgtccacacattttgaaaatacacaaagaatagtaatcttcttgctaaaaaatggtttattatcttaggtggtgcaggcaacaggaggtcctgaactagccagttcagtacttagtcccctattgaataaggacacaattgatttcttaaattatactgtcaatggtgatgaacggcagctgtggatgtcattgggaggaacttggatgaaagccagagcagagtggccaaaagaacagtttattccaccatatgttccacgattccgcaatggctgggagcccccaatgctgaactttatgggagccacaatggaacaagatctttatcaactggcagaatctgtggcaaatgtagcagaacatcagcgcaaacaggaaataaaaagattatccacagagcattccagtgtatcagagtatcatccagccgatggctatgcgttcagtagcaacatttacacaagaggatcccacctggaccaaggggaagctgctgttgcttttaagccaacttctaatcgccatatagatagaaattatgaaccactcaaaacacaacccaagaaatatgccaaatccaagtatgactttgtagcaaggaacaacagtgagctctcggttctaaaggatgatattttagagatacttgatgatcggaagcaatggtggaaagttcgaaatgcaagtggagactctggatttgtgccaaataacattttggatattgtgagacctccagaatctggattggggcgtgctgatccaccttatactcatactatacagaaacaaaggatggagtatggcccaagaccagctgatactccccctgctccatcacctcctccaacaccagctcctgttcctgttccccttcccccttccactccagcacctgttcctgtgtcaaaggtcccagcaaatataacacgtcaaaacagcagctccagtgacagtggtggcagtatcgtgcgagacagccagagacacaaacaacttccggtggaccgaaggaaatctcagatggaggaagtgcaagatgaactcatccacagactgaccattggtcggagtgccgctcagaagaaattccatgtgccacggcagaacgtgccagttatcaatatcacttacgactccacaccagaggatgtgaagacgtggttacagtcaaagggattcaaccctgtgactgtcaatagtcttggagtattaaatggtgcacaacttttctctctcaataaggatgaactgaggacagtctgccctgaaggggcgagagtctatagccaaatcactgtacaaaaagctgcattggaggatagcagtggcagctccgagttacaagaaattatgagaagacgacaggaaaaaatcagtgctgccgctagtgattcaggagtggaatcttttgatgaaggaagcagtcactaatttgtttgtttgtatttaaactccattgtttttggcattattccaacatgctttgttttaagaagccttgaagggaatgtcagattcatttttcttgatgtaatttatcaccataaaaaaaaaacccatgcaaacctgagtgagcacaggatttgcttctaggcccattatttttattaaaactgaaaaaatttaaactgaattttttgaccttggaaaatatttttcttactttaccaaggtgaagtttccttaattagactaattattttatccccatcccagggtataaacaggaattgttttgatagtggtggagttattcactgcaacaaagcaacaatgttgtccatgattcaaaatctaagcagtttcgattttgcctgtgaatatggtgtctgtcattcagggcatagctcactgtaggctagcctctgcttacttaagtctcttctctgacatactcaatggaagaatatttagatttatttaaagttcttaatgccaacagtttaaaaaaaaattaaaacatttgaatgaactgtaaagtacagccataccttggacatgcaaatataaatctatggagcattctcaagacagtttgtcatggctctgttgattgcaactccttgtatagcttgtattttgatttagtttatattctgcttattatgtatactgtgttcttatatatgagaaagcacaaatgcgaaagaggtcatgtcttctcaaaatctagcaaaggaagtagtctgcattggtgtgcattacagtattttgcttaatgaaagcctcagttctgaatgttgatatgagtagttaaaaggaagtggggccattttatgtgtttatctgtgtcaagtatttctggtaataagaagcacttaatttacacatattttaatcctgtgaaagattccacatagagaaaagaaagatacctaaccttcaacaaatgttatttttggaaacacaatttttgtcattaaatgttatattatttcacatatataaaacagatgttatgtaagaatgttgtatattttaacataaatcatttagagaaattatctagattcattaattttcatagtgcctttttcacatgagtcagctggaaagtctgcaataaacagtatttgctgtctgtt

SEQ ID NO: 47497 - DNA, 2639 bp, Homo sapiens
  misc_feature (173)..(174): n is a, c, g, or t
  misc_feature (188)..(188): n is a, c, g, or t
  misc_feature (197)..(198): n is a, c, g, or t
  misc_feature (204)..(205): n is a, c, g, or t
  misc_feature (207)..(207): n is a, c, g, or t
  misc_feature (220)..(220): n is a, c, g, or t
  misc_feature (276)..(276): n is a, c, g, or t
ttgcgaggacacggaaacgaaggccctgaacccacacccaattctctcaaattagaccgcctttccccaccgttaacgtggaaattccccctggcactcccctcccttggaaagaaaagtggcccagaacgccaaacttggcacacccgggtgaaccctggacggaaccagtnntcacacctcggtgnggatccaanngatatnnanaacggcacgttcnccgtggcaacatggaatttcttctgagcggcactccgaccaatggtcagtctgtgnatgagttcatcttgcacttcctccatctgagatttccttcggtccaccggaagttgtttgtgtctctggctgtctcgcacgatactgccaccactgtcactggagctgctgttttgacgtgttatatttgctgggacctttgacacaggaacaggtgctggagtggaagggggaaggggaacaggaacaggagctggtgttggaggaggtgatggagcagggggagtatcagctggtcttgggccatactccatcctttgtttctgtatagtatgagtataaggtggatcagcacgccccatccagattctggaggtctcacatatccaaatgttatttggcacaatccagagtctccacttgcatttcgaactttccaccattgcttccgatcatcaagtatctctaaaatatcatcctttagaaccgagagctcactgttgttccttgctacaaagtcatacttggatttggcatatttcttgggttgtgttttgagtggttcataatttctatctatatggcgattagaagttggcttaaaagcaacagcagcttccccttggtccaggtgggatcctcttgtgtaaatgttgctactgaacgcatagccatcggctggatgatactctgatacactggaatgctctgtggataatctttttatttcctgttcctgtgtcaaaggtcccagcaaatataacacgtcaaaacagcagctccagtgacagtggtggcagtatcgtgcgagacagccagagacacaaacaacttccggtggaccgaaggaaatctcagatggaggaagtgcaagatgaactcatccacagactgaccattggtcggagtgccgctcagaagaaattccatgtgccacggcagaacgtgccagttatcaatatcacttacgactccacaccagaggatgtgaagacgtggttacagtcaaagggattcaaccctgtgactgtcaatagtcttggagtattaaatggtgcacaacttttctctctcaataaggatgaactgaggacagtctgccctgaaggggcgagagtctatagccaaatcactgtacaaaaagctgcattggaggatagcagtggcagctccgagttacaagaaattatgagaagacgacaggaaaaaatcagtgctgccgctagtgattcaggagtggaatcttttgatgaaggaagcagtcactaatttgtttgtttgtatttaaactccattgtttttggcattattccaacatgctttgttttaagaagccttgaagggaatgtcagattcatttttcttgatgtaatttatcaccataaaaaaaaaacccatgcaaacctgagtgagcacaggatttgcttctaggcccattatttttattaaaactgaaaaaatttaaactgaattttttgaccttggaaaatatttttcttactttaccaaggtgaagtttccttaattagactaattattttatccccatcccagggtataaacaggaattgttttgatagtggtggagttattcactgcaacaaagcaacaatgttgtccatgattcaaaatctaagcagtttcgattttgcctgtgaatatggtgtctgtcattcagggcatagctcactgtaggctagcctctgcttacttaagtctcttctctgacatactcaatggaagaatatttagatttatttaaagttcttaatgccaacagtttaaaaaaaaattaaaacatttgaatgaactgtaaagtacagccataccttggacatgcaaatataaatctatggagcattctcaagacagtttgtcatggctctgttgattgcaactccttgtatagcttgtattttgatttagtttatattctgcttattatgtatactgtgttcttatatatgagaaagcacaaatgcgaaagaggtcatgtcttctcaaaatctagcaaaggaagtagtctgcattggtgtgcattacagtattttgcttaatgaaagcctcagttctgaatgttgatatgagtagttaaaaggaagtggggccattttatgtgtttatctgtgtcaagtatttctggtaataagaagcacttaatttacacatattttaatcctgtgaaagattccacatagagaaaagaaagatacctaaccttcaacaaatgttatttttggaaacacaatttttgtcattaaatgttatattatttcacatatataaaacagatgttatgtaagaatgttgtatattttaacataaatcatttagagaaattatctagattcattaattttcatagtgcctttttcacatgagtcagctggaaagtctgcaataaacagtatttgctgtctgtt

SEQ ID NO: 47498 - DNA, 2033 bp, Homo sapiens
gaaccctgcctgagacgcctccattaccactgcgcagtgagatgaggggactcacagttgccaagaggggtctttgatattttagagatacttgatgatcggaagcaatggtggaaagttcgaaatgcaagtggagactctggatttgtgccaaataacattttggatattgtgagacctccagaatctggattggggcgtgctgatccaccttatactcatactatacagaaacaaaggatggagtatggcccaagaccagctgatactccccctgctccatcacctcctccaacaccagctcctgttcctgttccccttcccccttccactccagcacctgttcctgtgtcaaaggtcccagcaaatataacacgtcaaaacagcagctccagtgacagtggtggcagtatcgtgcgagacagccagagacacaaacaacttccggtggaccgaaggaaatctcagatggaggaagtgcaagatgaactcatccacagactgaccattggtcggagtgccgctcagaagaaattccatgtgccacggcagaacgtgccagttatcaatatcacttacgactccacaccagaggatgtgaagacgtggttacagtcaaagggattcaaccctgtgactgtcaatagtcttggagtattaaatggtgcacaacttttctctctcaataaggatgaactgaggacagtctgccctgaaggggcgagagtctatagccaaatcactgtacaaaaagctgcattggaggatagcagtggcagctccgagttacaagaaattatgagaagacgacaggaaaaaatcagtgctgccgctagtgattcaggagtggaatcttttgatgaaggaagcagtcactaatttgtttgtttgtatttaaactccattgtttttggcattattccaacatgctttgttttaagaagccttgaagggaatgtcagattcatttttcttgatgtaatttatcaccataaaaaaaaaacccatgcaaacctgagtgagcacaggatttgcttctaggcccattatttttattaaaactgaaaaaatttaaactgaattttttgaccttggaaaatatttttcttactttaccaaggtgaagtttccttaattagactaattattttatccccatcccagggtataaacaggaattgttttgatagtggtggagttattcactgcaacaaagcaacaatgttgtccatgattcaaaatctaagcagtttcgattttgcctgtgaatatggtgtctgtcattcagggcatagctcactgtaggctagcctctgcttacttaagtctcttctctgacatactcaatggaagaatatttagatttatttaaagttcttaatgccaacagtttaaaaaaaaattaaaacatttgaatgaactgtaaagtacagccataccttggacatgcaaatataaatctatggagcattctcaagacagtttgtcatggctctgttgattgcaactccttgtatagcttgtattttgatttagtttatattctgcttattatgtatactgtgttcttatatatgagaaagcacaaatgcgaaagaggtcatgtcttctcaaaatctagcaaaggaagtagtctgcattggtgtgcattacagtattttgcttaatgaaagcctcagttctgaatgttgatatgagtagttaaaaggaagtggggccattttatgtgtttatctgtgtcaagtatttctggtaataagaagcacttaatttacacatattttaatcctgtgaaagattccacatagagaaaagaaagatacctaaccttcaacaaatgttatttttggaaacacaatttttgtcattaaatgttatattatttcacatatataaaacagatgttatgtaagaatgttgtatattttaacataaatcatttagagaaattatctagattcattaattttcatagtgcctttttcacatgagtcagctggaaagtctgcaataaacagtatttgctgtctgtt

SEQ ID NO: 47499 - DNA, 2478 bp, Homo sapiens
cacctaccttttttaatacaaatggccacaggtccctttctagtattcgtttgtgagttgcaatcataaacatttaaagaccataccattaccctcacaaccatccaccccgtgacatttccattttaacaagggaaatttctaattttaataaattagcattaagatgatggcagaaaaagttatgccttgaacaaaataataccaatattttaaaattatttattggaaacaaaattaaaaatctttgaatatagcgtacatttaaaatgagtaagtgatgctttatgctgttgacatttagacttccagtgcaattggaaattattattagcataaattaaaaaataattataaatctttctgcctcccctcatcttgtgtgattccaagcccaaattctgttttcttgacatttattactataatactactatttgctattgacgtagccttgtgactccttaactaatgttttgactttgaacaaattatgtagaatgtttaaaatatgatttttaatggtcattataccatataggattacagataaatgagtaatgggtttgcaagtaagtttaaaaatagccaacaatgtcctatcaaagtataatttgttttcctagcctaggtttatattttttaaattttaagttaattatttgtctttttatagaaacaaaggatggagtatggcccaagaccagctgatactccccctgctccatcacctcctccaacaccagctcctgttcctgttccccttcccccttccactccagcacctgttcctgtgtcaaaggtcccagcaaatataacacgtcaaaacagcagctccagtgacagtggtggcagtatcgtgcgagacagccagagacacaaacaacttccggtggaccgaaggaaatctcagatggaggaagtgcaagatgaactcatccacagactgaccattggtcggagtgccgctcagaagaaattccatgtgccacggcagaacgtgccagttatcaatatcacttacgactccacaccagaggatgtgaagacgtggttacagtcaaagggattcaaccctgtgactgtcaatagtcttggagtattaaatggtgcacaacttttctctctcaataaggatgaactgaggacagtctgccctgaaggggcgagagtctatagccaaatcactgtacaaaaagctgcattggaggatagcagtggcagctccgagttacaagaaattatgagaagacgacaggaaaaaatcagtgctgccgctagtgattcaggagtggaatcttttgatgaaggaagcagtcactaatttgtttgtttgtatttaaactccattgtttttggcattattccaacatgctttgttttaagaagccttgaagggaatgtcagattcatttttcttgatgtaatttatcaccataaaaaaaaaacccatgcaaacctgagtgagcacaggatttgcttctaggcccattatttttattaaaactgaaaaaatttaaactgaattttttgaccttggaaaatatttttcttactttaccaaggtgaagtttccttaattagactaattattttatccccatcccagggtataaacaggaattgttttgatagtggtggagttattcactgcaacaaagcaacaatgttgtccatgattcaaaatctaagcagtttcgattttgcctgtgaatatggtgtctgtcattcagggcatagctcactgtaggctagcctctgcttacttaagtctcttctctgacatactcaatggaagaatatttagatttatttaaagttcttaatgccaacagtttaaaaaaaaattaaaacatttgaatgaactgtaaagtacagccataccttggacatgcaaatataaatctatggagcattctcaagacagtttgtcatggctctgttgattgcaactccttgtatagcttgtattttgatttagtttatattctgcttattatgtatactgtgttcttatatatgagaaagcacaaatgcgaaagaggtcatgtcttctcaaaatctagcaaaggaagtagtctgcattggtgtgcattacagtattttgcttaatgaaagcctcagttctgaatgttgatatgagtagttaaaaggaagtggggccattttatgtgtttatctgtgtcaagtatttctggtaataagaagcacttaatttacacatattttaatcctgtgaaagattccacatagagaaaagaaagatacctaaccttcaacaaatgttatttttggaaacacaatttttgtcattaaatgttatattatttcacatatataaaacagatgttatgtaagaatgttgtatattttaacataaatcatttagagaaattatctagattcattaattttcatagtgcctttttcacatgagtcagctggaaagtctgcaataaacagtatttgctgtctgtt

SEQ ID NO: 47500 - DNA, 1451 bp, Homo sapiens
gcgcgggcactgggcatgcgcggcgcgcggttggcactggctgcgagcgggcgggcggctccagacttcacaggcagcagctagcgaggcggtctcgcccggcgcgaggccggcgctgtgctcgcctcggagatcgctgctctttagctgggtgcagaaggcggctccgcggctcgcggacgactggctgggcgcgaatcagattggggggctttctcccggtcccctcccacctcgtctgggctcgcggcgtctccggggaaagccgtggccccgagggcggatccgagaacacacaagtgaaagacacaatgaatggtcatatttctaatcatcccagtagttttggaatgtacccatctcagatgaatggctacggatcatcacctaccttttcccagacggacagagaacatggttcaaaaacaagtgcaaaggccctttatgaacaaaggaagaattatgcacgggacagtgtcagcagtgtgtcagatatatctcaataccgtgttgaacacttgactacctttgtcctggatcggaaagatgctatgatcactgttgatgatggaataaggaaattgaaattgcttgatgccaagggcaaagtgtggactcaagatatgattcttcaagtggatgacagagctgtgagcctgattgatttagaatcaaagaatgaactggagaattttcctttaaacacaatccagcactgccaagctgtgatgcattcatgcagctatgattcagttcttgcactggtgtgcaaagagccaacccagaacaagccagatcttcatctcttccagtgtgatgaggttaagatttgaatgaactgtaaagtacagccataccttggacatgcaaatataaatctatggagcattctcaagacagtttgtcatggctctgttgattgcaactccttgtatagcttgtattttgatttagtttatattctgcttattatgtatactgtgttcttatatatgagaaagcacaaatgcgaaagaggtcatgtcttctcaaaatctagcaaaggaagtagtctgcattggtgtgcattacagtattttgcttaatgaaagcctcagttctgaatgttgatatgagtagttaaaaggaagtggggccattttatgtgtttatctgtgtcaagtatttctggtaataagaagcacttaatttacacatattttaatcctgtgaaagattccacatagagaaaagaaagatacctaaccttcaacaaatgttatttttggaaacacaatttttgtcattaaatgttatattatttcacatatataaaacagatgttatgtaagaatgttgtatattttaacataaatcatttagagaaattatctagattcattaattttcatagtgcctttttcacatgagtcagctggaaagtctgcaataaacagtatttgctgtctgtt

SEQ ID NO: 47501 - DNA, 2973 bp, Homo sapiens
gcgcgggcactgggcatgcgcggcgcgcggttggcactggctgcgagcgggcgggcggctccagacttcacaggcagcagctagcgaggcggtctcgcccggcgcgaggccggcgctgtgctcgcctcggagatcgctgctctttagctgggtgcagaaggcggctccgcggctcgcggacgactggctgggcgcgaatcagattggggggctttctcccggtcccctcccacctcgtctgggctcgcggcgtctccggggaaagccgtggccccgagggcggatccgagaacacacaagtgaaagacacaatgaatggtcatatttctaatcatcccagtagttttggaatgtacccatctcagatgaatggctacggatcatcacctaccttttcccagacggacagagaacatggttcaaaaacaagtgcaaaggccctttatgaacaaaggaagaattatgcacgggacagtgtcagcagtgtgtcagatatatctcaataccgtgttgaacacttgactacctttgtcctggatcggaaagatgctatgatcactgttgatgatggaataaggaaattgaaattgcttgatgccaagggcaaagtgtggactcaagatatgattcttcaagtggatgacagagctgtgagcctgattgatttagaatcaaagaatgaactggagaattttcctttaaacacaatccagcactgccaagctgtgatgcattcatgcagctatgattcagttcttgcactggtgtgcaaagagccaacccagaacaagccagatcttcatctcttccagtgtgatgaggttaaggcaaacctaattagtgaagatattgaaagtgcaatcagtgacagtaaaggagggaaacagaagaggcggcccgacgccctgaggatgatttccaatgcagaccctagtataccgcctccacccagagctcctgcccctgcgccccctgggaccgtcacccaggtggatgttagaagtcgagtggcagcctggtctgcatgggcagccgaccaaggggactttgagaaaccaaggcagtatcatgagcaggaagaaacacctgagatgatggcagcccgcattgacagagatgtgcaaatcttaaaccacattttggatgacattgaattttttatcacaaaactccaaaaagcagcagaagcattttctgagctttctaaaaggaagaaaaacaagaaaggtaaaaggaaaggaccaggagagggtgttttaacgctgcgggcaaaacctccacctcctgatgaatttcttgactgtttccaaaagtttaaacacggatttaaccttctggccaaactgaagtctcatattcagaatcctagtgctgcagatttggttcactttttgtttactccattaaatatggtggtgcaggcaacaggaggtcctgaactagccagttcagtacttagtcccctattgaataaggacacaattgatttcttaaattatactgtcaatggtgatgaacggcagctgtggatgtcattgggaggaacttggatgaaagccagagcagagtggccaaaagaacagtttattccaccatatgttccacgattccgcaatggctgggagcccccaatgctgaactttatgggagccacaatggaacaagatctttatcaactggcagaatctgtggcaaatgtagcagaacatcagcgcaaacaggaaataaaaagattatccacagagcattccagtgtatcagagtatcatccagccgatggctatgcgttcagtagcaacatttacacaagaggatcccacctggaccaaggggaagctgctgttgcttttaagccaacttctaatcgccatatagatagaaattatgaaccactcaaaacacaacccaagaaatatgccaaatccaagtatgactttgtagcaaggaacaacagtgagctctcggttctaaaggatgatattttagagatacttgatgatcggaagcaatggtggaaagttcgaaatgcaagtggagactctggatttgtgccaaataacattttggatattgtgagacctccagaatctggattggggcgtgctgatccaccttatactcatactatacagaaacaaaggatggagtatggcccaagaccagctgatactccccctgctccatcacctcctccaacaccagctcctgttcctgttccccttcccccttccactccagcacctgttcctgtgtcaaaggtcccagcaaatataacacgtcaaaacagcagctccagtgacagtggtggcagtatcgtgcgagacagccagagacacaaacaacttccggtggaccgaaggaaatctcagatggaggaagtgcaagatgaactcatccacagactgaccattggtcggagtgccgctcagaagaaattccatgtgccacggcagaacgtgccagttatcaatatcacttacgactccacaccagaggatgtgaagacgtggttacagtcaaagggattcaaccctgtgactgtcaatagtcttggagtattaaatggtgcacaacttttctctctcaataaggatgaactgaggacagtctgccctgaaggggcgagagtctatagccaaatcactgtacaaaaagctgcattggaggatagcagtggcagctccgagttacaagaaattatgagaagacgacaggaaaaaatcagtgctgccgctagtgattcaggagtggaatcttttgatgaaggaagcagtcactaatttgtttgtttgtatttaaactccattgtttttggcattattccaacatgctttgttttaagaagccttgaagggaatgtcagattcatttttcttgatgtaatttatcaccataaaaaaaaaacccatgcaaacctgagtgagcacaggatttgcttctaggtcctgtgactctgggcactgtttgactctg

SEQ ID NO: 47502 - DNA, 2564 bp, Homo sapiens
gcgcgggcactgggcatgcgcggcgcgcggttggcactggctgcgagcgggcgggcggctccagacttcacaggcagcagctagcgaggcggtctcgcccggcgcgaggccggcgctgtgctcgcctcggagatcgctgctctttagctgggtgcagaaggcggctccgcggctcgcggacgactggctgggcgcgaatcagattggggggctttctcccggtcccctcccacctcgtctgggctcgcggcgtctccggggaaagccgtggccccgagggcggatccgagaacacacaagtgaaagacacaatgaatggtcatatttctaatcatcccagtagttttggaatgtacccatctcagatgaatggctacggatcatcacctaccttttcccagacggacagagaacatggttcaaaaacaagtgcaaaggccctttatgaacaaaggaagaattatgcacgggacagtgtcagcagtgtgtcagatatatctcaataccgtgttgaacacttgactacctttgtcctggatcggaaagatgctatgatcactgttgatgatggaataaggaaattgaaattgcttgatgccaagggcaaagtgtggactcaagatatgattcttcaagtggatgacagagctgtgagcctgattgatttagaatcaaagaatgaactggagaattttcctttaaacacaatccagcactgccaagctgtgatgcattcatgcagctatgattcagttcttgcactggtgtgcaaagagccaacccagaacaagccagatcttcatctcttccagtgtgatgaggttaaggcaaacctaattagtgaagatattgaaagtgcaatcagtgacagtaaaggagggaaacagaagaggcggcccgacgccctgaggatgatttccaatgcagaccctagtataccgcctccacccagagctcctgcccctgcgccccctgggaccgtcacccaggtggatgttagaagtcgagtggcagcctggtctgcatgggcagccgaccaaggggactttgagaaaccaaggcagtatcatgagcaggaagaaacacctgagatgatggcagcccgcattgacagagatgtgcaaatcttaaaccacattttggatgacattgaattttttatcacaaaactccaaaaagcagcagaagcattttctgagctttctaaaaggaagaaaaacaagaaaggtaaaaggaaaggaccaggagagggtgttttaacgctgcgggcaaaacctccacctcctgatgaatttcttgactgtttccaaaagtttaaacacggatttaaccttctggccaaactgaagtctcatattcagaatcctagtgctgcagatttggttcactttttgtttactccattaaatatggtggtgcaggcaacaggaggtcctgaactagccagttcagtacttagtcccctattgaataaggacacaattgatttcttaaattatactgtcaatggtgatgaacggcagctgtggatgtcattgggaggaacttggatgaaagccagagcagagtggccaaaagaacagtttattccaccatatgttccacgattccgcaatggctgggagcccccaatgctgaactttatgggagccacaatggaacaagatctttatcaactggcagaatctgtggcaaatgtagcagaacatcagcgcaaacaggaaataaaaagattatccacagagcattccagtgtatcagagtatcatccagccgatggctatgcgttcagtagcaacatttacacaagaggatcccacctggaccaaggggaagctgctgttgcttttaagccaacttctaatcgccatatagatagaaattatgaaccactcaaaacacaacccaagaaatatgccaaatccaagtatgactttgtagcaaggaacaacagtgagctctcggttctaaaggatgatattttagagatacttgatgatcggaagcaatggtggaaagttcgaaatgcaagtggagactctggatttgtgccaaataacattttggatattgtgagacctccagaatctggattggggcgtgctgatccaccttatactcatactatacagaaacaaggatggagtatgggccaagaaccagtggatatgcccctggttccataactccttcaaaccagtccgggtctggaccccgttcgcatgtccatgcagcacagggcacggggcaaaaggtcccggcactatagaaggtccaaaacggcgatccggggacaacacggtggggacgaacttctggagcgacagcacaggacacagacaagtgcgtggaccacgcggaacccaactgagggacgacagagaaaccaccagacgcgaagagttaggccgcacaaccacgcggcggggagagggccacaacatcagaccaccggcgacgtgtcagtagcgtacaacgatagcactgatgagagcaatcagaggagcagaggacaacactgggcagcctcattaaggctacacatcactatctaaagaacaagt

SEQ ID NO: 47503 - DNA, 1454 bp, Homo sapiens
gcgcgggcactgggcatgcgcggcgcgcggttggcactggctgcgagcgggcgggcggctccagacttcacaggcagcagctagcgaggcggtctcgcccggcgcgaggccggcgctgtgctcgcctcggagatcgctgctctttagctgggtgcagaaggcggctccgcggctcgcggacgactggctgggcgcgaatcagattggggggctttctcccggtcccctcccacctcgtctgggctcgcggcgtctccggggaaagccgtggccccgagggcggatccgagaacacacaagtgaaagacacaatgaatggtcatatttctaatcatcccagtagttttggaatgtacccatctcagatgaatggctacggatcatcacctaccttttcccagacggacagagaacatggttcaaaaacaagtgcaaaggccctttatgaacaaaggaagaattatgcacgggacagtgtcagcagtgtgtcagatatatctcaataccgtgttgaacacttgactacctttgtcctggatcggaaagatgctatgatcactgttgatgatggaataaggaaattgaaattgcttgatgccaagggcaaagtgtggactcaagatatgattcttcaagtggatgacagagctgtgagcctgattgatttagaatcaaagaatgaactggagaattttcctttaaacacaatccagcactgccaagctgtgatgcattcatgcagctatgattcagttcttgcactggtgtgcaaagagccaacccagaacaagccagatcttcatctcttccagtgtgatgaggttaaggcaaacctaattagtgaagatattgaaagtgcaatcagtgacagtaaaggagggaaacagaagaggcggcccgacgccctgaggatgatttccaatgcagaccctagtataccgcctccacccagagctcctgcccctgcgccccctgggaccgtcacccaggtggatgttagaagtcgagtggcagcctggtctgcatgggcagccgaccaaggggactgtgagtcttcctagaattaatacttattgaacacttactttgggttgggacatagttcttgctttcaaattctgatgctgatttcagaactgaagcttgaggttagtttttaaaaaatcaactctggccgggcgcagtggctcatgcctgtaatcccagtgctttgggaggccgaggcgggcggatcacctgaggtcaggagtttgagaccagcatgaccaatatgatgaaaccccgtctctattaaaaatacaaaaattaggtgggtgtggtggcatgcgcctataatcctagctactgggatggttgagacaggagaatcacttgaaccgggaggcggaggttgcagtaagctgagatcacgccattgcaccccagcctggacaacaagaccaaaactccatttc

SEQ ID NO: 47504 - DNA, 453 bp, Homo sapiens
ttcagtacttagtcccctattgaataaggacacaattgatttcttaaattatactgtcaatggtgatgaacggcagctgtggatgtcattgggaggaacttggatgaaagccaggtaagcatttaccacctataatgccttaagtaccattctttgttaattacatggatctaatgagacatttatttaaccttctacatacgaaggactaagcgtcataggatgaaaaaacctaaacccttaaaggctagaagtctagtggaagagatagaagtgtatgtaatataaggcatgatataccttaggagtgagtcataaacaaaatgctgttggttggcaagggggaccagtcaggaagaggatttagacaggagggtagttagctttcaaagaagagctgtcatttaaaatcgacaggtacacatagggttcacacacacatacacatgcgcg

SEQ ID NO: 47505 - DNA, 413 bp, Homo sapiens
tacagataaatgagtaatgggtttgcaagtaagtttaaaaatagccaacaatgtcctatcaaagtataatttgttttcctagcctaggtttatattttttaaattttaagttaattatttgtctttttatagaaacaaaggatggagtatggcccaagaccagctgatactccccctgctccatcacctcctccaacaccagctcctgttcctgttccccttcccccttccactccagcacctgttcctgtgtcaaaggtcccagcaaatataacacgtcaaaacagcagctccagtgacagtggtggcagtatcgtgcgagacagccagagacacaaacaacttccggtggaccgtaagtttcccagggaggcaaaaaatgtcttctgcaaattaaaagcactactaagtaa

SEQ ID NO: 47506 - DNA, 926 bp, Homo sapiens
ggcggctccagacttcacaggcagcagctagcgaggcggtctcgcccggcgcgaggccggcgctgtgctcgcctcggagatcgctgctctttagctgggtgcagaaggcggctccgcggctcgcggacgactggctgggcgcgaatcagattggggggctttctcccggtcccctcccacctcgtctgggctcgcggcgtctccggggaaagccgtggccccgagggcggatccgaggtaagagccccttggcgaaaggcgccggtcccggggtccggcggctttgactttctcgattttaaaaatccgcctttgtgtgctggaatcggagcggtgccaggagccgcgtccgcctcccttcactttgactgctttcaactggtgttggcagccaggtgcggtagggcgctgcggccggaggcgtccgctcgccgggtccgggcaagctgtggggcccgtgcagacccgcgcccagggctccgggaggctgggcagggagggttcgccgtggcccagtgatattcatggtaacctgagcttccgcagatacacctgcgctcatctggtccgtggggcgactgcagaccgagtatcccgatctcggcttattacgttagacttgggatttgtgcgctgctctgccaacccgcctcaaatggggaggggttcttttcaaaatgaccctttagggcagggtcccacccccgtttaccccctcgaattaacatagctaattgtttcggaatcgttgtcaatgcctaatggctgttgactttcttagcttgctccactttactcaccattttacttttgggaagacagacggcctttctccggttgtggtcagttcatgcatttgaaaggggtttccccacccatgtactccctgccctctccgatgttctcactcttactttccttcctag

SEQ ID NO: 47507 - DNA, 476 bp, Homo sapiens
gggaggatggcttgaggccgggagttcaagactagcctgggcaacattgggaaaccctgtctctacaaaaaataaaaaaagggttgggtgtggtgatgccctcctgtggtcccgatacttaggaggctgaggtgggaggattacttgagctgcagcctgggtgatatagcaagactctgtctaaaaaaaaaaaaaaaaaaagatgttgatgattgattggttgaaagtttgttaaactaacaggaagatacagtattctagaaacacaatactaaccaatttccttgggttctgttattgtcagataaacttcttaattgtgccaacgttgtgacttcaaaaactgtacatttcacattgaaaagaaaaaatcaacagagaacatttcatccctaggtgtttcatgtcctgtgctaagcgggccggtgagaagcccaaggtaatatgcatcaataaacccactttgtttctaaagc

SEQ ID NO: 47508 - DNA, 309 bp, Homo sapiens
gcttccttgcacagagctcctagcaagagaatgctctctggagctgtcaggcttctctgtgccctttccacagacgctggatcactgagttatggctcatttgcttcctgtatccccattcaccatagctaggagtgactatccatctccttcttatagcagtgcggggagttgtggctgcagtgttaaatgcctcatctccctgccaatgccttggttttcatggtctgttctgcacagtgtcgagccttggaagtgtcattttgaagggcccagtgtttgaatgcaataaagtggatataatacctc

SEQ ID NO: 47509 - DNA, 437 bp, Homo sapiens
aatctctgtaactgagctttatcatcctgctttttagaaactgagaaaaccaagactcaaagtgttgggattctcatgccaccactttgtaggtgtgtgccagcagctcaattactttgcctttattcacttttcttatctataaaaagagagtaataccccctaacacctaaaattgttttgaggaaaaaaatgagttaatagagacaaacactcttaagatagtgtctcacacatcctaaactctcaatagatattaactattattatttgtcatataacacttcgtgatgatctgattaatatctgctcaccccctcactaagataccagctccatgaagaaagaggccttctcaggttttgcttactatcaccaagcacacgcctataacataataagatcttggaatgaataaaataatgagatcaagatga

SEQ ID NO: 47510 - DNA, 479 bp, Homo sapiens
atagagacagggtctcactatgtttcccaggctggtttcgaactcctgagctcatgcaatcctcttgcctcagcctcccaaagtactgggattacaggcatgagccaccacgcccaaccataatttaaaattttctagcaaattattattttttaaagctctcttatatgacagaaacctttcaaagaaaaattctgtagctactgttgtgattactggggacagagtagggaaaaaggatggtcaataactcctcaatggataaaaaacaaaatccagtactcctttttcagacagggtttcactccatcacctagactggagtgcagtggttccatcattgccactgtaaccttaaattcctgggcttaagcaatcctactgcctcagcctcccaagtagctaggactaccagtacgtgccaccacacccacctaatttttaaatttttgtagagatggttactgctatgttgacca

SEQ ID NO: 47511 - DNA, 749 bp, Homo sapiens
cttgtccagaggcttcttcctaagaactcagtgccaggattttgagtagcactggatattctgtgcaatgggttcgttcatccaatttccaccactttacagatgaactggggatcagagaaggcaagccacctccccaaggtcacacagcttgtgagagcaagacaacagcatcgaggcctatgtaatagcagagccattgcttctttggctctgcggaagcttgtattgtggtatatctgtggtgtagctttgctgtctcctgtgtcaatgtcaggaggacaggctgagctcctgggaccagaacccctcagattccaggaggagcagagaaagcacagatggcctggagagtcccaggggtgaggccagcaagtactttcttcccccaggtgctcagagcatcctctgagttgccaaacagactcccagaggggtcaactgtgggccctaaaccagacagcagctgggaagcaggctctcaggggaactggggtctcaccagctcaggagcaggccaggactcctcagcacagaagctgggaatcttgagtgtccagatcagcctgaaaatctggacttgggaaaagccatctggctggggccacctgcatgccgctgtgactggggcatcctgctgctctcctctctcacaaggtgggtgccatctgccttgtcactgctcctcaggacaagcctgactgctctccctgcacctctggccattgagaatccggctgctccatcgt

SEQ ID NO: 47512 - DNA, 402 bp, Homo sapiens
tagaacaggaagaatggagcaaggaaccagagctcacagctctggaatggaaactgactcatgtggaaaaacagccacccctcagcagattttttttggcttcttttatatagaaagtatatacttaaatatggcaaatagcttgctacttctctaagcaccagtttcctcatctgtagaggggttagtatcttctttataaacttgttaagagacttacacaaaaataacttgttaaatgcctggcatagtacctcttccctatttagttgccccctccgttatatactcagcaagttcagaatgaaagtttagaatgtgaagagttaaagaaaaagcaaaatgtaaatgccctggcagagcttcacaagaaaatttgctacagagtggaattcagctaaa

SEQ ID NO: 47513 - DNA, 304 bp, Homo sapiens
atccacttgtatgttcattttgggctctaggtgtgatgaattaaagtattaatgttttctaactataatttactagcagtggaagtgatgagaaatggtcaaatttggggtatatttagatgacagtggccaacgatgttctctcactgcgggtcacttcattaaggactggtgtggacagtgtcagcaacctttgctcaagttgccatcttttccaagattattttatctaatctcacttcttagttatttcttccttccaaatctactttataactgcttcaaatcatatcattctaaacac

SEQ ID NO: 47514 - DNA, 475 bp, Homo sapiens
atatcctgtataaaaattaagaggttgtaaagatattgaaacattccactaaaatacatgtcagatgccagctgaattttgggtgagataagatgcaaagtggatctgtagtaagagaaagaagttaagtatcaaatacctatctggaattttatgcagtgaatatgagaacactgtgaaaatctattgggaagtaataaatttgttacacatagaaacagttgagtattttacaagtggaacatatggctataatattactttgggaaaacatactgccaatatcaacctaagaaaaagaaaaactgatattcttctctctccaaaatgggctttgataaattatgtataaaatgttcaatttgttttaagaaatctatcttaacaaatctatcagtgtttttgttgtttttcaacacttttgcagtacttttagcatggtacatacattaaaaatattagccattaggcactt

SEQ ID NO: 47515 - DNA, 272 bp, Homo sapiens
tttggacttgatcccataggtaaaaagaacttttaatgagaaagtgatcatttgatccactggggtctgtcaggtgtcttaggtcagattccccagaagcagagcctgaggcagggattcttgtcacagaggtttgttgggagagtgcctcagaacagaagggatgtgggaagcttggtggtgggacaccaagtaagggtgtggtcccttggacatgagcttccttctgtccagagggaagctccatggcacatattgcaggacagatttgt

SEQ ID NO: 47516 - DNA, 432 bp, Homo sapiens
gcttcagtgtaactggagcaataccagctgattctaacagtgtggcccagcagcgcctgctggctgggagcagggacagaaaatgcctgaggctccgaggtgggagcccaggctgggattcaggatttcgctgctccccgttcaaggcctctggagaatgttccaaagggaggtgtggatgtttcattcagtactttggagggagaaagaaatgggttctttctctgtattctctaagatagatttgttcttaatcttgaaaaatcatttctagccattttagaaaaaaaaaaacattagtacagtattagtaaatatggatgggataaaattttttttacatacacataggattcaatacatttttcatatgctgaccttataagtcatattgttttgaaattatatttattaaaaatgtgattagagtta

SEQ ID NO: 47517 - DNA, 384 bp, Homo sapiens
accacaagagtctcttccattcatgtgtttgacacacatttatcaaatcctactatattctaggcactcttctgggtggtgggcatacagaagtgaataaaacagatgaaaccccttgcccccgtggagtttatctttctcatggtgggagttagataagtgaatcataaaaacatagtctgccaagtagtgataagtactatggagataaatcaagcaggggagggtgctggtgtacactgggtgttggagggttctctctcattctgtagagagcatgatgatgagggcctggagagttaggggtgacttgagagtcctgggccttttgccttaactgcgggatatgggattaaaaggcatgagggggctgggcacagtagc

SEQ ID NO: 47518 - DNA, 325 bp, Homo sapiens
tctcttgatagcttaaagaatctgcttttgtggtgattcctagggaagtactgacagattttactccctctcttctactgttcacttgctacaacttgcatactggattgaaggttagaattggggttaaaaagtgaaaaagtcagggaaaagtatagtatttcaggctgagccttcctggttaccatgctgccttgccctcatgggacatgcttctgtgaatgtagcgcaatgcaagggtaaagtgcaccgtgattgtgcaggtgaatcacatcagtctgatgacagaggctgtcaaagagcatagatggcatatgactcttct

SEQ ID NO: 47519 - DNA, 459 bp, Homo sapiens
atactactcctctgcttagacaccccagtgcctttccactgaagtcagaataatatccaaatttcttattatggccatccagttcgtctgttaccaaaccccagttgttctctcaacccaaattcttttattctttctctgatttattctgctataattccactgttttttttcttctttttttatcatgcatataaagttgtgtctgcttgaaggactttttagttgctgttctgttaccaggaacagtttttcctctgacattcacattcttggcttctacctaagatttaagattcaattcagatatctcctacttactcagaggggtctttttaaaccttcctgtctaaaatagtacatagcacttcctaatagtatatattttttagtttgggagacctgtatggacaagaaatcattttttttttttaagacagagcctcactctgttgccca

SEQ ID NO: 47520 - DNA, 1690 bp, Homo sapiens
ccacgcgtccgggggtgctgggcctggcgggcaaactaaggctgcggaccgttgggcggttccgcggggcgttgtccggagagctgcgaggccggggttcccagggttcacgccacactctaggaagtgcctgagctagtgagctggccaacgagctccgcgggctgggaccatgggctgcttcttctccaagagacggaaggctgacaaggagtcgcggcccgagaacgaggaggagcggccaaagcagtacagctgggatcagcgcgagaaggtaatgaaagtcgtgtagccgccgtctcagcctccctgagccgctccgccaggtcccttacggcccgggaccgctgagggggccgacccaactgctgccgcactctcttgaacgcggatagctgaagtcggggtgcacgacttttttggggagcggggacgtgaagtacagcgctagagaggccgcccagagggctgtggagctccggaaggagccttaggagtttgttgtcgtggtagacagactcccccgggagctttctctgactccgaaccctgccttgctctgacttcctgttggagatgatcgattcgagagagggaaagagccgagaacgccctgaatctcaaatcacctcgtttcacccaccggcagcgtcaagcggggttttgtccagtcgtcgagttacgtatatgggaccgattctcatctcttccggggcttaatgttctgtggctggtttctcttttgtctgccctccccggcaaatctctttggtgcctcatgatatatttcactgctgaattttctcaattaccaagtggactgtttaatgtacagctttactccccctcctcttccagttatccgaaagaaataatgaatatcgcatcagtcttggaatgtgtattaagactgtaaggtgaaaataagcggcataaaccaggcagtattttacttgctggttaaatgaatgacccccttattttattttggatatagccagaaccgaaaaactttgaaaaccttccttagtctctacacaaaacacactcggtcaacacatttcataatagttcctctttcaacatagttctccatttgtgcttacttaaactactttgatggacttatcaattatttctcccaaacaaaatgagagattttccaattgggtattatgaccagttaactctttgcttaaggcaacaatatctttacccaagattacttttataataaatgtattaacgttttggaatcacagacctttctgcatgatttccaatccccagcagaatgtattcaggtaagctctggtctctaagagtcagagttaggaaattgaaagctttttgcagcttttctcagccccgtctttctgcccctacttctcatacacacccttcttgggtcacatggtacctttattctctgttagtcatactcgatagtagcattttataatgtaggggaagaaagtactatgctttctatttcacaagaagattgcacctgccatttaaagttatctgatgggcggtttttaaaagatattgttttcctcagcctttggctttctaacaatgttcttttagcttgaattgtctgccttagagaaagttgcatatttcatttttattttagttttttcttttgaactcaggctaaatctaaactaaataaaatgccttt

SEQ ID NO: 47521 - DNA, 3813 bp, Homo sapiens
ccacgcgtccgggggtgctgggcctggcgggcaaactaaggctgcggaccgttgggcggttccgcggggcgttgtccggagagctgcgaggccggggttcccagggttcacgccacactctaggaagtgcctgagctagtgagctggccaacgagctccgcgggctgggaccatgggctgcttcttctccaagagacggaaggctgacaaggagtcgcggcccgagaacgaggaggagcggccaaagcagtacagctgggatcagcgcgagaaggttgatccaaaagactacatgttcagtggactgaaggatgaaacagtaggtcgcttacctgggacggtagcaggacaacagtttctcattcaagactgtgagaactgtaacatctatatttttgatcactctgctacagttaccattgatgactgtactaactgcataatttttctgggacccgtgaaaggcagcgtgtttttccggaattgcagagattgcaagtgcacattagcctgccaacaatttcgtgtgcgagattgtagaaagctggaagtctttttgtgttgtgccactcaacccatcattgagtcttcctcaaatatcaaatttggatgttttcaatggtactatcctgaattagctttccagttcaaagatgcagggctaagtatcttcaacaatacatggagtaacattcatgactttacacctgtgtcaggagaactcaactggagccttcttccagaagatgctgtggttcaggactatgttcctatacctactaccgaagagctcaaagctgttcgtgtttccacagaagccaatagaagcattgttccaatatcccggggtcagagacagaagagcagcgatgaatcatgcttagtggtattatttgctggtgattacactattgcaaatgccagaaaactaattgatgagatggttggtaaaggctttttcctagttcagacaaaggaagtgtccatgaaagctgaggatgctcaaagggtttttcgggaaaaagcacctgacttccttcctcttctgaacaaaggtcctgttattgccttggagtttaatggggatggtgctgtagaagtatgtcaacttattgtaaacgagatattcaatgggaccaagatgtttgtatctgaaagcaaggagacggcatctggagatgtagacagcttctacaactttgctgatatacagatgggaatatgaagtgcaatgtggaaccaggacttggtattaagcctttcccaacttgtgaatatagaatttgataatacacttttgtgtattagcaatggtttttactaatgctaaaacttttaaagtttattttttaataaattgttgagtattacatcatttacttgaggttcaaaaataattcattttaaattaagtagttttaatcagcttaaaagctatttaacccattttaataagcttgcagttttgtttctctgcatatgatattcttattagaaaacagaagtagctaaaagtttattattttaatcctatttaaatgttctttcaaatctctaataatttaaactttcctcagtgctccatgatactttttttgagactccatatcattgcttattttacctttttcaattaagagggatttgttactagtcgatcaattagaatgaacctatgcacatttttatgtacacatatccagttatataattgcttcctagttgcattatatggcaaatgagattttgtacatggagttgacataatactttgtaaattgaattttttaaagaaataggcatttgataaccagcttggcaagtaactctactaacagatgttggtatagctatttaaagactacttcgtaagtagtatgattatttgaataaattacacattgtttagttttttaatacaactgctatatgactcttctgcttcctgataagaaaaggtatatgcaatgctaaaactgtagaagcccaatcaccagcagtttttaaaaaggtgataacttttattagctcttgtgggctatcaagagaattagaccaaacccttgtgacttttaggtaagaaataggcatgatgataagctatgcagattattaaaaagcttgatacatttgatttttcattagatatgccattcatatcaagtaatgttcaagtatgataaaattattttggttgctttaaagcactgtttcccaaatctacctgatcataataatttaccaggaagcagaggagagctacttgtttaaaaatccacattcttggacccaatcctcagatgcacggattcagtcttcaggggaaactctgttttaaggggtatgttgtaatctaaagtaattggttcaggaggtgtcaataggttgaacttgtgagaaggcactgaatctgccatccacatcacatatagcagctattatgaaatcagctttcataggcctatttttaaaaggaatctgaaatttaattctattttgataaaactaagactgaaaataaccacttgtaaacattcctatgattgttactaaaatgtattttcatgtttaaaatgtttttggatatttttgggttaataactactacattgaattgcatgttaaggtgcagaaataatacattaaaagattttcactttaaattaattagtaatattgagcgctcaccctgtgcgtggccttgtgctaaccattagcactgcatcatttcaattcttttataagggcattcaatactacaaaatcaacatgatttcataaggtgcaaataaaagttggtgacagatttaatataattttgatcacaatttacaaatgatctttgcaaatagtggtcagacggcattagtttttcccttagttaagctaaattaaagggactccatcctgttatgattatattattattattattattattatttttgaggtggagtttcactcttgttgcccaagctggagtgcaatggcgcgatctcggctcaccacaacatccgcctcctgggttcaagcgattctcctgcctcagcctcctgagtagctgggaatacagcatgcgccactacacctggctaatttttgtatttttagttgagatggggtttttccacgttggtcaggctggtctcgaactcctgacctcaggtgatccgtccacctcagcctcccaaagagctgggattacaggtgtgagctaccgcgcctggccatgatgatattattaaacaccattattcacatttcaaataataacaatactttttgtttttcaaaaataaaatgcaatgttatataaagctataaactaagttctttatgatatttgagcaacaactcaggaatataacatataagggagatgttaatttaaaaatttccactacacttattatctattaaccaaagcttaaaattttgtattcttctgttagataagaccttttacccatttaatttgtctttaaggacagtcatttggcttctgaatgtttgaaacgattttaaaaaataagtagtgctatggttgtttctataattctaacctttgatagtaatcagaatgtattacatttcatttctgaatagcttttgaatttatgaaaaattattaacaatgaaaaattggtaattttattaagttatatgtgtttaaatattatattagcttatttctcttgcattaatagtactgctgtttttgttttgcttctttatatttatgtctagcttttatatgtaatttatctagtgtttataaaatgtgatttgtaataaatgttgttaaaatgaaaa

SEQ ID NO: 47522 - DNA, 373 bp, Homo sapiens
caataaaatgagagccttaaaaagtattgaaattatggaatgcttatcagaaaggcaggggaaagactttcccactgttttcaatcatcttctttaaaaaatgattttaattttgtgcaactactgttctctatgcatgtcaagtgtcagaaaccacatatttcaacaaagttcctgaatattgtggataactaacatatgtaaaataatgctctatatctattggggcagagtatttaaggagatgaaatggcattagctcccatgccacaaaagcaaactagaatactgtggggaaatatgtcagtatgaacattaattgatacataagccagatttacgagagtataaatcagccctgggtgcggtggct

SEQ ID NO: 47523 - DNA, 433 bp, Homo sapiens
tgaaaattggcacatcctaccagactaatatgtgtacacagtacactattacctcacctttaatattcattgtgtccacagctgggataaatacttgcgttgggtgaccatggggcagagcagcctgtgctttgtgtatatgaagagttttctagaaggtgaactcatcccaataaaaaactgagtcaaacaggcaagttcagccttatcttatctaagaataaagcctcagatagaggagatgggcaattctgagtgtagcacaatggagcaaagcgattgttcaaaacgtttatctttggcaatctcaggaaaatgccatggaaaataacctggagcagaagaggggaaggaagcatgagcatgtgattgtaaatgagacacatcccagtggccttacataaatatacacctgggtagaactgtagacatg

SEQ ID NO: 47524 - DNA, 584 bp, Homo sapiens
attaattcctctaaacagaggaccacttccacgctaaatcatacctgaagagtgggctccaggtaattgcaggtatgaacaaattaggcattctcttttacatacagcccggcggccagcatcctggcgttgggcaaatccattcatcatcctgacgttctccagttgatccgtcttctcagagccattagcccccacgtccttgacggtggaacagttgtaaactcgagaccatccgtggggtggctgagactgacaattcattacgcagttggatggagaaggcggctcaggtgacaatgctgaggcctcccagttcccagaagctggctccgcttggaattggcaactgctggctaattttagaacagtcatcgttggggatggagaaggaggaggaggcagctttgactttggggtcagacgagcgggtcctgcagaaattggctgagctcagtaacacattgatcaccaaggcaagtggtcatcttcgttcaggtgggcatgggacagtggtccctgagccagcccaggatacattcaagtgcccccaaaaggacattccaggggagccaatgaaggga

SEQ ID NO: 47525 - DNA, 254 bp, Homo sapiens
taaagtttccaagaaaattccttttgttcagtgatatgtgaagcaaagggggaactggcttcttgaagttacattgtgaaaaaccctcacagggtttggggttcatataaaatgtagattgggacatcccttatgacttgcgatagtgctgtaagaaatagcttttctatagttggactgggatatgttacttctaattggatggttatggtgaccctggtattaactttggctaaattatctaatgatgatgg

SEQ ID NO: 47526 - DNA, 347 bp, Homo sapiens
cagaaattcagactttttaaatgcaaaatcttctgatttttaagtatttgagactaatcaaatgaaaatggtttaaaaataaaaccgcaatcctactgcccacatttgccccatatgatgcagatacgaatgtatctattattgctccatgaggcagctcttgtcattttaaggaaacttgatgaattatttaaaggaacatcttgatactattttttaagataaatatttaaaggctgggcgcagtgggtcacacctgtaatttcagcattttgggaggccgaggtgggtggatatcttgagctcaggagttcgagactagtctgggcaacatacagaaaccctgt

SEQ ID NO: 47527 - DNA, 733 bp, Homo sapiens
  misc_feature (725)..(733): n is a, c, g, or t
taaccaagacaaagtggtctctgtgtgctaagcactgtgcttatgcactgaatcatcatttcatcctcagaactaccctttatcaggtgggtgtcattatccccatcatatagctccacagaatccttaagtgacttgcccaaaatcacacagctactaaatgatggtgctggattcaaaaccaggctggtcaaatatctgggtccatttttgtaaccactatgttaaaaaaaagattcatcaaaggatcaaaactaatactagatggctttcatgtttcatggaggaaataaagactcagagatgacagaccaattcttcagcggcccctgcacctcatggatacttttcaggtgatggaggagtagaactacactgaaaatttgcatttgaataaggaacaaggaaaaaaaaaacttggaaatcaagtaacctaaagcaaattcacaaaaatagaaataactggctcaagaataacaagtataaatgtagggtgctcataatgagacttcataacgtgatagaagggtgccttttcttctgatttctacatggagcaggaggacctcagggaggtctgaacggcggcatgagagctcgtgcagatgaccagaggacccacgtcctccaggctgctgacttaaaatgggaagctgtttgggcagctcatttctgttttccaaactttgcaatttgagaaaaaaaaaatccaactgttaaatcannnnnnnnn

SEQ ID NO: 47528 - DNA, 966 bp, Homo sapiens
agcaaacctcccacagttgggattacaggcacatgccaccacgcccagctaaaattaaaaaaatttgtagaaacgggtgtcttgctgttttgcccaggctgatctcaaactcctggcctcaagtgatcctcccaccttggcctcccaaagggcatgaaccatcgcatccagcttgtctccaagttttttgatcttgtatcttacacttaaaaatcttgagtacacactcctaatatggaaatatgtataaataatatgactgtgttactgcactatgatgatgttttaaagtatgccacaattttgagggataagagaaaaatgaacggagatcatatttcttcccacattccagtaggcattttgcactccctactgtgtacacaatccactttgtaagcctctggcttttgagatagagtctacttacaagccaactagctgtcgccctcccttcgttcctgggttaagtttgctttccagtgaaacactctgcaaccattgaagaatgcaggctacctgccaggtatttggcttctaaagaagtcccaagaagtactaagtggaagaagcaagtattaatatatatgtatggtctgatttcttgtgtgaaaattttttacatttgtaaaaatgtataatttattcagagaaaatctctagattgatacattaaaagctgttaagttatttctgagcactgggattaagggccttgggagagtaagaagatttttattttttacttcactcttctgcactgcttgaatttttaatgaaccggattcttttcgtaataaataatttttaaaatcactaaatatattaggatgtcaactatgttacaatgcattgccaatgttgattgttgaagttgggtgatgggcatgttgggtttcattgtattcttctctacttttatgtgtatttgaatatttccataataaaaacttttaaataaaaaat

SEQ ID NO: 47529 - DNA, 203 bp, Homo sapiens
gtattattacagatatttataattattaaatttattatgcaaaataatattggaaatttatcttttaaaatgggtgaggctgatggtttccctttttattcatttagttcatctattcattaatctgtattacctgaatgaaactttcagaacaattttactctttcttaaaaattgacacataacaattgtacatatttatg

SEQ ID NO: 47530 - DNA, 535 bp, Homo sapiens
gaattctgtgagtgtttatattcaaacaagagtcccatatatttccttgccatgggctaaatcatctttaagactttctttgctattactgtatctgctgtaacagcggcagagatgttcttcccaaagacacaggcttaagcaggcctttttcacatgaagctgttctgaaagacagcaccagtattagttactgcatcaactacccaaaagaagcatccaagttcaaaactacaaaatcagtgtgaaaccacttcaaaagctcctacttatcaggccagacatggtggctcatgcctgtaaacccagcacttttgggaggccaaggagggaggattgcatgaggcaaggagtttgagcccagcctgggcaatacagcaagaccctatctctaaattttaaaattagccaggcatggtggtacatgccggtagtactagctacttaggaggctgaagcaggaggattccctgaacccaggagttcaaggttatagtgagcaccaatgcactccagcctgagtgtctgagcaaga

SEQ ID NO: 47531 - DNA, 1420 bp, Homo sapiens
aagggaagtggggagggaatacaaacttgaacaaaatattcttaaatgaagttgcatctctttttaaaattaagatatcattcatgcaccatacggtttatcctattaaggtgtaaacttcaatgtttttaatcatattcactaagttgtgcaacatcaccactccctaacttcagaacactttcatcacctccaaaagaaaccccataccatttgcaatcactcctcctcctccttcccccagcatccggcaaccactaatctactttctgtccctatgaatttgcctatcctggacatttcatatagtcaaacaacatgtggccttttgtgtctggcttctctaagtaagcataatgtttttaaagctcatccatgttgtagcataaatcagtacattgttttcatgtttaaataatattccattgcatgtatatgccacattttatttgtccatttatcatttgatggacatttgggttttttccaccttttgattataataatgctgctgtgaacatttatgtaaaagttttttgtatgggtgtatgttttcacatctctcttaaaaacaattagtctgacaaatcaaatcaaatcatttatgtttatttacgtagaacctcttgcaatcctgtttggagagtgcaacttacgatcttagtttaattgatcaattaggagacctctgaataaagactaactccccaatacatccataagaatttttctatgagcctgtcatttagatgtgataagcaatcaatttcatgaagactgtttcagtcttgtagaaattgagttgccatcacatagaggatttcttgtcctctgcattgtttaaaggacaactacaaatcatgctggataagagtactcattcaatcttttaggattcaatgaagtagcattttaaatatgtaagttattttatatattgtctgtcttttaaaattggactttgcttcttgaaaaaagtttgtcaaatcaccaaaccatatgactgtccattcattgtagcctatgttttctattattaagaaataattcatactgagagtaaaagaaaaagaatgtattttgtgtgcaaaggatgaatgtattaaaaactttttatttgtaacaattttttaaaaaaactaaatggaaattgctttcccatgtacttgtatataaataaacatttcctgttgcccaaaaaaaaaaagaaaagaagatgaaaaagcatcacatgaagtagtgacagagagcatgcaggcaagacaacaaaaaagagagtgggggcgcaaaaaaacccaggagaggggaccgaaaagagaggcgcgaagtttagagaaagaggcccacagagagcgaataacagaagagggggcagagataacgatgagagaaaacgagagaggatatgaggaggacttac

SEQ ID NO: 47532 - DNA, 1197 bp, Homo sapiens
aagggaagtggggagggaatacaaacttgaacaaaatattcttaaatgaagttgcatctctttttaaaattaagatatcattcatgcaccatacggtttatcctattaaggtgtaaacttcaatgtttttaatcatattcactaagttgtgcaacatcaccactccctaacttcagaacactttcatcacctccaaaagaaaccccataccatttgcaatcactcctcctcctccttcccccagcatccggcaaccactaatctactttctgtccctatgaatttgcctatcctggacatttcatatagtcaaacaacatgtggccttttgtgtctggcttctctaagtaagcataatgtttttaaagctcatccatgttgtagcataaatcagtacattgttttcatgtttaaataatattccattgcatgtatatgccacattttatttgtccatttatcatttgatggacatttgggttttttccaccttttgattataataatgctgctgtgaacatttatgtaaaagttttttgtatgggtgtatgttttcacatctctcttaaaaacaattagtctgacaaatcaaatcaaatcatttatgtttatttacgtagaacctcttgcaatcctgtttggagagtgcaacttacgatcttagtttaattgatcaattaggagacctctgaataaagactaactccccaatacatccataagaatttttctatgagcctgtcatttagatgtgataagcaatcaatttcatgaagactgtttcagtcttgtagaaattgagttgccatcacatagaggatttcttgtcctctgcattgtttaaaggacaactacaaatcatgctggataagagtactcattcaatcttttaggattcaatgaagtagcattttaaatatgtaagttattttatatattgtctgtcttttaaaattggactttgcttcttgaaaaaagtttgtcaaatcaccaaaccatatgactgtccattcattgtagcctatgttttctattattaagaaataattcatactgagagtaaaagaaaaagaatgtattttgtgtgcaaaggatgaatgtattaaaaactttttatttgtaacaattttttaaaaaaactaaatggaaattgctttcccatgtacttgtatataaataaacatttcctgttgccca

SEQ ID NO: 47533 - DNA, 1141 bp, Homo sapiens
aagggaagtggggagggaatacaaacttgaacaaaatattcttaaatgaagttgcatctctttttaaaattaagatatcattcatgcaccatacggtttatcctattaaggtgtaaacttcaatgtttttaatcatattcactaagttgtgcaacatcaccactccctaacttcagaacactttcatcacctccaaaagaaaccccataccatttgcaatcactcctcctcctccttcccccagcatccggcaaccactaatctactttctgtccctatgaatttgcctatcctggacatttcatatagtcaaacaacatgtggccttttgtgtctggcttctctaagtaagcataatgtttttaaagctcatccatgttgtagcataaatcagtacattgttttcatgtttaaataatattccattgcatgtatatgccacattttatttgtccatttatcatttgatggacatttgggttttttccaccttttgattataataatgctgctgtgaacatttatgtaaaagttttttgtatgggtgtatgttttcacatctctaacctcttgcaatcctgtttggagagtgcaacttacgatcttagtttaattgatcaattaggagacctctgaataaagactaactccccaatacatccataagaatttttctatgagcctgtcatttagatgtgataagcaatcaatttcatgaagactgtttcagtcttgtagaaattgagttgccatcacatagaggatttcttgtcctctgcattgtttaaaggacaactacaaatcatgctggataagagtactcattcaatcttttaggattcaatgaagtagcattttaaatatgtaagttattttatatattgtctgtcttttaaaattggactttgcttcttgaaaaaagtttgtcaaatcaccaaaccatatgactgtccattcattgtagcctatgttttctattattaagaaataattcatactgagagtaaaagaaaaagaatgtattttgtgtgcaaaggatgaatgtattaaaaactttttatttgtaacaattttttaaaaaaactaaatggaaattgctttcccatgtacttgtatataaataaacatttcctgttgccca

SEQ ID NO: 47534 - DNA, 540 bp, Homo sapiens
tgtaatgagagtcactatatttcttagctccattccaaaatattaactggggagctgctcatttataatagtgccaaacttctgacagacagaaattataaaagaggccccagaaaagcatcagaaaaaaagggaaacttttaaacagaaatggtaatttgaaatactgaccctaggtttaaaatttagaaaaggcctgttttctggagcagtcatctggatggtccaacagctccctctactcctccaagagggaaacatgaaacacagcagggctgtgtggaagtgtgagcagcccaggcttggggaaagccacatgtttccttgttccagccaggagctccaaaatggcctccagccatcggtcctattaaataacataactcacctaaagcagagaatccatggacccagtagaagtaaattgctgacccagttaaaatctatggagaatgtgtcctacggcatatccacgaatataccttcaaaaggaaagaggttatgtccaagcgaagatgaggaatatctgaggtgaaactt

SEQ ID NO: 47535 - DNA, 3033 bp, Homo sapiens
ggcccgcagagaccgggccgcgcgcttttccgttcctgagcgcccttgttcatttctgggtgaaagggacccgaattgtgcaacaggtttgggcgttagtccttattttccagcgggtctcttttgccagcgtgcaggaaccagatgtggctccctgctctcgggcgagtcccgcgtccagcgcccgcgactggctcctttgtgtgaccggtgaccggccctgtcggaattaaggaagttcactggagtaaaatggaggcctcagtaatattacccattctgaagaaaaaactagccttcctttcaggaggaaaagacagacggagtggcctcattttgacaattccattatgcctcgaacagacaaatatggatgagctgagtgtcaccttagactacctactcagcattccaagtgagaagtgtaaggctagaggatttaccgtgattgtggatggcagaaaatcacagtggaatgtggtgaaaacagtagtcgtaatgctacagaatgttgttccagctgaggtgtcccttgtttgtgtggtaaagccagatgaattctgggataagaaagtaacgcatttttgtttttggaaggagaaggatagacttggctttgaggttattttagtgtccgccaacaaattgactcgttatatagaaccatgccaattaacagaagattttggtgggagtctcacctatgatcacatggactggttaaataagaggctggtttttgagaagtttacaaaggaatctacatcattattagatgaacttgctttgattaacaatggaagtgataaaggaaatcagcaagagaaagaaaggtctgtggatttaaactttcttccatcggttgatcctgaaacagttcttcagacagggcatgaattgttgtccgaattacagcagcgtcgatttaatggctcagacggaggggtttcatggtctcctatggatgatgaacttcttgcacagccacaggttatgaaattattagattcactccgagagcaatatacccgctaccaggaagtttgtaggcaacgtagcaagcgcacacagttagaagagattcaacagaaggtaatgcaggtggtgaactggctagaagggcctggatcagaacaactaagagcccagtggggcattggagactccattagggcctcccaggccctacagcagaaacacgaagagattgagagccagcacagtgaatggtttgcagtgtatgtggaacttaatcagcaaattgcagcactcttgaatgctggcgatgaggaagatcttgtggaactaaagtcactgcagcaacaacttagtgatgtttgttatcgacaggccagtcagctggaatttaggcaaaatctcttacaagcagctcttgaatttcatggtgttgcccaagatttgtctcagcagttggatggcttattagggatgttgtgcgtagatgtagcaccagctgatggagcatcgattcagcaaactttaaaactgcttgaagagaagctgaaaagtgttgatgtgggattgcaaggtttgcgtgaaaaaggtcaaggtctcctggatcagatctccaatcaggcatcctgggcctatggaaaggatgtaaccattgaaaataaagaaaatgtggaccacatacaaggagtgatggaagatatgcagcttagaaaacaaagatgtgaagacatggtagatgtgcgaaggttaaagatgcttcagatggtgcagttgtttaaatgtgaagaagatgctgcccaggcagtagaatggctaagtgaacttctggatgctctgcttaagactcacatcagattgggcgatgatgctcaagaaacgaaagttttgctggaaaagcatagaaaatttgttgatgttgcacaggtgcaaaactggttatcttccttttccacaagctcagtgtttgaatagctttctgcatgattataatgtaactttaccttccaagtacaagaagagcacttatgactatggcaggcagttgctacaggccacagttgtgttatgccaatctttgcgctgcacttctcggtcatctggggatacacttcctcgactgaacagagtatggaaacaatttacaatagcatctgaagagagagtacatagattggaaatggctattgcatttcactcaaatgctgaaaagattttgcaggactgtccagaagagcctgaagctattaatgatgaggagcaatttgatgaaattgaagcagttgggaaatcacttttggatagattaactgttccagtagtttatcctgatggaaccgaacaatattttgggagtccaagtgacatggcttctactgcagaaaacatcagagacaggatgaaactagttaatctcaaaaggcagcagctgagacatcctgaaatggtgaccacagagagctaatagctaccagctacctacagatttgcagttcataatcccgcatgttgtcaacatactacagcattagccaccacaccttaagatgcatttcacagccaaaataagtctcatttcttttcatgacacatttctctttacatgttaacaccttgctactaccaaggcataattacttaacatgcttcgaggctgtagattccaagtatcttaaaagaaggaactataaacattgcactgaaaacttgctttaaagctttacctgacctgtcagtttgtagacaaacaactgataataagctttgaatggtgctaataagagtaggaattctctctattaaaaagaaaaaaaaaagttgcccttcctccacaggtgatttagtaaatttagacagtagttaaactcttgttagtagacagtggtgtcctcaaaattttactttgtaattcttcagaattgattatttttattgtgtcaatacagagaaagcctttcagatctttgatatatcatagtcattaaaagaccttttcctatttgtattgataatgtattaaaagttgtttgtgcttaataaaagacttctttaaacatctta

SEQ ID NO: 47536 - DNA, 701 bp, Homo sapiens
ggcccgcagagaccgggccgcgcgcttttccgttcctgagcgcccttgttcatttctgggtgaaagggacccgaattgtgcaacaggtttgggcgttagtccttattttccagcgggtctcttttgccagcgtgcaggaaccagatgtggctccctgctctcgggcgagtcccgcgtccagcgcccgcgactggctcctttgtgtgaccggtgaccggccctgtcggaattaaggaagttcactggagtaaaatggaggcctcagtaatattacccattctgaagaaaaaactagccttcctttcaggaggaaaagacagacggagtggcctcattttgacaattccattatgcctcgaacagacaaatatggatgagctgagtgtcaccttagactacctactcagcattccaagtgagaagtgtaaggctagaggatttaccgtgattgtggatggcagaaaatcacagtggaatgtggtgaaaacagtagtcgtaatgctacagaatgttgttccagctgaggtgtcccttgtttgtgtggtaaagccagatgaattctgggataagaaagtaacgcatttttgtttttggaaggagaaggatagacttggctttgaggaggatattttgtaaaacttgattttggatatcagtgacatactgcattgatcactgcaagataatataagctgtttctt

SEQ ID NO: 47537 - DNA, 340 bp, Homo sapiens
aaaaaacagaaaattgttttctattagaaataggaattttcatatttttcttctgctttcattttttaaaagtaattattgtctatggaaacccatgttttcaaaattccctttagggagaatttggcatgagagagagctccaattcgagttacatttaaagggttttattgcttgaaatgttcataggatggagtcttgggattccatcccaaggtggtttactgtacaaagctcctatacttgggatccaggtacaatatctgatgagacgatttgtttgagggagggaaagcgccttagttgtgtaagagattaaatctagtaacttttgttttag

SEQ ID NO: 47538 - DNA, 709 bp, Homo sapiens
gtggggtggggtgatcctctgaaactgcagacctgtctgtgtctcttgattgatgttgctcttttatttgttgcagattttgcaggactgtccagaagagcctgaagctattaatgatgaggagcaatttgatgaaattgaagcagttgggaaatcacttttggatagattaactgttccagtagtttatcctgatgggtatggggcatgttcttataattttattttttattggtgtggtcttaaagtgaaatcattaaaagaggaaatctattctttaaaaagccaagtaaattaggtttggtccacatctttaactcctacgatgaattagtttaaaatgaaaagaaatccacacctcttagccacagtaatggtacttgccaacaacagatgcgttacttcttgacagcttgttgtagaatgatcattgactagattaagacactgggttctagccttggctatgatggtggggaatagtgtgacttggggcttcattcaggaaaaggaagaggggacaagggattgatgtttagtgagttcacaatatatgccaagtaccaagtgaaacatttcaccttcattacttttgaccaaagaggaccaaaccagtatgattattcctgatttacaaatgaagaaactgaggcccacagagattaagtaaggctctcaggatttcacagcttctaagagttagcataaa

SEQ ID NO: 47539 - DNA, 187 bp, Homo sapiens
tctagagtatccccgtacccaggctgcacttctcggtcatctggggatacacttcctcgactgaacagagtatggaaacaatttacaatagcatctgaagagagagtacatagattggaaatggctattgcatttcactcaaatgctgaaaagattttgcaggactgtccagaagtgcgcctgggtg

SEQ ID NO: 47540 - DNA, 2939 bp, Homo sapiens
ggcccgcagagaccgggccgcgcgcttttccgttcctgagcgcccttgttcatttctgggtgaaagggacccgaattgtgcaacaggtttgggcgttagtccttattttccagcgggtctcttttgccagcgtgcaggaaccagatgtggctccctgctctcgggcgagtcccgcgtccagcgcccgcgactggctcctttgtgtgaccggtgaccggccctgtcggaattaaggaagttcactggagtaaaatggaggcctcagtaatattacccattctgaagaaaaaactagccttcctttcaggaggaaaagacagacggagtggcctcattttgacaattccattatgcctcgaacagacaaatatggatgagctgagtgtcaccttagactacctactcagcattccaagtgagaagtgtaaggctagaggatttaccgtgattgtggatggcagaaaatcacagtggaatgtggtgaaaacagtagtcgtaatgctacagaatgttgttccagctgaggtgtcccttgtttgtgtggtaaagccagatgaattctgggataagaaagtaacgcatttttgtttttggaaggagaaggatagacttggctttgaggttattttagtgtccgccaacaaattgactcgttatatagaaccatgccaattaacagaagattttggtgggagtctcacctatgatcacatggactggttaaataagaggctggtttttgagaagtttacaaaggaatctacatcattattagatgaacttgctttgattaacaatggaagtgataaaggaaatcagcaagagaaagaaaggtctgtggatttaaactttcttccatcggttgatcctgaaacagttcttcagacagggcatgaattgttgtccgaattacagcagcgtcgatttaatggctcagacggaggggtttcatggtctcctatggatgatgaacttcttgcacagccacaggttatgaaattattagattcactccgagagcaatatacccgctaccaggaagtttgtaggcaacgtagcaagcgcacacagttagaagagattcaacagaaggtaatgcaggtggtgaactggctagaagggcctggatcagaacaactaagagcccagtggggcattggagactccattagggcctcccaggccctacagcagaaacacgaagagattgagagccagcacagtgaatggtttgcagtgtatgtggaacttaatcagcaaattgcagcactcttgaatgctggcgatgaggaagatcttgtggaactaaagtcactgcagcaacaacttagtgatgtttgttatcgacaggccagtcagctggaatttaggcaaaatctcttacaagcagctcttgaatttcatggtgttgcccaagatttgtctcagcagttggatggcttattagggatgttgtgcgtagatgtagcaccagctgatggagcatcgattcagcaaactttaaaactgcttgaagagaagctgaaaagtgttgatgtgggattgcaaggtttgcgtgaaaaaggtcaaggtctcctggatcagatctccaatcaggcatcctgggcctatggaaaggatgtaaccattgaaaataaagaaaatgtggaccacatacaaggagtgatggaagatatgcagcttagaaaacaaagatgtgaagacatggtagatgtgcgaaggttaaagatgcttcagatggtgcagttgtttaaatgtgaagaagatgctgcccaggcagtagaatggctaagtgaacttctggatgctctgcttaagactcacatcagattgggcgatgatgctcaagaaacgaaagttttgctggaaaagcatagaaaatttgttgatgttgcacagagcacttatgactatggcaggcagttgctacaggccacagttgtgttatgccaatctttgcgctgcacttctcggtcatctggggatacacttcctcgactgaacagagtatggaaacaatttacaatagcatctgaagagagagtacatagattggaaatggctattgcatttcactcaaatgctgaaaagattttgcaggactgtccagaagagcctgaagctattaatgatgaggagcaatttgatgaaattgaagcagttgggaaatcacttttggatagattaactgttccagtagtttatcctgatggaaccgaacaatattttgggagtccaagtgacatggcttctactgcagaaaacatcagagacaggatgaaactagttaatctcaaaaggcagcagctgagacatcctgaaatggtgaccacagagagctaatagctaccagctacctacagatttgcagttcataatcccgcatgttgtcaacatactacagcattagccaccacaccttaagatgcatttcacagccaaaataagtctcatttcttttcatgacacatttctctttacatgttaacaccttgctactaccaaggcataattacttaacatgcttcgaggctgtagattccaagtatcttaaaagaaggaactataaacattgcactgaaaacttgctttaaagctttacctgacctgtcagtttgtagacaaacaactgataataagctttgaatggtgctaataagagtaggaattctctctattaaaaagaaaaaaaaaagttgcccttcctccacaggtgatttagtaaatttagacagtagttaaactcttgttagtagacagtggtgtcctcaaaattttactttgtaattcttcagaattgattatttttattgtgtcaatacagagaaagcctttcagatctttgatatatcatagtcattaaaagaccttttcctatttgtattgataatgtattaaaagttgtttgtgcttaataaaagacttctttaaacatctta

SEQ ID NO: 47541 - DNA, 3000 bp, Homo sapiens
ggcccgcagagaccgggccgcgcgcttttccgttcctgagcgcccttgttcatttctgggtgaaagggacccgaattgtgcaacaggtttgggcgttagtccttattttccagcgggtctcttttgccagcgtgcaggaaccagatgtggctccctgctctcgggcgagtcccgcgtccagcgcccgcgactggctcctttgtgtgaccggtgaccggccctgtcggaattaaggaagttcactggagtaaaatggaggcctcagtaatattacccattctgaagaaaaaactagccttcctttcaggaggaaaagacagacggagtggcctcattttgacaattccattatgcctcgaacagacaaatatggatgagctgagtgtcaccttagactacctactcagcattccaagtgagaagtgtaaggctagaggatttaccgtgattgtggatggcagaaaatcacagtggaatgtggtgaaaacagtagtcgtaatgctacagaatgttgttccagctgaggtgtcccttgtttgtgtggtaaagccagatgaattctgggataagaaagtaacgcatttttgtttttggaaggagaaggatagacttggctttgaggttattttagtgtccgccaacaaattgactcgttatatagaaccatgccaattaacagaagattttggtgggagtctcacctatgatcacatggactggttaaataagaggctggtttttgagaagtttacaaaggaatctacatcattattagatgaacttgctttgattaacaatggaagtgataaaggaaatcagcaagagaaagaaaggtctgtggatttaaactttcttccatcggttgatcctgaaacagttcttcagacagggcatgaattgttgtccgaattacagcagcgtcgatttaatggctcagacggaggggtttcatggtctcctatggatgatgaacttcttgcacagccacaggttatgaaattattagattcactccgagagcaatatacccgctaccaggaagtttgtaggcaacgtagcaagcgcacacagttagaagagattcaacagaaggtaatgcaggtggtgaactggctagaagggcctggatcagaacaactaagagcccagtggggcattggagactccattagggcctcccaggccctacagcagaaacacgaagagattgagagccagcacagtgaatggtttgcagtgtatgtggaacttaatcagcaaattgcagcactcttgaatgctggcgatgaggaagatcttgtggaactaaagtcactgcagcaacaacttagtgatgtttgttatcgacaggccagtcagctggaatttaggcaaaatctcttacaagcagctcttgaatttcatggtgttgcccaagatttgtctcagcagttggatggcttattagggatgttgtgcgtagatgtagcaccagctgatggagcatcgattcagcaaactttaaaactgcttgaagagaagctgaaaagtgttgatgtgggattgcaaggtttgcgtgaaaaaggtcaaggtctcctggatcagatctccaatcaggcatcctgggcctatggaaaggatgtaaccattgaaaataaagaaaatgtggaccacatacaaggagtgatggaagatatgcagcttagaaaacaaagatgtgaagacatggtagatgtgcgaaggttaaagatgcttcagatggtgcagttgtttaaatgtgaagaagatgctgcccaggcagtagaatggctaagtgaacttctggatgctctgcttaagactcacatcagattgggcgatgatgctcaagaaacgaaagttttgctggaaaagcatagaaaatttgttgatgttgcacagagcacttatgactatggcaggcagttgctacaggccacagttgtgttatgccaatctttgcgctgcacttctcggtcatctggggatacacttcctcgactgaacagagtatggaaacaatttacaatagcatctgaagagagagtacatagattggaaatggctattgcatttcactcaaatgctgaaaagattttgcaggactgtccagaagagcctgaagctattaatgatgaggagcaatttgatgaaattgaagcagttgggaaatcacttttggatagattaactgttccagtagtttatcctgatggaaccgaacaatattttgggagtccaagtgacatggcttctactgcagaaaacatcagagacaggatgaaactagttaatctcaaaaggcagcagctgagacatcctgaaatggtgaccacagagagctaatagctaccagctacctacagatttgcagttcataatcccgcatgttgtcaacatactacagcattagccaccacaccttaagatgcatttcacagccaaaataagtctcatttcttttcatgacacatttctctttacatgttaacaccttgctactaccaaggcataattacttaacatgcttcgaggctgtagattccaagtatcttaaaagaaggaactataaacattgcactgaaaacttgctttaaagctttacctgacctgtcagtttgtagacaaacaactgataataagctttgaatggtgctaataagagtaggaattctctctattaaaaagaaaaaaaaaagttgcccttcctccacaggtgatttagtaaatttagacagtagttaaactcttgttagtagacagtggtgtcctcaaaattttactttgtaattcttcagaattgattatttttattgtgtcaatacagagaaagcctttcagatctttgatatatcatagtcattaaaagaccttttcctatttgtattgataatgtattaaaagttgtttgtgcttaataaaagacttctttaaacatcttatttaatttagtagttacatcctatttccaaacatgagtgccttatttaaaagggcattctt

SEQ ID NO: 47542 - DNA, 1494 bp, Homo sapiens
ggcccgcagagaccgggccgcgcgcttttccgttcctgagcgcccttgttcatttctgggtgaaagggacccgaattgtgcaacaggtttgggcgttagtccttattttccagcgggtctcttttgccagcgtgcaggaaccagatgtggctccctgctctcgggcgagtcccgcgtccagcgcccgcgactggctcctttgtgtgaccggtgaccggccctgtcggaattaaggaagttcactggagtaaaatggaggcctcagtaatattacccattctgaagaaaaaactagccttcctttcaggaggaaaagacagacggagtggcctcattttgacaattccattatgcctcgaacagacaaatatggatgagctgagtgtcaccttagactacctactcagcattccaagtgagaagtgtaaggctagaggatttaccgtgattgtggatggcagaaaatcacagtggaatgtggtgaaaacagtagtcgtaatgctacagaatgttgttccagctgaggtgtcccttgtttgtgtggtaaagccagatgaattctgggataagaaagtaacgcatttttgtttttggaaggagaaggatagacttggctttgaggttattttagtgtccgccaacaaattgactcgttatatagaaccatgccaattaacagaagattttggtgggagtctcacctatgatcacatggactggttaaataagaggctggtttttgagaagtttacaaaggaatctacatcattattagatgaacttgctttgattaacaatggaagtgataaaggaaatcagcaagagaaagaaaggtctgtggatttaaactttcttccatcggttgatcctgaaacagttcttcagacagggcatgaattgttgtccgaattacagcagcgtcgatttaatggctcagacggaggggtttcatggtctcctatggatgatgaacttcttgcacagccacaggttatgaaattattagattcactccgagagcaatatacccgctaccaggaagtttgtaggcaacgtagcaagcgcacacagttagaagagattcaacagaaggtaatgcaggtggtgaactggctagaagggcctggatcagaacaactaagagcccagtggggcattggagactccattagggcctcccaggccctacagcagaaacacgaagagattgagagccagcacagtgtgagaggctttttcctctgcaagttacaatgatattatgaacgtgggtaattagtagcatatgtggtactgagtgataagttgctgcaaactttggtatggggcatgaagtacagtttgttaagtgcctagaggtcataaagtacattttgattacttagtacatgttaattagaaggttgtttttggttttgtctctaatgcagtttaattatatttttatagaagcacaatttgcatgaaattttaaaagctacagtgacagaaaaa

SEQ ID NO: 47543 - DNA, 892 bp, Homo sapiens
gaaccattagagcccagtagaatacttcagtagaataatgctttaaaaatgtttctctagtcatgccattccctgtttcaaatactttagcacattcctattctacttaggataaatcctccacaggacctgtagacttctgagtcacatggcccaggcctcccttccaaacaccatttgatgaccctctaccttgctcaagaaaacactgggcctactgaccttctcttaatactggtaactccttatcactgagtcaggaccttcttttcttaagcccaggagactttttcttccactcattctcctgtgtaaatgtcctctccttagagacatcatcctatgttgattcagattccaagttctctccagtctaattctccttcagccgaattctttcttacagtgtcctattcttggctttcatttgatttctcacaattaataattttgcatatatttgcatgtttgtctgtctctgctactgggctgtaagagacatgtcagttttgctcactggtctatacctagtctcaacatagtacttggcatatagtaagcactcattaaactgtgaagtgtgtgtgtgtgtgtgtgtgtgtgtgtgtgtgtgtgtgtgtgtatgtatacatatatatgtgtacatacacattttagtgtatgtatattctcatgtattctacaagattttgggcaagtgtatcctatattacatataaagacagtaagagaataacttacagagttaaaagtaagtgtaaaaggagcagttatattaaattttgaaaagaataaactattaattatgtaattctccattgttccatgaaaacagatgtgactattcattagcactgactaatgaaggatatgttatttcagataatctatc

SEQ ID NO: 47544 - DNA, 367 bp, Homo sapiens
gttctgcaacattgttcatgttcaatgggagaacacaggcctaactagtagacacaggccagctcccagatgccaggggctgcttttctttttctcacttgtcagctgcgaagcgggaatggtctgcatccgcacgttgtcaagcaggaaatggcacatcagttatgaacttgacgggatctgccaccataggcctaacgctggtgctgcaggttgtccctgatttggcctcttttgtctgatctcaattggtcaaaactcaaaggggagaaagcctgcaatgggcagctccagcaccccatgtataaaggaaaccttgtaagtaaacacaaggaccagcattagaggtaccaaacaccatgctagg

SEQ ID NO: 47545 - DNA, 415 bp, Homo sapiens
gttggaccaagcaactgggcaccacagcacagccaagttaacacataaaattaaccgtcacattcccttagctgctcaatgtttatgtctcatggggtagttgaaaaacatatggatacagctttgacacttggttcatatactcacttgctgggttgccttgggcaagtttcttaatctccccaaatagcaattcccttgtttacaaaataaggactataattattagtctatgtgtttgtctttatgattttctttttatgtcagcgccatgcctatcatagtgccagttacacaaatacttgatgaacaaatgaagtacttaatgatgaaagcaggaaagagacttgagtttttatgtcaccccaaggaagagctagatttggacttcagaatcaggataaaagttttctag

SEQ ID NO: 47546 - DNA, 214 bp, Homo sapiens
tgtaaacaggatgaggggtaaagaagtaaaaactctcttcaaagatttgactagaaataatagagaagaaagtggtaacagagcaaatcttcaaaaaaggattttctttcttttctattgtatgcttatttttatgtatatttgatgggagataatcatgcatgtttatatgctaagaagaaagaacttataaagaataaaaagttgagcatat

SEQ ID NO: 47547 - DNA, 286 bp, Homo sapiens
atgtaccaccacacctggctaatttttttaattttttatattgtaggcataggatactgtgttacccgggatggtctggcctcaggcaatcttcccaccttggcctcccaggtgacgttgccttatacacagaaaatcttaaagaccccataaaaaacttttgaactaacaaaagaattcagtaacgatacagaatacaaaatcaacatttaaaaactagcatttctacacacagtgaactatctgaaaaaccagtaaaaacagccccatttacacttgctacaga

SEQ ID NO: 47548 - DNA, 285 bp, Homo sapiens
actggttcctatttctgctggttcgaagaggtccaggacatttaaatagctcttctagaaacaaattcttttccttacaagccctgccaggtcagtgggttcagtaaggaagaaggttttgtattttgacaattccttcatctgttaatttagtcagacgaggaaggaaacgagaaaagttattcctatttcatccatctaagactttatatcccatttcaggctgattaaaaggcaaaatcgtcacagtaggacaccaaaccctctgtatgccctgcctgcctc

SEQ ID NO: 47549 - DNA, 1282 bp, Homo sapiens
gcacgagctaaatttgaaaaggagaaaatgaatgccaaatgggacacgggtgaaaatcctatttataagagtgccgtaacaactgtggtcaatccgaagtatgagggaaaatgagtactgcccgtgcaaatcccacaacactgaatgcaaagtagcaatttccatagtcacagttaggtagctttagggcaatattgccatggttttactcatgtgcaggttttgaaaatgtacaatatgtataatttttaaaatgttttattattttgaaaataatgttgtaattcatgccagggactgacaaaagacttgagacaggatggttattcttgtcagctaaggtcacattgtgcctttttgaccttttcttcctggactattgaaatcaagcttattggattaagtgatatttctatagcgattgaaagggcaatagttaaagtaatgagcatgatgagagtttctgttaatcatgtattaaaactgatttttagctttacaaatatgtcagtttgcagttatgcagaatccaaagtaaatgtcctgctagctagttaaggattgttttaaatctgttattttgctatttgcctgttagacatgactgatgacatatctgaaagacaagtatgttgagagttgctggtgtaaaatacgtttgaaatagttgatctacaaaggccatgggaaaaattcagagagttaggaaggaaaaaccaatagctttaaaacctgtgtgccattttaagagttacttaatgtttggtaacttttatgccttcactttacaaattcaagccttagataaaagaaccgagcaattttctgctaaaaagtcctgatttagcactatttacatacagggcatactttacaagtatttgctgaatggggaccttttgagttgaatttattttattatttttattttgtttaatgtctggtgctttctatcacctcttctaatcttttaatgtatttgtttgcaattttggggtaagactttttttatgagtactttttctttgaagttttagcggtcaatttgcctttttaatgaacatgtgaagttatactgtggctatgcaacagctctcacctacgcgagtcttactttgagttagtgccataacagaccactgtatgtttacttctcaccatttgagttgcccatcttgtttcacactagtcacattcttgttttaagtgcctttagttttaacagttcactttttacagtgctatttactgaagttatttattaaatatgcctaaaatactt

SEQ ID NO: 47550 - DNA, 535 bp, Homo sapiens
  misc_feature (382)..(383): n is a, c, g, or t
gaaccaacagtcgtcaacatccttctccttacaatgggacacaggatcaggttggaccggctggggtaatttgtcccgactttctaccttggtaatgttaaaataggaacattcctgtgtgcatgtgtctttcttttctcctttattgaaggctctgcactgaacacattctttatgctcagcacagacaccaaggcaggtctgacacatctcacacgtttgcccttgaaacttcggatctgtacacttacagacaccacactcgcagatgccccggccattgcagatctgtccgttgctggcttcacaagtactagtatccaaagaacagtcacatgcactgccagtgtagttggggttgcactcacacacacgacacttnnaaacaccatttcctccacaaattaagccattggatctaagctgttgtaactggagctgttgtaactggggctgttgccaagtcagacggtggtaaacctaatgagtaaaaagatcgcgcgcgttgcttgaataatatccactctgatatacg

SEQ ID NO: 47551 - DNA, 1362 bp, Homo sapiens
gaaccaacagtcgtcaacatccttctccttacaatgggacacaggatcaggttggaccggctggggtaatttgtcccgactttctaccttggtaatgttaaaataggaacattcctgtgtgcatgtgtctttcttttctcctttattgaaggctctgcactgaacacattctttatgctcagcacagacaccaaggcaggtctgacacatctcacacgtttgcccttgaaacttcggatctgtacacttacagacaccacactcgcagatgccccggccattgcagatctgtccgttgctggcttcacaagtactagtattataatttttaaaatgttttattattttgaaaataatgttgtaattcatgccagggactgacaaaagacttgagacaggatggttattcttgtcagctaaggtcacattgtgcctttttgaccttttcttcctggactattgaaatcaagcttattggattaagtgatatttctatagcgattgaaagggcaatagttaaagtaatgagcatgatgagagtttctgttaatcatgtattaaaactgatttttagctttacaaatatgtcagtttgcagttatgcagaatccaaagtaaatgtcctgctagctagttaaggattgttttaaatctgttattttgctatttgcctgttagacatgactgatgacatatctgaaagacaagtatgttgagagttgctggtgtaaaatacgtttgaaatagttgatctacaaaggccatgggaaaaattcagagagttaggaaggaaaaaccaatagctttaaaacctgtgtgccattttaagagttacttaatgtttggtaacttttatgccttcactttacaaattcaagccttagataaaagaaccgagcaattttctgctaaaaagtcctgatttagcactatttacatacagggcatactttacaagtatttgctgaatggggaccttttgagttgaatttattttattatttttattttgtttaatgtctggtgctttctatcacctcttctaatcttttaatgtatttgtttgcaattttggggtaagactttttttatgagtactttttctttgaagttttagcggtcaatttgcctttttaatgaacatgtgaagttatactgtggctatgcaacagctctcacctacgcgagtcttactttgagttagtgccataacagaccactgtatgtttacttctcaccatttgagttgcccatcttgtttcacactagtcacattcttgttttaagtgcctttagttttaacagttcactttttacagtgctatttactgaagttatttattaaatatgcctaaaatactt

SEQ ID NO: 47552 - DNA, 909 bp, Homo sapiens
aaaggaagcaggaaaaaaggaaatctttatgggaaatcaattacccaaagcaaggtgagtcacctagaggtgaatatgatgttgttattgtcctcccttagtgtacagcacagtttttgctctcacagggtttttctctttaggatgcgtagcaccctatgcattaaatacatagcatcctaaagacaccctactcaccatgagtctgtaggctctttcctgatgagggcactggccatatatgaatggaaaactcaactcatctcctcagctttagatgttgctgctgttcagctggatttgtgagaaatatctggattactatcaagaacatttagcaagactcaaaagagagaggcaagcagaaccaaaacccaaacctcaaccaatgactagctgaataaacaattctttggaggaataaggaaggtatttctggatgtattctgagaatgctcttccaaaagggaagatggtaataatggacttgttttgaatttccatggttgtgaatagaatgtacttcccatgatgtgaaatacacttctggcagataaaatgcaggttgtaatttgcatttgtacatcacagggtaaaagaatggccatccattctgaggaagagtgttctgttctctaagatgctgcttaaccaatgttatccaaatgccatagcatcatatctccaaatacaagattaaatcataaggattcatgtaaaacagagtatactgagctgttctcagaaaaattaatgatgtgtttattgtaaatctttattgcacagatgagcctgacagtccttcaatgtataattttcccccagcatctagtaatgcataagtacttgtatgttcttctgattaccaaataaaaacaatgagttaacctcttaattggaattggaaaa

SEQ ID NO: 47553 - DNA, 911 bp, Homo sapiens
cgctctctctctctctccggctcgccagcgacacttgttcgttcaacttgaccaatgagacttgaggaagggctctgagtcccgcctctgcatgagtgaccgtctcttttccaatccaggtcccgccccgactccccagggctgcttttctcgcggctgcgggtggtcgggctgcatcctgccttcagagtcttactgcgcggggccccagtctccagtcccgcccaggcgcctttgcaggctgcggtgggatttcgttttgcctccggttggggctgctgtttctcttcgccgacgtggatcctctatccttcagagactctggaacccctgtggtcttctcttcatctaatgaccctgaggggatggagttttcaagtccttccagagaggaatgtcccaagcctttgagtagggtaagcatcatggctggcagcctcacaggattgcttctacttcaggcagtgtcgtgggcatcaggtgcccgcccctgcatccctaaaagcttcggctacagctcggtggtgtgtgtctgcaatgccacatactgtgactcctttgaccccccgacctttcctgcccttggtaccttcagccgctatgagagtacacgcagtgggcgacggatggagctgagtatggggcccatccaggctaatcacacgggcacaggcctgctactgaccctgcagccagaacagaagttccagaaagtgaagggatttggaggggccatgacagatgctgctgctctcaacatccttgccctgtcaccccctgcccaaaatttgctacttaaatcgtacttctctgaagaaggaatcggatataacatcatccgggtacccatgggcagctgtgacttctccatccgcacctacacctatgcagacacccctgatgatttccag

SEQ ID NO: 47554 - DNA, 892 bp, Homo sapiens
cgctctctctctctctccggctcgccagcgacacttgttcgttcaacttgaccaatgagacttgaggaagggctctgagtcccgcctctgcatgagtgaccgtctcttttccaatccaggtcccgccccgactccccagggctgcttttctcgcggctgcgggtggtcgggctgcatcctgccttcagagtcttactgcgcggggccccagtctccagtcccgcccaggcgcctttgcaggctgcggtgggatttcgttttgcctccggttggggctgctgtttctcttcgccgacgagactctggaacccctgtggtcttctcttcatctaatgaccctgaggggatggagttttcaagtccttccagagaggaatgtcccaagcctttgagtagggtaagcatcatggctggcagcctcacaggattgcttctacttcaggcagtgtcgtgggcatcaggtgcccgcccctgcatccctaaaagcttcggctacagctcggtggtgtgtgtctgcaatgccacatactgtgactcctttgaccccccgacctttcctgcccttggtaccttcagccgctatgagagtacacgcagtgggcgacggatggagctgagtatggggcccatccaggctaatcacacgggcacaggcctgctactgaccctgcagccagaacagaagttccagaaagtgaagggatttggaggggccatgacagatgctgctgctctcaacatccttgccctgtcaccccctgcccaaaatttgctacttaaatcgtacttctctgaagaaggaatcggatataacatcatccgggtacccatgggcagctgtgacttctccatccgcacctacacctatgcagacacccctgatgatttccag

SEQ ID NO: 47555 - DNA, 1028 bp, Homo sapiens
cgctctctctctctctccggctcgccagcgacacttgttcgttcaacttgaccaatgagacttgaggaagggctctgagtcccgcctctgcatgagtgaccgtctcttttccaatccaggtcccgccccgactccccagggctgcttttctcgcggctgcgggtggtcgggctgcatcctgccttcagagtcttactgcgcggggccccagtctccagtcccgcccaggcgcctttgcaggctgcggtgggatttcgttttgcctccggttggggctgctgtttctcttcgccgacgagacggggtttcaccatgttggtcaggctggtctccaattcctgacctcgtgatccgcccgcctcggcctgccaaacagctgtgattataggcgtgagccaccgcgcccggccaaccatcattattatttttaacgagactctggaacccctgtggtcttctcttcatctaatgaccctgaggggatggagttttcaagtccttccagagaggaatgtcccaagcctttgagtagggtaagcatcatggctggcagcctcacaggattgcttctacttcaggcagtgtcgtgggcatcaggtgcccgcccctgcatccctaaaagcttcggctacagctcggtggtgtgtgtctgcaatgccacatactgtgactcctttgaccccccgacctttcctgcccttggtaccttcagccgctatgagagtacacgcagtgggcgacggatggagctgagtatggggcccatccaggctaatcacacgggcacaggcctgctactgaccctgcagccagaacagaagttccagaaagtgaagggatttggaggggccatgacagatgctgctgctctcaacatccttgccctgtcaccccctgcccaaaatttgctacttaaatcgtacttctctgaagaaggaatcggatataacatcatccgggtacccatgggcagctgtgacttctccatccgcacctacacctatgcagacacccctgatgatttccag

SEQ ID NO: 47556 - DNA, 279 bp, Homo sapiens
gttgtgtttttcattttaaattccaattgttcattgatggtatatagaaaaccaactgacttttgtatattaatattgcttattagttccagtattttttgttgttgttgttttttgtcagttctctgagattttctacgttggcaatcatgtcatctgcaaacaaagttttatttattctcaatctgtatacttgtagttccttttcttgctttattgcattagctagggcttccagtgtgacatggaataggagtggtgacaggtaacattcttgtc

SEQ ID NO: 47557 - DNA, 383 bp, Homo sapiens
gtttaaaagttagggctgcccagatcccacctacagagattctgatgtaaatggtctgttgcagggaggggactccccatatgtttctagagtgcactcaggtctgacagccactatgcgggatgaatctgaaatctccctcaagttcttataccacgtggttctttattaattatttaaggaaatgatgtttttcctttgaaggcatcaaaatcctacgtgaataaaattttaattttttttaaatttcccgagaactataaggatcgaaattatgagggcagggacagtgttgcttaaatcatgaattagtgattcactgataataatggttttggtgaccagcaagaaggcaaacacatggcaaatgcagcaagtgcagg

SEQ ID NO: 47558 - DNA, 427 bp, Homo sapiens
ggtcccatctccgcctgcaaaaggagcagctggctccaggctccaacgtgccttccagctgcctgactgcctcttcgcctctcccgtcatttcttggctcgaaatggaccccaactgctcctgcgccactgggggctcctgctcctgtgccagctcctgcaagtgcaaagagtgcaaatgaacctcctgcaagaagagctgctgctcctgctgccccatgggctgtgccaagtgtgcccagggctgcgtctgcaaaggggcgtcggagaagtgcagctgctgtgcctgatgtggggacagccctgctcccagatgtaaacagagcaacctgcacaaacctggatttttttttcatacaaccctgagcatttgctacattcctttttctattaaatatgtaaacgacaataaaacagttttgacttga

SEQ ID NO: 47559 - DNA, 994 bp, Homo sapiens
  misc_feature (435)..(435): n is a, c, g, or t
ggtcccatctccgcctgcaaaaggagcagctggctccaggctccaacgtgccttccagctgcctgactgcctcttcgcctctcccgtcatttcttggctcgaaatggaccccaactgctcctgcgccactgggggctcctgctcctgtgccagctcctgcaagtgcaaagagtgcaaatgaacctcctgcaagaagagctgctgctcctgctgccccatgggctgtgccaagtgtgcccagggctgcgtctgcaaaggggcgtcggagaagtgcagctgctgtgcctgatgtggggacagccctgctcccagatgtaaacagagcaacctgcacaaacctggatttttttttcatacaaccctgagcatttgctacattcctttttctattaaatatgtaaacgacaataaaacagttttgacttgaaaaaaaanacaaaaaaaaaaaaaaaaaaaaaaaaaaaaaaaaaacaaaaaaaacagcaaaagaaacaacaaaaaaaaaaaacaacaaaacaaacaaacaaaaaagaagacacggcgcgcgtagcataaggacagcgcgggcacagcaacacgagcacacgcaaacagaaaagagagaaaaacgaaggaagaaagatataaagaaaaggggaaaggagacaaaaaaaagagatagagaggacaaagaaagcgggaggtgaaaaatgacaggaaggagaaagacaacggtgaagaacacggggagaacaccgagcagaacacgacgtgctagagagtggtcccgaggcagccgccgaccagtgcgagaagcacacaaaaaggcgggtatcgaggagatcggagacaaccagggcacggggcgcgcgggccagcgaaagcaggcagctgcgcggactaaagagagggacaatagagggcgaacaggcgctagcgccgctcgggagctacttgcttcagatggagcatttagcgaacatctggcgatctccgatctgtagcatgtgccggt

SEQ ID NO: 47560 - DNA, 912 bp, Homo sapiens
gcggccgcctactactactaaattcgcggccgcgtcgacctcgaaatggaccccaactgctcctgcgccactgggggctcctgctcctgtgccagctcctgcaagtgcaaagagtgcaaatgaacctcctgcaagaagagctgctgctcctgctgccccatgggctgtgccaagtgtgcccagggctgcgtctgcaaaggggcgtcggagaagtgcagctgctgtgcctgatgtggggacagccctgctcccagatgtaaacagagcaacctgcacaaacctggatttttttttcatacaaccctgagcatttgctacattcctttttctattaaatatgtaaacgacaataaaacagttttgacttgaaaaaaaaaaaaaaaaacggacgcgtggggcggggcgggcaaaggaaggcaggggggaagggacagtcggtcgcagaccgcgctgggttgccgcttgccgttgccgccatcgtgccagcccctcgggtctccgtgaggccgggtgacgctccagaatggggagacaacgccaatttggggagcagatgggatccagcttcattcaacatttactaccagttttttgatattgatagaacccaattaggcgcaatttacattgacgcgtcatgccttacgtgggaaggccaaccgtccggcgaaagctgccattgtgggaagttgtctagctttcgttccagaaaattcgcacagcatcaccgcgccaggaccatcagccactccggatagtggctcatcagctggttgtggggccgcttaggggtgaaacccatctggggttcccggtgttctttttagaactcacgcgtggggttccccctatttttgggcccgcacattggggccctccggggcccggtccctccctcccattcgctcgtct

SEQ ID NO: 47561 - DNA, 387 bp, Homo sapiens
ctttttcaatgtggtcaatccagatatctgccttacacaacagatatccaccaccctctcggacagagagatataacctacttgacttgccccactgaccctcatacccaacatggacaatgcaaatatgccacagtgatcacctctcagtgatggtgtgacctcctggaactcatccctacttgcttcaaactcaccagtttgaactcctcataggaaacatgtttgggtaatggctttgatcacaataaaggcccagcctgcaggtctgtcccactcaacacccattggttacgcatcctgctgtcttcagacttctcatcagcccttgtgggcaaccctcttctcttgtagatctgagtaataaaaatattttgcatttcatgt

SEQ ID NO: 47562 - DNA, 246 bp, Homo sapiens
ccaagaggaacctttaaatgaaatcatttccatggcagagttgggggcaagagagggagttggagttgatttctcatcgtgtgaatcccactccatcagcacgtggaaactgaggaagagggaaggagtggagaagaaccagacgagagacacggttccagatgctttcccaagtggctgtgccctcctcctatttgcggaggaatggctttggtctgcacctgcagctctggacggactgcctgg

SEQ ID NO: 47563 - DNA, 437 bp, Homo sapiens
cacaaacttaaaacctggcatcatcataatctgaggttatctgatcatagagctacaaaattagctgcttaattattatatattcagaaaagtctgaactttggattgaatttaaccctgtgaagtaaccagagatccagtccttttgcatacataataccagactcccatgtgtatttaaaaaatgggaaaacctagaagtgttactctaaataagataaaaatgatgaaagaagaagaaaagccacaatagggcagctaacaagattcctagagagaacccaagtaatttctaagtgaagctgctcaagtcagatttttctgccagttcggtttgtctttttctttttaaacctttttcttttctttcttttttttttgagacagaatttcctcttgttgcccaggctggagtgcaatggtgcgatcttggctca

SEQ ID NO: 47564 - DNA, 417 bp, Homo sapiens
aaaagccccttgcaagcaacagtgaaatgggcatgcttaagagctcttattaagcacaattcttgagagccccactgaatttctctgctccttgtaagacaggacactggctacctgcttagctactgttgtggggatttaatattaaaaatatttgacatggtaccttgtttatagcaggccctcaatacatttaatcatttaattcccttcccttcccttccctcttttgaatttcaagagggaattaactagatctagagtttatttgatacttgtgggaaaatcaagggttacaactggtttggagttctaaggatactcaaagcctttaaacattatcccacagttcctgctaatatgggcacaaatagaaactttcactgtttacctttccattcattcaacaaatgcttg

SEQ ID NO: 47565 - DNA, 471 bp, Homo sapiens
gtcatttaaaaaacaaaactcaagcacagcttgtagcacattgagttattgtatggtcaaatactgaaaatagaacttgcagcactttttatcctaagatgtattcatcttgtgttaggttattattacccattatgtcaacaaatatttctaagcattaaaagttcattgtatataaacaaaatacaaacatatgggccaggctcagtggctcacctgtgtaatcccagcactttgggaggctgaggtgggaggatagcttgagctcaggagttcgagatcaaccctgggtgacattgcgagaccctgtttttgttaaaaagaaagataggaagatttgtgtatgtataacatgatcacaatcaatcatatggtcattttcagataatatagaccttcacatatacatgactgattacctgtaatgctgtatttctcacctaaaaagagacaagaaacaatttttaaaag

SEQ ID NO: 47566 - DNA, 461 bp, Homo sapiens
caagacagtagaggatagttaaaagttgttaggttaaaaatttaagattgtagaaattataagtattaaactggtataaagaaacacccaagactgggtaatttataaagaaaagaggtttaattggctcacagttctgcaggctgtacaggaagcatggcagcatcaacttctggggaggcctcaggaagctttcaatcatggcagatggcaaatgggaagtgaggcacttcacatggccagagcaggagatctaatcacctctcaccagggcccacgaccagcattggggattacatttcaacatgagatttgggtggggacacagatctaaaccatatcagatgcccagaactccttcactgttcatgtcttgctctcagagcaggtgggaggaatcactattagtgaaattaatatcaatcaattttccactcatatctagttcttataaaggtcaa

SEQ ID NO: 47567 - DNA, 395 bp, Homo sapiens
gagcctgtgagggctgggagtcagcagagctatcaccctctgcgggaagaacaagacgggaccacactgcaaaacttcctggcagactctcatgcagtgaaacattccaccaacctacctacttatggaggtctccacccgggagaaatgaaaactacgtttacagcgaacttgagcacttctgcatgagcagcacgtgatggacactcagcagtaaaaggaacgaaggtggctgaatcccaggtgcagcctgcagagggacagaagccaggtggaaaaggctgcgatctgcgactccttttatacgacgttctaggacaggtgagcccacagggcagggggcttcccagtggctctgagggctgaggtgcgggcagtgattgaccgcaagggac

SEQ ID NO: 47568 - DNA, 742 bp, Homo sapiens
agtggtttcatcctacctgaaaattgccttcttgaaataaatgtttgatacccactggcctatctcctctggaaaacaggagttttcatttagaagtccagttggttggattccagtaagccgtttcacctgactgtattacgccccctggaaccagggctgtgcaggagccaccggcttctcccagagggcagggtgagcacagtatcagggcacatggcttaccctcaggagctgcatcccagcctcaaggccctggtgagaaactgtgctctccagcaagggtctctggccgtctctgcaccgtgtggtcagcttagggctgtgcctcccaagacaggacctgaggatgggtatgggtagcagagatattgctccctttgctcctgggtgtccagagctccagtgcctgtcacctcacctctagcagcctcaggagctgtgtaaattctgtcatatacatgatgagggagatcatgaagcactcacttgaatcataaagtctgtctgggggaggctgcagagtaaatattccactttccccacttacaggccccacaaacaagcctcagaaatgtgtttggagggaccatgacagcatctcttagggacttgtgttatttagttttctctctctctctctttttagtggcactaaccaaaaaaaaatgcggccgaattcaagctcacttggccaatccccctttgggaagcgaatacaatattggcccgctttaccgtg

SEQ ID NO: 47569 - DNA, 256 bp, Homo sapiens
ctgtatgcccccctgagagagacagtgatgaaggaaatgtccgactccttctccagagcacagtcttgttgagaaatttgagactcatgcccatgaacgtggtcattgcctcagtcgtcctgctgatattcatttagcagcgcgttgggggtatgttgtgaaccgggcacggtccctactctcagggcgtttaactctggtggggaaaacgttaaacaatgacctcactaatacatggaaatgcctcctactgctg

SEQ ID NO: 47570 - DNA, 809 bp, Homo sapiens
ttaaaaaaaagaaaaagaaagcaagaaaaaatgatactgtggggtcaagtataactccatggaaatgccacgtctgctcttcagtgaagaagctggtttagagtctcaaagaaaacttttgactgtatttatttattgttgcaaaaaagacgcttttttattgctgccctcatttgtcagctaagtattttttcttataaaatccagccccggttacatataatccatctgtatcttatcatgattcctgtaggtaaaagtacaagacgacctctagatgtcttttctttctatgaaaggagctgctatgtacacatgtgcacacacacacaactgggaatcaacaatgagtttattgttcatggtagattaaaattaagcttgcataaaggttgggctaagtggtcctggactacagactctgttgccttgaatataacagtacaatttgtcaattactctgcaccaggctaaagtgagtaaaatctatttgaaggtatcttgtttgtaaacatttgtcagattctaatttttttcttttgtattaaaattcaactatggatgtatatgaaacaaaataaatggagataatttttctcccacagaaaaaaaaaaaaaaaaaataaaaacaaaagaaagagaaaagaaaagaaaaaaagcaaacaaaagaaagaaggagaaaccgaaaagaaaaagagagaagaaagaagaacagcagaaagaagaaaaaagaaaagagaaaaaaagcaaaagaagaaaaaagagaaaaaaagaaagagcagaacaaaaagaggcgaaagaaacacata

SEQ ID NO: 47571 - DNA, 216 bp, Homo sapiens
cggcaccttcttcaggaggttgaggtgacctggaaggtcacgctgatcctcccaccgccccacagggtctctgcgtaccccctctacaggctggaatgtttggcctgggtccctggccctctgcgggcctcggtttcccctcctgtaatacttgtaagaactcagcctctccctgctcatctacatggtgctggggccactaaacagacagggagt

SEQ ID NO: 47572 - DNA, 364 bp, Homo sapiens
tgacttttgttctcagtgtttctttcaccatttatccaacctatccccatgtgtttttggtatttttttttctttttcaggtaagagtttaaatccaacctcctttatcaagccccagtttatgaaaactttctagattcaccagtgttaacactaaaaacataccaacacaaccaaaggaaacacgttgtcatgaatggtgaaatacttctaccatccaatttgcccagagttttattcccttgggagagcttcttaaagatctaggaagtatcttttgatgtacataactcagagattaaacacacttcacaaagtataggtaggctccactgaaagaaagctcgaaaatttgactgtaaaa

SEQ ID NO: 47573 - DNA, 394 bp, Homo sapiens
gtcttgattggcccagaaaacattcagctgtaatgatgaaagaaattaagcactctaaagaatgaatcaaatgctttcttatctttaaaattataccatatgccttaaacaggatgctttataaatatataatccagtgattgtatttgtaacttgtaataggcttagttttccttaaattgatacacttcagcatacaaaacttccttaagaactttatgtttaacttcagtagggataaaaaattttttgtggctgtgagtaatgtttacattttgagcgatatgatttatatgtaatattagtggctataactttgtattttgatggggtcaaatgtttgaagttttactagtttaataaatatatatatttttaatgtagttttaaggac

SEQ ID NO: 47574 - DNA, 614 bp, Homo sapiens
ccaaaagtacttttagaccagaatttatggtttgtacattataaacctgttaaaaaatcagctggaaggcttgttgaaacagtgtcaggccccactcagtttctgattcactggatctagggaggtcctgagaatttctatttctattacagtgccaggtggtgcccctatagctggttccagaatctcaccttgagagtcactggcctccaggattaagtctcagctcagcttcacagtatagtgctcaagaccttttctggtctgacctcacccatgaggtgtcagttctcctggaccagctctaagctggcttgcacagagtgtcaatctgagctccttgccctcttgaactgcagttttagggttttgatatcttgagtgacttttttcacccaaggcaccaaacaagtggcaaactcctccctgcttctcatggctcgaggaaagagcttctccagtcttccccgcactggctgagcacggagagtgatgggaaggaggggatggtgggagagggagggcaagggggcctcagagccttgtaccctgtccaggctgctagacttatgcgtgacattttgtaccacatagatcatgaataaactggaacc

SEQ ID NO: 47575 - DNA, 236 bp, Homo sapiens
atacttggaagcaaatcatagttttatttctttagtgtaaaggaaatttgaggtcctgggatacagtaggtgcccaacaaatacttaacctcttcgtaataatttagttaagttgttactacaaacagggaatgatataatgatcagaggtgaaataaatttgtgagcacctcctccaacataaatctcatttcagattcagtaaacacttatcaaacgtccacttgtgctgacag

SEQ ID NO: 47576 - DNA, 510 bp, Homo sapiens
atgtttttgcagcaaacgcgatttaacagaagtttacaaagcaacactgtagctaatgcataattttaaaagttgactaacatttatctattgttaaagcaacactaataatggaataaaaggaaagcaaataggccaatgtggcaccataggcttattttaggtaaattagttccatcatcttatgcagttgtaagtaatgccaggattaaaatatcaagcaagccacgtaaacagtggcaaatgtgtgtgtgttttccatttgtttggtaagcagccattttactcttgcactgtaatgaactgaagggaaatataagataatgcttttttccccccatattgctattcaactacctctatatgcttgatttctttttaggattcccatcctccaaatctgtacaaaaacgtttcagctcatctgtgttgtaataacaatgtgatacagacagtttgtgtgaaagttgtttgttcattaaaaaatgtttcctattgcctcaaattgtg

SEQ ID NO: 47577 - DNA, 863 bp, Homo sapiens
accagttctacttaaactattcccaaaaattgaggaagtactcgattgggaggtgactcgataggaaggtacccctccctaactcattctatgaagtatcatcattttgataccaaaaactgacagagacacaccaaaaaaagattactttaggccaatatccctgatgaacatagatgcaaaaatcctaaacaaaatactagcaaactgaattcagcagcacatcaaaaagctaatccaccatgatcgagcaggctgtatccctgggatgcaaacttggttcaatatacacaaatcaataagtgtgattcatcacatagaactaaaaacaaaaaccacatgatcatgtcagtagacacataaaaggcttttttaaaaattcaacatcccttcattttaaaaacctttaacaaactagacattgaagcagcatacctcaaaataataagagccatctatgacagacccacagccagcattatactgaatgatcaaacgctttctagcttctgcatttcctttgagaaccagaacaagacaaggatacccactctctcaccattcctatttgacatagtaccagaagtcctagccagagaaatcaggcaagagaaagaaaaaaaaagaatctaaataggaagagaagaagtcaaactatttctgtttgcaaacaatataattctatacctagaaaacctcatactctttgcccaaaagcccctagatgtaatcaacaacttcagcaaagttttagggtacaaaatcaatgtacagaaatcagtagcatttctatacaccaacaaaatccaacctgagagccaaatcccaaagaatgcaaccccattcataatagtcacaaaaag

SEQ ID NO: 47578 - DNA, 565 bp, Homo sapiens
tactggcgagtgttgtgacagcttaaactattacgacttataaatagaggagcagtggtgttggcagcgtcagggcatggcccaggcaggagcagcggccacagcgttcatccatctatggaggaagaggctgccttggcgggtcaactgtgttgctccaagtgacataatgtcatgattttgatagctgaagtgttttgccttgtgtacatactagagtttcttgatgtcttcatttgtggatggacaggttcatttgtgttgctccaaacaacaaaatttcattattttggtagccaaaaagcatttcccttcagtatatataccagaatagtttatgctgtcagcataaactattgttgtgggggcgggtatgtctgtatataaatctgtgcagccactagtcaacaaatactgtgtatgcctagcacttcctagtctagtccacagcatctgtgggtttaaccaactttgcatcaaaaatattcaaaaccaaaattgcatctgtgctgaacatgtacagactttttttcttatcattatttcctaaacaatagatatattt

SEQ ID NO: 47579 - DNA, 587 bp, Homo sapiens
tctccacggggcccccccatcatggacctcccctcccttgctggagctagaatgagggggaggccgccttggcgggagccttagagaggaggaggaaagggggagaggaaattgcagacatagctgaaggcgctgcctgaggcctgtgggccagcgaccctctccctgtccgggctgcagacccctactcccccagtcccgagactgggttcaagtagagggcagatctagatgggggaggactaggactgactcctatggggatggaaaagggactcctgggtgtctttgtgactgtttagtgtgttctgtgaatgtgcgggcaggtatttttgcccacatctgtatatttgtctattaatgtgatgtatttgagtattgttgtgggggcgggtatgtctgtatataaatctgtgcagccactagtcaacaaatactgtgtatgcctagcacttcctagtctagtccacagcatctgtgggtttaaccaactttgcatcaaaaatattcaaaaccaaaattgcatctgtgctgaacatgtacagactttttttcttatcattatttcctaaacaatagatatattt

SEQ ID NO: 47580 - DNA, 306 bp, Homo sapiens
tctccacggggcccccccatcatggacctcccctcccttgctggagctagaatgagggggaggccgccttggcgggagccttagagaggaggaggaaagggggagaggaaattgcagacatagctgaaggcgctgcctgaggcctgtgggccagcgacctggacttcaatgtgtgccatgctgtgcgagctgtcctgctccaacgactaccggatgcgctgagtgcccggctctcccgccctgcaacgagcccagtggctgagcgtaccatagtgctggttcagggggctcccacttcctctccct

SEQ ID NO: 47581 - DNA, 2284 bp, Homo sapiens
gcgcctgtcattgttcacacagatttattaagatttcatgtggagacggttgtggaatggaatactgctgccacttttcaacctctttttcatcttaactgatactatttcttatctgtgtttatatcagattctctttttataagagtaaaattgtttctaattccttggaactatcataaaagaacaagttctttaattataggctgtggtttaaaatacaagacagttgaaggccaggactaagatagatgggaaaggctattttgtcagggaagcctcaaaaatgctgtattttggggaaaaaaaatggaactctgattttcatttgattctcataaaacaaactttctttaaaaatatcactttaattagctgggcgtggtagcgggtgcctgtaatcctagctgctagagaggctgaggcaggagaatcacttgaaaccgggaggcagaggttgcagtgagccgagatggtgccactgctctccagcctaggtgacagagtgagacactatcttaagaaaaaaaaatatatatatatatacatatatatttatttatttatttattttatttatttatttaatggctgtaccctatattcttcttgatttctagccttttattggctctcagattgccagagttgggactcaatagtaagtaaccattttgttgaggtggtagtgattctaccagggtgagttatcatgacagcagaatcactgcgtttttctctctactctgtggcatagactctatgccatagagtgacgtgtgaaaggcttgaggctccctacctacgagacaccctggtccattctagcagtatggcacgtgctgactgggttttgagtctcttgctgtaaaatcacattactgcacttccctgcattttctcatccagggtatctagcatggtcccccacatggcacattcagtgttagccacacttccatactaactgccctgcggggatatttaatgagctcttaaatggcagaaatgttgtgtcttttcctgttcccttagtattcctatttttgttggtaatttttcttatgaaccatgcagttgtctagttcaggccattttagtatgcagttttatctttgcttccaacatgatttaatgttcccaaattggatttcacataatcctagtgtcctttgagacttgaattggttctaggccaaaaaagggtgagggggaaggaagaaattcagagtcaaatttggcaaataatatatccctgtcgttttgttttttctttttaagacttgggccgggtgtggtggctcacgcgtttaatcccagcactttgggaggctgaggcaggcaaatcacctgaggtcaggagctcgagaccagcctggccaacatggtgaaaaatacaaaaattatccaggcatggtggcccacgcctgtagtcccagctactcgggaggctgagacaggagaatctcttgaacccgggtgagccgagatcgcgccactgcactccactctggtcgacagagctagattccatctcaaaaaaaaaaaaaaaagacgactcagtatacaaataaagactggaaagtcctatattaaaggaactagttaaatactagtttattttacttaatctagtgaatttttaaatattttctttctttctttttttttttttttttttttgagacagggtctggttctgtcaaccaggctggagtgcagtggcacaatctcagctcacctcaacctccacctcctgggctcaagccatcctcccacctcagccttctgagtctgggactacaggttcccaccaccatgcctggctaattttgtattttttgtagagacagggttttgccatgttgcagaggctggtctcgaactcctgagttcatgcaatctgaccaccttggcctcccaaagtgctgagattacgcccggcctaaatattactttcaaatagaaccatcttcatgggtagcagtttataatacacaagtagaatttgggaaatgtagtcccagtcttccattcttcacagtggatgcttcagccagtttcctgtctctgcacacacactgcccgacagcgggctttcccttctccttcagagcagtagcagttccctttcttcattcccacccatcacagtggcagccccctctgccctcctgtattctgaatcccacccttataatatgcttagattttgcctttctcccagccgttttgtgagcattgttcgtgtgtaccaattttttctcatcctttaaaaagaaaa

SEQ ID NO: 47582 - DNA, 1907 bp, Homo sapiens
gcgcctgtcattgttcacacagatttattaagatttcatgtggagacggttgtggaatggaatactgctgccacttttcaacctctttttcatcttaactgatactatttcttatctgtgtttatatcagattctctttttataagagtaaaattgtttctaattccttggaactatcataaaagaacaagttctttaattataggctgtggtttaaaatacaagacagttgaaggccaggactaagatagatgggaaaggctattttgtcagggaagcctcaaaaatgctgtattttggggaaaaaaaatggaactctgattttcatttgattctcataaaacaaactttctttaaaaatatcactttaattagctgggcgtggtagcgggtgcctgtaatcctagctgctagagaggctgaggcaggagaatcacttgaaaccgggaggcagaggttgcagtgagccgagatggtgccactgctctccagcctaggtgacagagtgagacactatcttaagaaaaaaaaatatatatatatatacatatatatttatttatttatttattttatttatttatttaatggctgtaccctatattcttcttgatttctagccttttattggctctcagattgccagagttgggactcaatagtaagtaaccattttgttgaggtggtagtgattctaccagggtgagttatcatgacagcagaatcactgcgtttttctctctactctgtggcatagactctatgccatagagtgacgtgtgaaaggcttgaggctccctacctacgagacaccctggtccattctagcagtatggcacgtgctgactgggttttgagtctcttgctgtaaaatcacattactgcacttccctgcattttctcatccagggtatctagcatggtcccccacatggcacattcagtgttagccacacttccatactaactgccctgcggggatatttaatgagctcttaaatggcagaaatgttgtgtcttttcctgttcccttagtattcctatttttgttggtaatttttcttatgaaccatgcagttgtctagttcaggccattttagtatgcagttttatctttgcttccaacatgatttaatgttcccaaattggatttcacataatcctagtgtcctttgagacttgaattggttctaggccaaaaaagggtgagggggaaggaagaaattcagagtcaaatttggcaaataatatatccctgtcgttttgttttttctttttaagacttgggccgggtgtggtggctcacgcgtttaatcccagcactttgggaggctgaggcaggcaaatcacctgaggtcaggagctcgagaccagcctggccaacatggtgaaaaatacaaaaattatccaggcatggtggcccacgcctgtagtcccagctactcgggaggctgagacaggagaatctcttgaacccgggtgagccgagatcgcgccactgcactccactctggtcgacagagctagattccatctcaaaaaaaaaaaaaaaagacgactcagtatacaaataaagactggaaagtcctatattaaaggaactagttaaatactagtttattttacttaatctagtgaatttttaaatattttctttctttctttttttttttttttttttttgagacagggtctggttctgtcaaccaggctggagtgcagtggcacaatctcagctcaccagggtttcagctgtctaacctgaatcaatctggccagccttagtaaaagagaatgggaccacaggtttcccacaacttgagtgctaagttttgaatatttggtaaagcagggtttctcgattttgagtagacttgtcttagcggccccttaaggcaaattagcca

SEQ ID NO: 47583 - DNA, 1680 bp, Homo sapiens
gcgcctgtcattgttcacacagatttattaagatttcatgtggagacggttgtggaatggaatactgctgccacttttcaacctctttttcatcttaactgatactatttcttatctgtgtttatatcagattctctttttataagagtaaaattgtttctaattccttggaactatcataaaagaacaagttctttaattataggctgtggtttaaaatacaagacagttgaaggccaggactaagatagatgggaaaggctattttgtcagggaagcctcaaaaatgctgtattttggggaaaaaaaatggaactctgattttcatttgattctcataaaacaaactttctttaaaaatatcactttaattagctgggcgtggtagcgggtgcctgtaatcctagctgctagagaggctgaggcaggagaatcacttgaaaccgggaggcagaggttgcagtgagccgagatggtgccactgctctccagcctaggtgacagagtgagacactatcttaagaaaaaaaaatatatatatatatacatatatatttatttatttatttattttatttatttatttaatggctgtaccctatattcttcttgatttctagccttttattggctctcagattgccagagttgggactcaatagtaagtaaccattttgttgaggtggtagtgattctaccagggtgagttatcatgacagcagaatcactgcgtttttctctctactctgtggcatagactctatgccatagagtgacgtgtgaaaggcttgaggctccctacctacgagacaccctggtccattctagcagtatggcacgtgctgactgggttttgagtctcttgctgtaaaatcacattactgcacttccctgcattttctcatccagggtatctagcatggtcccccacatggcacattcagtgttagccacacttccatactaactgccctgcggggatatttaatgagctcttaaatggcagaaatgttgtgtcttttcctgttcccttagtattcctatttttgttggtaatttttcttatgaaccatgcagttgtctagttcaggccattttagtatgcagttttatctttgcttccaacatgatttaatgttcccaaattggatttcacataatcctagtgtcctttgagacttgaattggttctaggccaaaaaagggtgagggggaaggaagaaattcagagtcaaatttggcaaataatatatccctgtcgttttgttttttctttttaagacttgggccgggtgtggtggctcacgcgtttaatcccaaagtgctgagattacgcccggcctaaatattactttcaaatagaaccatcttcatgggtagcagtttataatacacaagtagaatttgggaaatgtagtcccagtcttccattcttcacagtggatgcttcagccagtttcctgtctctgcacacacactgcccgacagcgggctttcccttctccttcagagcagtagcagttccctttcttcattcccacccatcacagtggcagccccctctgccctcctgtattctgaatcccacccttataatatgcttagattttgcctttctcccagccgttttgtgagcattgttcgtgtgtaccaattttttctcatcctttaaaaagaaaa

SEQ ID NO: 47584 - DNA, 374 bp, Homo sapiens
aagggaagggcctaagcgtaggtgagggctacacccgtgaagaccgccatcttggcttcatagatacaaccttggatgcacgttcacattgtcattactttccagtcacatttccacccagctttttccatcaggcgacaaacagtaaggtgatggtaacgttgaggctacccgccctatgtggggttcatgacaacacctgtgagacatacacatgcttctcttcttagcttccaggtgtcaacatcgactctgatcacagaactggatacactggcctccttctgaatttagtcaccattctagtgttaccatcagactgcaaggtaaagcactcctaaatagccaacaccgtaggtggaaccaactatgcc

SEQ ID NO: 47585 - DNA, 1526 bp, Homo sapiens
taagagtttgagaccagcctggacaacatggcaaaaccctgtctctactaaaaatacaaattagccgggcgcactggcacatgcctgtgttcccagctactcaggaggccgagctgggaggctcgcctgagcctgggaggttgaggctgcagtgagctgtgattgtgccactgcactctaggctaggtaacagagttaagatcctgtctcataaaaaaaaaagtaaaaactatttttagcttgaaagtttctgagcctcaataggtactggctgaatgaatttggcctgtgggctatagtttcctggcaccatgaatttgttttcttttactttctctcagtaatgtcatataaggttttgtgttgtggtcttacatatctactgttagttatgtctaacccctagttttctagttctctcctcagttgtgcctaagctgctgttaaagcattccagtgaactttagagacaggggctcactgttgcccaggcttgagtatagtggcatcatcatagctcactgaagcttctaactcctgggctcaagtgatcctctcacctcagcctcaaaagtagctgggactacaagcaggtgccaccacacccagctattttgttttttgtggagacagggtctcactatgttgcccatgctggttccactgtattttttcttttgttgagacggaatctctccctgtcccaggctggagtgcagtggcacaatctcggctcactgcaacctccgcctcctgggttcaagcgattttcctgcctcagccttcggagtagctgggattgcaggcgtgcaccaccatgcctggctaatttttgcatttttagtagagacagggtttcacattggccaggctggtcttgaactcctgacctcatgatccgccggccttggcctcccaaagtgctgggattatgggcatgagccaccatgcccaatcaagtttccactgtattcttaattttgattattggattcttacaaattctagaatttactttttaaaaaaacatgttcatgtagctgctgaattcccaaactagtgtctctccttgaacatggtaagcagttattttagtctgatagcaccgatgtctccagccactgtgggcctgctatcttgtctcacgtgcctggttacatcttgttgtactcaggatattgtattagcaaaattgtagaaagaatctgggtttaggataataataacatcctctagagaggggttttgtttgcttatccaaagagtttgggcaaactaccactctgggatcaccttaatctaatttcaaggattaagatccgtaatcggaggctgggctgcagtcccgagagcctgtttcctacaccgcctcacccttattcctggggtgcaaaagactgagggcttcaaccaaaagtgagtaacaccaccaagtccatcgccctttcacaggccccatcccctacttctgaaaggctgctaaaatcactgctaagcctctgaatcacctccaagtttggcaaatg

SEQ ID NO: 47586 - DNA, 562 bp, Homo sapiens
ggagccacgtccaagtgtgttcttcccctaagaggccaatcatctttctctctcttttcccacctcaatccttcccttccttcccctcctgacctgtctgaattcccatttgcaccagtttccctttttcacagacaagacaagattccctcagataactaagccattccctggccatgagttactacagtttcggtcattcattcagtggaaaagcgaccagggacagaaggcgccgccataaaggtcacctggcccgagcagacgccaggtcgctgcttcttccttggctgctgacattttaacagcggcccagacagtctgtttccgctttccccaaacaagcaccctggagaccctcccccgacggctcgaggcgagaaacagggcctggcccaggagccggtggccgcgacctcgggtctgcagtggcgccctctgcaccttgggaagcgcccgacgcacaggacagggaccgggcaggaggcaggggcggccccaggagaccgggcagcggacgggggagaccgcgggggacccggaaggggatgggggcggccgc

SEQ ID NO: 47587 - DNA, 1985 bp, Homo sapiens
cggcggcgctcgggaggaagtgccgatcggctgctggggcgaaaagggggcgccgggccgctctagccggtgaggccggcgggctctctgtggctgcggctgggaaaccgcgcggaggaggtgcccggccggggaccagccctggtccagcgcctccctctctcagcatggacgaggagagcctggagtcggccttgcagacctaccgtgcgcagctgcagcaggtggagctggccttgggcgccggcctggattcgtctgagcaggctgacctgcgccagctgcagggggacctgaaggagctcatcgagctcaccgaggccagcctggtgtctgtcaggaagagcaggttgttggccgcgctggacgaagagcgcccgggccgccaggaagatgctgagtaccaggctttccgggaggccatcactgaggcggtggaggcaccagcagcggcccgtgggtccggatcagagaccgttcctaaagcagaggcggggccagaatctgcggcaggtgggcaggaggaggaagagggagaggacgaggaagagctgagtgggacaaaggtgagcgcgccctactacagctcctggggcactctggagtatcacaacgccatggtggtgggaacggaagaggcggaggatggctcggcgggtgtccgtgtgctttacctgtaccccactcacaagtctctgaagccgtgcccgttcttcctggagggaaagtgccgctttaaggagaactgcaggttctcccatgggcaggtggtctctctggatgagctgcgccccttccaggacccagacctgagctccctgcaggccggctctgcgtgtctggccaagcaccaggatggcctctggcacgcagcacgcatcaccgatgtggacaacggctactacacagtcaagtttgactcgctgctgctgagggaggccgtggtggagggggacggcatcctgcccccactgcgcacagaggccacagagtccgactcagacagcgacggtacgggtgactccagctatgccagagtggtggggtcggacgccgtggactctgcacagtcctctgccctctgtccgtctcttgcagtggtggggtcagatgctgtggactctgggacctgcagctctgcctttgctggctgggaggtgcacacgcgaggtataggctccagactcctcaccaaggtgggctatgagtttggcaagggtttgggccgacacgcggaaggccgggtggagcccatccatgctgtggtgttgcctcgagggaagtcgctggaccagtgtgtggagaccctgcagaagcagaccagggttggcaaggctggcaccaacaagccccccaggtgccggggaagaggggccaggcctgggggccgcccagctcctcggaatgtgtttgacttcctcaatgaaaagctgcaaggtcaggctcctggggccctagaagccggggcggccccagcggggaggaggagcaaggacatgtaccatgccagcaagagtgccaagcgggccctgagcctgcggctcttccagactgaggagaagatcgagcgaacccagcgggacatcaggagcatccaggaggctctcgcccgcaacgctggccggcatagcgtggcgtcagcccagctgcaggagaagctggcaggagcccagcgccagctggggcagctccgggctcaggaagccggcctgcagcaggagcggaggaaggcagacacccacaagaagatgactgagttctagagaccccacaagcactatggacgaagcgtgggaccccagcacgggctgccctcaggaagaccagtgttgcccgaggaggggccggactgctggcctggggcgtgcggacactgctgagtggagacagagctgcggggtcccatctggacacttacttgcccacctgccagtgtcttgggcatttccttggcaaggacattaaagtgatttcatcacagtgtc

SEQ ID NO: 47588 - DNA, 1915 bp, Homo sapiens
cggcggcgctcgggaggaagtgccgatcggctgctggggcgaaaagggggcgccgggccgctctagccgccctggtccagcgcctccctctctcagcatggacgaggagagcctggagtcggccttgcagacctaccgtgcgcagctgcagcaggtggagctggccttgggcgccggcctggattcgtctgagcaggctgacctgcgccagctgcagggggacctgaaggagctcatcgagctcaccgaggccagcctggtgtctgtcaggaagagcaggttgttggccgcgctggacgaagagcgcccgggccgccaggaagatgctgagtaccaggctttccgggaggccatcactgaggcggtggaggcaccagcagcggcccgtgggtccggatcagagaccgttcctaaagcagaggcggggccagaatctgcggcaggtgggcaggaggaggaagagggagaggacgaggaagagctgagtgggacaaaggtgagcgcgccctactacagctcctggggcactctggagtatcacaacgccatggtggtgggaacggaagaggcggaggatggctcggcgggtgtccgtgtgctttacctgtaccccactcacaagtctctgaagccgtgcccgttcttcctggagggaaagtgccgctttaaggagaactgcaggttctcccatgggcaggtggtctctctggatgagctgcgccccttccaggacccagacctgagctccctgcaggccggctctgcgtgtctggccaagcaccaggatggcctctggcacgcagcacgcatcaccgatgtggacaacggctactacacagtcaagtttgactcgctgctgctgagggaggccgtggtggagggggacggcatcctgcccccactgcgcacagaggccacagagtccgactcagacagcgacggtacgggtgactccagctatgccagagtggtggggtcggacgccgtggactctgcacagtcctctgccctctgtccgtctcttgcagtggtggggtcagatgctgtggactctgggacctgcagctctgcctttgctggctgggaggtgcacacgcgaggtataggctccagactcctcaccaaggtgggctatgagtttggcaagggtttgggccgacacgcggaaggccgggtggagcccatccatgctgtggtgttgcctcgagggaagtcgctggaccagtgtgtggagaccctgcagaagcagaccagggttggcaaggctggcaccaacaagccccccaggtgccggggaagaggggccaggcctgggggccgcccagctcctcggaatgtgtttgacttcctcaatgaaaagctgcaaggtcaggctcctggggccctagaagccggggcggccccagcggggaggaggagcaaggacatgtaccatgccagcaagagtgccaagcgggccctgagcctgcggctcttccagactgaggagaagatcgagcgaacccagcgggacatcaggagcatccaggaggctctcgcccgcaacgctggccggcatagcgtggcgtcagcccagctgcaggagaagctggcaggagcccagcgccagctggggcagctccgggctcaggaagccggcctgcagcaggagcggaggaaggcagacacccacaagaagatgactgagttctagagaccccacaagcactatggacgaagcgtgggaccccagcacgggctgccctcaggaagaccagtgttgcccgaggaggggccggactgctggcctggggcgtgcggacactgctgagtggagacagagctgcggggtcccatctggacacttacttgcccacctgccagtgtcttgggcatttccttggcaaggacattaaagtgatttcatcacagtgtc

SEQ ID NO: 47589 - DNA, 391 bp, Homo sapiens
ttcccagctggaagaaggaactgagggtcccatctgtagctatttggcaagtggatcataggcccagaaggaagtaagtctatccaaactctccccctctctcttcctccaagatcctgccctggcctatgtggctctggcccatgatttaggacttcaggtgtgtggtttttttacacttggtccggttggttgcggacagggagaaaagaaactgaataatgattgctgtttaaccaggaaagctgtgacaaactcagctacagctcagcatgttttacctcctccctttcactcccgcaaacagcaatgagcagatacatttttactgcaaagaatgactgttaagtagttaggaattagaagatgtgtttgccagagagaagccttc

SEQ ID NO: 47590 - DNA, 709 bp, Homo sapiens
atccccagtgcggcagtgttgggacatgggtaggtcgggagggctctgccactgccattacaatgaggtaatatccttgtcacctgagagtggtttttgtgaaggccggtgtggggctcctcttgctggcttgctctctggctctctcgccctttccccttctgccttccaccatgggatgtcctagcaggaaggccctaagcagatacaggctgttgctgttggactttgcagcctccagaactgtcactccaagaactgaggcccctgtcagcagtgtcagtaatagttggagaatgccctgcacacatcagcacattccacggaggagtcgctgcccaagaggcccttaggaaaacacagcaaagtgagtgtgaaaagatagacctgaagggattatcacacacaaaaaatgacagaaatgttgaatgttcctttgagctatgtcagctctatcctgaagagaacttggagaaactcattccttgcttagctggtccggacgcattttatgtggagcgaaaccacgtggatctggactcaggcctgaggtacctggcctcattaccttctcacgtgttgaacaatgaccatgtcaggaggtttctcagcactttcctctcccccaaaggaggttcagagtccaagtcctgggaatccctcccttctaaagtaggtacgcgagggcgtgtctggaagcctgtgtgtg

SEQ ID NO: 47591 - DNA, 325 bp, Homo sapiens
atccccagtgcggcagtgttgggacatgggtaggtcgggagggctctgccactgccattacaatgaggtaatatccttgtcacctgagagtggtttttgtgaaggccggtgtggggctcctcttgctggcttgctctctggctctctcgccctttccccttctgccttccaccatgggatgtcctagcaggaaggccctaagcagatacaggctgttgctgttggactttgcagcctccagaactgtaagaaatacatttcttttctttataaattacctactctgtggtattctgttacaggaacacaaaacagaccaagacac

SEQ ID NO: 47592 - DNA, 263 bp, Homo sapiens
attatctttcatcagatgaaagagtatttgcctacacattgccaatattcatccagatatattttgggaaaaaaagctcttcaatttctcaagcacttttttcatcttttgaactggaatccaagtcatggaggcccatcaccttacagcttcttaaatggcaaacataattattctttgattttgcttttcctcaggctgcattcttaagtaatttaattttccttttgttatatgtgattggcaacaatgcgcacaatgag

SEQ ID NO: 47593 - DNA, 165 bp, Homo sapiens
attccaccctgacctcagccctgctaaatcctggcaacttacctgggagatgctacttcccgactgtgtgtccttgaacaagtcattcgatctctctcatcttccgttttctcatctgcaaagagtcggcaatgactcattgggtcattgtgagatgtggccgtg

SEQ ID NO: 47594 - DNA, 450 bp, Homo sapiens
ctccttatctctgtgcttctcttgctgtgtaggcttgctttcttcgcatagaaggcacaggaccagtggcctctgtacctcacagcttcaagagcagataggagggagctcttccctttgccccggttgaaaaacttcctgggagatgactctgtcctgccctgtggggtagtgggtcctgtgattggtcagcttcctttatcagaaaaggctgtgtctggtgaaagcagtcacaccagcttccctatagccccgcattaaagctgagtggagagagggagggagagggccctgtgctattgtgaaagaggataatttgatgctattacagctcagataaggtctgggagaatgatttgccggacaggcatctccaactgtgcaactcagccacattttacatatgtaacactgggtaacttacttgatatccctagtgtcattttcatt

SEQ ID NO: 47595 - DNA, 305 bp, Homo sapiens
aaaaactccaaagccatttcagagatcttcaagactgcccctcccattactggcccagagctctaagagggcagaatggtttggaatgaccagctgctgcccagggctgccttgggtctcatctccccacatttctggtgcagcattcctcagccatcccagctgtggttcaggtggccacaggtgtgatgtggaaggtaaaagtcataaaccttggcagcatacacatggcactaattttgcaggtgtgcagaatgcaaaagctgagggggcatgccttcttccacctacatttcaaagggtgc

SEQ ID NO: 47596 - DNA, 403 bp, Homo sapiens
cttgggcatcacctgggatgtagtttttagaacgacagggccctacccagacccactgaatcagaacctgcagacccactgaatcagaacaagtcctcagacaatgcatttgcacattgaagtttgaaaggcattgatctaccttaaggtcctgccaaaacatcccgcctgctctgttgataaccttgttgtgatatgaccctcagaaatgtacccatggtgaatgcttctgacatccacatagctgtgagtatagatgcatgccactttgtcccgaatgtacttcattattaagtgcttagtgctgagctgggcacaaaagatacaaaaacaagtaaagcatggttgctgccttcaaggagctcagaatgcagtgcgggacacagaaagagctgcagcatcc

SEQ ID NO: 47597 - DNA, 790 bp, Homo sapiens
aacttcaatccgctataagcaaagtaatcatgaactgtaaaataccaaaacctttagactaatacaggagtgattaatagtacctacatgtatgccatttagcaatttctgcaagtggaattaggccttaaaatgggtggccgtgttttcagcctaccacttttaaataccgatgactgccatttattgagtaactataattacaaatattctgaatactaggatcagcaatctttacagcaatgtggaaagatagctacactgtattatcattgtcattatagacaaggaacgaagacacaaaaaatattaagtaacttgcccaagacttctacttaggtaacagagcaaggattccaaccaaagaccagtctggcctcaaaaactctggtcttttcattattctgtgttatctcttcctaaaacaaatgaaatcatccaatcatcttagcttttagattcaaacatggcacataattgaaactgcttcacccaatctggtatgttagcctgggtttagaacctttaataagccagtgatcggttggcaatggaaagtgctgggattgccagccagtcagatctaaaggccagctgggtcatggcagggctgcagccatggcaagactcctccaaagctcatgtgggaagggagctgaataggcttcctgagcttttcagttgaacaactaacatctactgtgatgccaagaatttaagaacatgaaaggtggctttttcttggatgtggcttgggatcttttttaaaaaaaaaaagaaagaaagaaaa

SEQ ID NO: 47598 - DNA, 518 bp, Homo sapiens
tttaataacaggtttttagacaaatattcaggaaaaaacaggaggtataaattccagggtcaaatggaaatgcagagttacacgggtttttattttgttctgttgattgattttttaaaaaatgaggtatttctgagagcctctagtatgctagcactgattgtgatctgtaaaagcatcttataatatgcagtgctcccaaactagtaaactcttctgctgttttctcccctaaagagtcttgagttctgcagaacacgctgggtgttacttcttgggatagctggtactgtagtgtgccctgctggggacaggttctcccttacctaagggaattctcactggggctggggacttcccacatctgttatgacacttgggcactgacaatgggggttgcagaggttctcagggacaggctgggttagcctactccctcacccttacaagcaactctgctctctgtggcactcatcagaattgctttgcacagtggtctccaactttttttttttttt

SEQ ID NO: 47599 - DNA, 1484 bp, Homo sapiens
agaaaatgaacttaatgaaaaaaattataatgagcaatgacaatattcctataaaacctccctctgggtatcaagagacatattacctgccaaggccagattttactttttaaggtttcctctctctcaccaaagacactagtgggcacagaggtgacactagagttagaatgttaccagagtcatttgcattagacagtttatctgatcatgaacatgttcccagggagattagaaaaatgggaagcaggcctctaaagatcctccttggacatttgtaaaaaggctggctgcttctccaggaatgtctgaattaagcaagaattgtgccactgaaatagcttcttgtttttatattaaacaaggaacgattgtgcagtggatgacctggactgaaagatgtatgatggtcaagtttaaacatattaattcctgattgttttcttaaatacccaccctagtcattttttggaaaatattgccagacatatttgacatgaattcatgtttattctggcttctgttcccaagcagaagtggattaaccctggcaatggctggcttcactaactgtacttgcacccagcctgggctgccatctgctcagccaggagaagcagggagtggggtgtgggccctttaagttcgctcagggcacactcattcagtctcccctgaggagaccttgtccccctttgtggggtgaatgctggctgttgcaggccagaggcagtgccaactggagactcatcctctcagctttggtcagcttcagccacgtattcttcatgagtgctggcttctgaacctgcaggatcatttctcagtcagtttatggtgcagggtaattcatttaaaataaagcccattaaaaccccatggctatagaatgggttttaaatagattgtcctggagacacatcattgtatagtctttgcttccctctcatgacctatcttggagtagaatttgtgtactactgtccttgtctttgagtgggtatatgtgtgatggtacagaaatacagtcacatattatattaatatatatagatggataggaaaaacctacagccataggtattgtccaataactgattctagaggtagaactatagagtatacatttccttttttcttgctttgatgatatttttatacaattttatatgctataaaattttcaaaaatatatttgctattttcatttgtagagcttggttaggtttttatcagctcttgtgcccactgtacaaccagattcccctcatctaatttaaatgtcttccctttttcaaactctcctttatgttttcctttttttttcctcccatttttctacccttcacaaattccttcttttgcttctgtccaggtaacccattctgcttgcagtatcattttagcacgtacaaacacaaaataatgggaaaaataaaagcaccttgttccatgcaattcgtatgggaaagttttgggtgtca

SEQ ID NO: 47600 - DNA, 3320 bp, Homo sapiens
ttctcccgctcctcccttgctcggccctctcctcctcctcccgctcctcctcccgctcctccgcgccgccgccagccccgctgcgcgctctgctcttcgcagctccccggacccgcagccatggccgacatcaagacgggcatcttcgccaagaacgtccagaagcgactcaaccgcgcgcaggaaaaggtcctccaaaagctggggaaagctgatgagacaaaagacgaacagttcgaagaatatgtccagaacttcaaacggcaagaagcagagggtaccagacttcagcgagaactccgaggatatttagcagcaatcaaaggcatgcaggaggcctccatgaagctcacagagtcgctgcatgaagtctatgagcctgactggtatgggcgggaagatgtgaaaatggttggtgagaaatgtgatgtgctgtgggaagacttccatcaaaaactcgtggatgggtccttgctaacactggatacctacctggggcaatttcctgacataaagaatcgcatcgccaagcgcagcaggaagctagtggactatgacagtgcccgccaccatctggaagctctgcagagctccaagaggaaggatgagagtcgaatctctaaggcagaagaagaatttcagaaagcacagaaagtgtttgaagagtttaacgttgacttacaagaagagttaccatcattatggtcaagacgagttggattttatgttaatactttcaaaaacgtctccagccttgaagccaagtttcataaggaaattgcggtgctttgccacaaactgtatgaagtgatgacaaaactgggtgaccagcacgccgacaaggccttcaccatccaaggagcgcccagtgattcgggtcctctccgcattgcaaagacaccatcaccgcctgaggagccttcacccctcccgagcccgacagcaagtccaaatcatacattagcacctgcgtctcccgcaccagcacggcctcggtcaccttcacagacaaggaaagggcctcctgtcccacctctacctaaagtcaccccgacaaaggaactgcagcaggagaacatcatcagtttctttgaggacaactttgttccagaaatcagtgtgacaacaccttcccagaatgaagtccctgaggtgaagaaagaggagactttgctggatctggactttgatcctttcaagcccgaggtgacacctgcaggttctgctggagtgacccactcacccatgtctcagacattgccctgggacctatggacgacaagcactgatttggtacagccggcttctggtggttcatttaatggattcacacagccccaggatacttcattattcacaatgcagacagaccagagtatgatctgcaacttggctgaatctgaacaggctccacccacagagccaaaagcagaggagcctctggctgctgtcacacctgccgttggtctggaccttggaatggacactcgggctgaggagccagtggaggaggcagtgatcatacctggagctgatgctgatgcagctgttggaaccttggtgtcagcagctgagggggccccaggagaggaagcagaggcggagaaggccactgtccctgccggggaaggagtaagtttagaggaggccaaaattggaactgaaaccactgagggtgcagagagtgcccaacctgaagcagaggagctcgaagcaacagtgcctcaggagaaggtcattccttcggtggtcatagagcctgcctccaaccatgaagaggaaggagaaaacgaaataactataggtgcagagcccaaggagaccaccgaggacgcggctcctccgggccccaccagcgagacacctgagctggctacggagcagaagcctatccaggaccctcagcccacaccttctgcaccagccatgggggctgctgaccagctagcatctgcaagggaggcctctcaggaattgcctcctggctttctctacaaggtggaaacactgcatgattttgaggcagcaaattctgatgaacttaccttacaaaggggtgatgtggtgctggtggtcccctcagattcagaagctgatcaggatgcaggctggctggtgggagtgaaggaatcagactggcttcagtacagagaccttgccacctacaaaggcctctttccagagaacttcacccgacgcttagattagggcaacaagtactgcaagaaggagctcagttacggggtttttaaaccttcatgaaaacctgaagagttcacttttgttattatgctcttaatgatttacagactgatgccagacaaaccttgggaagatgtatcaatggagcatgtgtgcaaaaaaatgtaagaggaaaaaaagtaaattaaggaaaaaatcctcactcattcccatgttgtcaataacaggtttgtttgtgctttgtccaagctgtggagactcttgtacttgatcccctcccaccaattctaaagtagctttctccagatcagactttaatttctctgcatcaggtgtatcgtattgagtggctgccctgcagaagatgtgatgaattatcctgtagtacaagattatcttattcccctgcccaggtgtgagcacgtgctctcgctccctttcaggtttactatgtttaaaactaaactgctgcaaaagttctcaatgttcttttccaacacatctatatatatatggacacacagtcacgcaagctagttcccatgactcctggatctatgtgtatgcagaaggctacatatacatagttgcttctttcctttccattgtagctctttgcctctcaattgtcattgatacatgcattgctcttattctgtctggcattacaattgcagttttgcctaatggcaaaaccagccatcccattgccaaaagagtcaacagtatctgtgtttgtactgtgcagttttcaggatgagatgacagatagcacgactacactgaggcaccctcagagaaggcagggcctgatttatctagctgtccagccgctgtggctggaggtaggctagttgggatgggcagctaagcagtcttctcttctgcctttatgagattgggtagaaagatggggcatattcatctacccccaaaagaacactataaaaacagctcctctatatttccacctctttctatttatgcaactcatcttcacagattgttctaaagtaaaatagatggtgtatgctgtatccacaaatcatctgtaacaattatgttttcagtgctgtgtcattccaaataaacctttggtaatcttcaacgattaccct

SEQ ID NO: 47601 - DNA, 3194 bp, Homo sapiens
ttctcccgctcctcccttgctcggccctctcctcctcctcccgctcctcctcccgctcctccgcgccgccgccagccccgctgcgcgctctgctcttcgcagctccccggacccgcagccatggccgacatcaagacgggcatcttcgccaagaacgtccagaagcgactcaaccgcgcgcaggaaaaggtcctccaaaagctggggaaagctgatgagacaaaagacgaacagttcgaagaatatgtccagaacttcaaacggcaagaagcagagggtaccagacttcagcgagaactccgaggatatttagcagcaatcaaaggcatgcaggaggcctccatgaagctcacagagtcgctgcatgaagtctatgagcctgactggtatgggcgggaagatgtgaaaatggttggtgagaaatgtgatgtgctgtgggaagacttccatcaaaaactcgtggatgggtccttgctaacactggatacctacctggggcaatttcctgacataaagaatcgcatcgccaagcgcagcaggaagctagtggactatgacagtgcccgccaccatctggaagctctgcagagctccaagaggaaggatgagagtcgaatctctaaggcagaagaagaatttcagaaagcacagaaagtgtttgaagagtttaacgttgacttacaagaagagttaccatcattatggtcaagacgagttggattttatgttaatactttcaaaaacgtctccagccttgaagccaagtttcataaggaaattgcggtgctttgccacaaactgtatgaagtgatgacaaaactgggtgaccagcacgccgacaaggccttcaccatccaaggagcgcccagtgattcgggtcctctccgcattgcaaagacaccatcaccgcctgaggagccttcacccctcccgagcccgacagcaagtccaaatcatacattagcacctgcgtctcccgcaccagcacggcctcggtcaccttcacagacaaggaaagggcctcctgtcccacctctacctaaagtcaccccgacaaaggaactgcagcaggagaacatcatcagtttctttgaggacaactttgttccagaaatcagtgtgacaacaccttcccagaatgaagtccctgaggtgaagaaagaggagactttgctggatctggactttgatcctttcaagcccgaggtgacacctgcaggttctgctggagtgacccactcacccatgtctcagacattgccctgggacctatggacgacaagcactgatttggtacagccggcttctggtggttcatttaatggattcacacagccccaggatacttcattattcacaatgcagacagaccagagtatgatctgcaacttgatcatacctggagctgatgctgatgcagctgttggaaccttggtgtcagcagctgagggggccccaggagaggaagcagaggcggagaaggccactgtccctgccggggaaggagtaagtttagaggaggccaaaattggaactgaaaccactgagggtgcagagagtgcccaacctgaagcagaggagctcgaagcaacagtgcctcaggagaaggtcattccttcggtggtcatagagcctgcctccaaccatgaagaggaaggagaaaacgaaataactataggtgcagagcccaaggagaccaccgaggacgcggctcctccgggccccaccagcgagacacctgagctggctacggagcagaagcctatccaggaccctcagcccacaccttctgcaccagccatgggggctgctgaccagctagcatctgcaagggaggcctctcaggaattgcctcctggctttctctacaaggtggaaacactgcatgattttgaggcagcaaattctgatgaacttaccttacaaaggggtgatgtggtgctggtggtcccctcagattcagaagctgatcaggatgcaggctggctggtgggagtgaaggaatcagactggcttcagtacagagaccttgccacctacaaaggcctctttccagagaacttcacccgacgcttagattagggcaacaagtactgcaagaaggagctcagttacggggtttttaaaccttcatgaaaacctgaagagttcacttttgttattatgctcttaatgatttacagactgatgccagacaaaccttgggaagatgtatcaatggagcatgtgtgcaaaaaaatgtaagaggaaaaaaagtaaattaaggaaaaaatcctcactcattcccatgttgtcaataacaggtttgtttgtgctttgtccaagctgtggagactcttgtacttgatcccctcccaccaattctaaagtagctttctccagatcagactttaatttctctgcatcaggtgtatcgtattgagtggctgccctgcagaagatgtgatgaattatcctgtagtacaagattatcttattcccctgcccaggtgtgagcacgtgctctcgctccctttcaggtttactatgtttaaaactaaactgctgcaaaagttctcaatgttcttttccaacacatctatatatatatggacacacagtcacgcaagctagttcccatgactcctggatctatgtgtatgcagaaggctacatatacatagttgcttctttcctttccattgtagctctttgcctctcaattgtcattgatacatgcattgctcttattctgtctggcattacaattgcagttttgcctaatggcaaaaccagccatcccattgccaaaagagtcaacagtatctgtgtttgtactgtgcagttttcaggatgagatgacagatagcacgactacactgaggcaccctcagagaaggcagggcctgatttatctagctgtccagccgctgtggctggaggtaggctagttgggatgggcagctaagcagtcttctcttctgcctttatgagattgggtagaaagatggggcatattcatctacccccaaaagaacactataaaaacagctcctctatatttccacctctttctatttatgcaactcatcttcacagattgttctaaagtaaaatagatggtgtatgctgtatccacaaatcatctgtaacaattatgttttcagtgctgtgtcattccaaataaacctttggtaatcttcaacgattaccct

SEQ ID NO: 47602 - DNA, 3068 bp, Homo sapiens
tcgagctcggtccctggtttactcgccaagaacgtcagaacgactcaagtgcgcgcagaaaaggtcctccaaaagctggggaaagctgatgagacaaaagacgaacagttcgaagaatatgtccagaacttcaaacggcaagaagcagagggtaccagacttcagcgagaactccgaggatatttagcagcaatcaaaggcatgcaggaggcctccatgaagctcacagagtcgctgcatgaagtctatgagcctgactggtatgggcgggaagatgtgaaaatggttggtgagaaatgtgatgtgctgtgggaagacttccatcaaaaactcgtggatgggtccttgctaacactggatacctacctggggcaatttcctgacataaagaatcgcatcgccaagcgcagcaggaagctagtggactatgacagtgcccgccaccatctggaagctctgcagagctccaagaggaaggatgagagtcgaatctctaaggcagaagaagaatttcagaaagcacagaaagtgtttgaagagtttaacgttgacttacaagaagagttaccatcattatggtcaagacgagttggattttatgttaatactttcaaaaacgtctccagccttgaagccaagtttcataaggaaattgcggtgctttgccacaaactgtatgaagtgatgacaaaactgggtgaccagcacgccgacaaggccttcaccatccaaggagcgcccagtgattcgggtcctctccgcattgcaaagacaccatcaccgcctgaggagccttcacccctcccgagcccgacagcaagtccaaatcatacattagcacctgcgtctcccgcaccagcacggcctcggtcaccttcacagacaaggaaagggcctcctgtcccacctctacctaaagtcaccccgacaaaggaactgcagcaggagaacatcatcagtttctttgaggacaactttgttccagaaatcagtgtgacaacaccttcccagaatgaagtccctgaggtgaagaaagaggagactttgctggatctggactttgatcctttcaagcccgaggtgacacctgcaggttctgctggagtgacccactcacccatgtctcagacattgccctgggacctatggacgacaagcactgatttggtacagccggcttctggtggttcatttaatggattcacacagccccaggatacttcattattcacaatgcagacagaccagagtatgatctgcaacttgatcatacctggagctgatgctgatgcagctgttggaaccttggtgtcagcagctgagggggccccaggagaggaagcagaggcggagaaggccactgtccctgccggggaaggagtaagtttagaggaggccaaaattggaactgaaaccactgagggtgcagagagtgcccaacctgaagcagaggagctcgaagcaacagtgcctcaggagaaggtcattccttcggtggtcatagagcctgcctccaaccatgaagaggaaggagaaaacgaaataactataggtgcagagcccaaggagaccaccgaggacgcggctcctccgggccccaccagcgagacacctgagctggctacggagcagaagcctatccaggaccctcagcccacaccttctgcaccagccatgggggctgctgaccagctagcatctgcaagggaggcctctcaggaattgcctcctggctttctctacaaggtggaaacactgcatgattttgaggcagcaaattctgatgaacttaccttacaaaggggtgatgtggtgctggtggtcccctcagattcagaagctgatcaggatgcaggctggctggtgggagtgaaggaatcagactggcttcagtacagagaccttgccacctacaaaggcctctttccagagaacttcacccgacgcttagattagggcaacaagtactgcaagaaggagctcagttacggggtttttaaaccttcatgaaaacctgaagagttcacttttgttattatgctcttaatgatttacagactgatgccagacaaaccttgggaagatgtatcaatggagcatgtgtgcaaaaaaatgtaagaggaaaaaaagtaaattaaggaaaaaatcctcactcattcccatgttgtcaataacaggtttgtttgtgctttgtccaagctgtggagactcttgtacttgatcccctcccaccaattctaaagtagctttctccagatcagactttaatttctctgcatcaggtgtatcgtattgagtggctgccctgcagaagatgtgatgaattatcctgtagtacaagattatcttattcccctgcccaggtgtgagcacgtgctctcgctccctttcaggtttactatgtttaaaactaaactgctgcaaaagttctcaatgttcttttccaacacatctatatatatatggacacacagtcacgcaagctagttcccatgactcctggatctatgtgtatgcagaaggctacatatacatagttgcttctttcctttccattgtagctctttgcctctcaattgtcattgatacatgcattgctcttattctgtctggcattacaattgcagttttgcctaatggcaaaaccagccatcccattgccaaaagagtcaacagtatctgtgtttgtactgtgcagttttcaggatgagatgacagatagcacgactacactgaggcaccctcagagaaggcagggcctgatttatctagctgtccagccgctgtggctggaggtaggctagttgggatgggcagctaagcagtcttctcttctgcctttatgagattgggtagaaagatggggcatattcatctacccccaaaagaacactataaaaacagctcctctatatttccacctctttctatttatgcaactcatcttcacagattgttctaaagtaaaatagatggtgtatgctgtatccacaaatcatctgtaacaattatgttttcagtgctgtgtcattccaaataaacctttggtaatcttcaacgattaccct

SEQ ID NO: 47603 - DNA, 476 bp, Homo sapiens
ttctttgaagatctgtgctggtctttcggtcatcctgccactatccccaagcagcttccatatctgtcatttcagggcagcaaatctgctgacattaaaagtaaaccaactaagttttcaaacacatcttagtccccaaatccttcctccagtcatgcagatcaagtaaatgtcttatctttatgaagtcgtggttggcttcagcttctccaattctggcgtttgattctagatagaaggttaagtaccccctgttgcacatcagacttgcatcaattcaatccatttgctgttaaagaagcatcacacttcccagaaaggtttttttcccctttagccacataccaagccagaatcagacaaatgcagcctgaagtatttttagttattattcacatttgtcaacagggacagtgacaactcaccagtccgttctggggcagaacttaaggaatggaactctcgtatctatattg

SEQ ID NO: 47604 - DNA, 832 bp, Homo sapiens
tctctagaaaaaaaaaaaaaaaaaaaaaaaagcagattctaaactcacagtgctgctgctggctgcctgagcttgtgtggctttggacagatgacttaaccactctgtgaagatggtatctgatgcacaggaaatgctccaacgttggctcttgtcgtcatctgtgcccatgtctccctcagcagcctcctgactggccttctccagtctcctggtttggattgaggctccctagaccctacctttctgagactggtatctagtcaggttactctgggagatctccaccccccactgcccagagagcaggttctgagctcttcagtctctccaccttctggccccggctgacaccaatccctgccacttctcctggggtccccaaacatctgtggtacttttgtctttcttgcccattggtgttccccactctgcagaacaaccttctctccaggtcaccactgatcgcaatcgcgctctcctttcaaggcccagatcaggtgtcacctgacctttgctgtcctcagatcacacctccctgtagcgactggctcgccagtgtccctctctgaccgagctgtgcactcctccagggcagcactgtcagggtctcccccagacccttggttgtgattctctctccttgtcctgaatctcagttttcctgatacatgggatgctacctgaaggcaggtttcaactttcaatctttttttttgttttttgggtgaggcaggagaattacttgaacccgggaggtggaggttgcagtgagctgagattgcgccactgtactctagcctgggtgacagagtgagactccaatctctag

SEQ ID NO: 47605 - DNA, 283 bp, Homo sapiens
cagattctgaagaacagtccaggtttgggagggtagagaagagagaggctttaaagatgagaagaatcatttaaatcatagggccagagacttcagttagcaggtgatctttatatttacaggacagtagaaagtccagcttgtctagaataaaaggaaggggagacatgggaaggaaagttagtaggaggggggcaggatccaaaaacgagcaattgaaaaacaaagtgaaaagttaggttttcctgtggtaagaaatagggagccattgacagtttatact

SEQ ID NO: 47606 - DNA, 3087 bp, Homo sapiens
tgcgtgcctggagcagcagcgtctccagggacaggcagccaccatgagcctcagtgaggagcaggcccggagctttctggaccagaaccccgattttgcccgccagtactttgggaagaaactgagccctgagaatgttggccgcggctgcgaggacgggtgcccgccggactgcgacagcctccgggacctctgccaggtggaggagagcacggcgctgctggagctggtgcaggatatgcaggagagcatcaacatggagcgcgtggtcttcaaggtcctgcggcgcctctgcaccctcctgcaggccgaccgctgcagcctcttcatgtaccgccagcgcaacggcgtggccgagctggccaccaggcttttcagcgtgcagccggacagcgtcctggaggactgcctggtgccccccgactccgagatcgtcttcccactggacatcggggtcgtgggccacgtggctcagaccaaaaagatggtgaacgtcgaggacgtggccgagtgccctcacttcagctcatttgctgacgagctcactgactacaagacaaagaatatgctggccacacccatcatgaatggcaaagacgtcgtggcggtgatcatggcagtgaacaagctcaacggcccattcttcaccagcgaagacgaagatgtgttcttgaagtacctgaattttgccacgttgtacctgaagatctatcacctgagctacctccacaactgcgagacgcgccgcggccaggtgctgctgtggtcggccaacaaggtgtttgaggagctgacggacatcgagaggcagttccacaaggccttctacacggtgcgggcctacctcaactgcgagcggtactccgtgggcctcctggacatgaccaaggagaaggaattttttgacgtgtggtctgtgctgatgggagagtcccagccgtactcgggcccacgcacgcctgatggccgggaaattgtcttctacaaagtgatcgactacatcctccacggcaaggaggagatcaaggtcattcccacaccctcagccgatcactgggccctggccagcggccttccaagctacgtggcagaaagcggctttatttgtaacatcatgaatgcttccgctgacgaaatgttcaaatttcaggaaggggccctggacgactccgggtggctcatcaagaatgtgctgtccatgcccatcgtcaacaagaaggaggagattgtgggagtcgccacattttacaacaggaaagacgggaagccctttgacgaacaggacgaggttctcatggagtccctgacacagttcctgggctggtcagtgatgaacaccgacacctacgacaagatgaacaagctggagaaccgcaaggacatcgcacaggacatggtcctttaccacgtgaagtgcgacagggacgagatccagctcatcctgccaaccagagcgcgcctggggaaggagcctgctgactgcgatgaggacgagctgggcgaaatcctgaaggaggagctgccagggcccaccacatttgacatctacgaattccacttctctgacctggagtgcaccgaactggacctggtcaaatgtggcatccagatgtactacgagctgggcgtggtccgaaagttccagatcccccaggaggtcctggtgcggttcctgttctccatcagcaaagggtaccggagaatcacctaccacaactggcgccacggcttcaacgtggcccagacgatgttcacgctgctcatgaccggcaaactgaagagctactacacggacctggaggccttcgccatggtgacagccggcctgtgccatgacatcgaccaccgcggcaccaacaacctgtaccagatgaagtcccagaaccccttggctaagctccacggctcctcgattttggagcggcaccacctggagtttgggaagttcctgctctcggaggagaccctgaacatctaccagaacctgaaccggcggcagcacgagcacgtgatccacctgatggacatcgccatcatcgccacggacctggccctgtacttcaagaagagagcgatgtttcagaagatcgtggatgagtccaagaactaccaggacaagaagagctgggtggagtacctgtccctggagacgacccggaaggagatcgtcatggccatgatgatgacagcctgcgacctgtctgccatcaccaagccctgggaagtccagagcaaggtcgcacttctcgtggctgctgagttctgggagcaaggtgacttggaaaggacagtcttggatcagcagcccattcctatgatggaccggaacaaggcggccgagctccccaagctgcaagtgggcttcatcgacttcgtgtgcacattcgtgtacaaggagttctctcgtttccacgaagagatcctgcccatgttcgaccgactgcagaacaataggaaagagtggaaggcgctggctgatgagtatgaggccaaagtgaaggctctggaggagaaggaggaggaggagagggtggcagccaagaaagtaggcacagaaatttgcaatggcggcccagcacccaagtcttcaacctgctgtatcctgtgagcactggtcccgtggggaccctatggctccctcaatcttcacccactaggatttgggttctgcctgtggctatttgctacaagaggttaggaagcccaagaaaatgactgaagatcattctggatattttaattttttttttttttttttttttgagatggagtcttgctctgtcacccaggctggagtgccgtggcacgatctcagctcactgcaacctccacctcccaggttcaagcgattctcgtgcctcagcctcctgagtagctgggactacaggcgcccaccaccacacatggctaatttttgtattttcagtacagatggggtttcaccatattgggcaggctggtctcgaactcctgacctcaggtgatcacccgcctcagcttcctgaagtgctgggattacaggcatgagccaccacgcccagcctgtttttataaactgaagccaactgtgaataaactgtagcctac

SEQ ID NO: 47607 - DNA, 3732 bp, Homo sapiens
agcggccgccgcgagtgtgaggaggcagggcctggtggggcctgggtctgggccttgaccaaggaggcagagaaaggtggcccaaggagggccctggggtgagtctgagcctggtggcagcgctgacccagcaaccaggggcctgtgcagcgggatgtcctgagtggggtctggccaggacctcgtggagtgcgtcagcaatgcttcactctcagacgcttggcggaggccacaggcggcctgacgtgcggaaaccacggcccgatgttctcaaagccctgctcgccgcaggtggttctggagcagccgggcggaggaagggctggtcggatgtttgcctgtcaagctcaaagcgacagattccactttccactcgtccactcctgagtgatcagggacacgaccgcagcctcgaggcctcaccgccagccagctcccgggccccacaagctcagatgaaacctggccacggagccaccaatcagggtctgtgccaggctccacggctgggcaggtggtcagatcagggagcgcacctgtgtcaggcttgagttaaacccctgctgctgtggtcagaccggcgtgagggtgggagtggccacaggccacaggtgtgcccctccctccaggtgctgctgtggtcggccaacaaggtgtttgaggagctgacggacatcgagaggcagttccacaaggccttctacacggtgcgggcctacctcaactgcgagcggtactccgtgggcctcctggacatgaccaaggagaaggaattttttgacgtgtggtctgtgctgatgggagagtcccagccgtactcgggcccacgcacgcctgatggccgggaaattgtcttctacaaagtgatcgactacatcctccacggcaaggaggagatcaaggtcattcccacaccctcagccgatcactgggccctggccagcggccttccaagctacgtggcagaaagcggctttatttgtaacatcatgaatgcttccgctgacgaaatgttcaaatttcaggaaggggccctggacgactccgggtggctcatcaagaatgtgctgtccatgcccatcgtcaacaagaaggaggagattgtgggagtcgccacattttacaacaggaaagacgggaagccctttgacgaacaggacgaggttctcatggagtccctgacacagttcctgggctggtcagtgatgaacaccgacacctacgacaagatgaacaagctggagaaccgcaaggacatcgcacaggacatggtcctttaccacgtgaagtgcgacagggacgagatccagctcatcctgccaaccagagcgcgcctggggaaggagcctgctgactgcgatgaggacgagctgggcgaaatcctgaaggaggagctgccagggcccaccacatttgacatctacgaattccacttctctgacctggagtgcaccgaactggacctggtcaaatgtggcatccagatgtactacgagctgggcgtggtccgaaagttccagatcccccaggaggtcctggtgcggttcctgttctccatcagcaaagggtaccggagaatcacctaccacaactggcgccacggcttcaacgtggcccagacgatgttcacgctgctcatgaccggcaaactgaagagctactacacggacctggaggccttcgccatggtgacagccggcctgtgccatgacatcgaccaccgcggcaccaacaacctgtaccagatgaagtcccagaaccccttggctaagctccacggctcctcgattttggagcggcaccacctggagtttgggaagttcctgctctcggaggaggttggtatactcaccctcggtttctgctgtgggcgctggggacgcagcgtccgcaggcacagggccgtatcctgcggagacttctgatgcagcgggtgagcactgggtgtgtgagcactgggggagggcggcagagaaggcggagggccgaggctgagggcaggtgcatcggaggccctgggaaaacgcttgtggggaagacaactggaaaggcccctcatggggtggggtggaagccgaaggggaagcggcccgggacccaccagcgggggaatgaagggcagccgagccctgagcggcccccaaggacctggacactcagtggacccctccctgcgctccccggtggtgacctctgaggccatctgcgtcccaagccgacgatggagccgctggtggagagctgggcaccctgaggagggccctgagcagcaggcgattaggggtcccgcccaccgagggcccgagggcgggggcgtgagaggcacaggcagccgaggcgaaggggcggggtccccgggcaccctgagaggtggccgcaggcgcctgacgcgctgggcataacctccgcagaccctgaacatctaccagaacctgaaccggcggcagcacgagcacgtgatccacctgatggacatcgccatcatcgccacggacctggccctgtacttcaagaagagagcgatgtttcagaagatcgtggatgagtccaagaactaccaggacaagaagagctgggtggagtacctgtccctggagacgacccggaaggagatcgtcatggccatgatgatgacagcctgcgacctgtctgccatcaccaagccctgggaagtccagagcaaggtcgcacttctcgtggctgctgagttctgggagcaaggtgacttggaaaggacagtcttggatcagcagcccattcctatgatggaccggaacaaggcggccgagctccccaagctgcaagtgggcttcatcgacttcgtgtgcacattcgtgtacaaggagttctctcgtttccacgaagagatcctgcccatgttcgaccgactgcagaacaataggaaagagtggaaggcgctggctgatgagtatgaggccaaagtgaaggctctggaggagaaggaggaggaggagagggtggcagccaagaaagtaggcacagaaatttgcaatggcggcccagcacccaagtcttcaacctgctgtatcctgtgagcactggtcccgtggggaccctatggctccctcaatcttcacccactaggatttgggttctgcctgtggctatttgctacaagaggttaggaagcccaagaaaatgactgaagatcattctggatattttaattttttttttttttttttttttgagatggagtcttgctctgtcacccaggctggagtgccgtggcacgatctcagctcactgcaacctccacctcccaggttcaagcgattctcgtgcctcagcctcctgagtagctgggactacaggcgcccaccaccacacatggctaatttttgtattttcagtacagatggggtttcaccatattgggcaggctggtctcgaactcctgacctcaggtgatcacccgcctcagcttcctgaagtgctgggattacaggcatgagccaccacgcccagcctgtttttataaactgaagccaactgtgaataaactgtagcctacattactcatccatttttggatagttaccactgggagacctttgaaaagggtccatgaactctgaaatcactgagaacatttgcagccacacatgtacatatgtgtacacaggtagacagatggacacaggccgtttctcatccagtttaggaaaacacacatgctcaggaattcagaataaaataaacagaaaacta

SEQ ID NO: 47608 - DNA, 3658 bp, Homo sapiens
agcggccgccgcgagtgtgaggaggcagggcctggtggggcctgggtctgggccttgaccaaggaggcagagaaaggtggcccaaggagggccctggggtgagtctgagcctggtggcagcgctgacccagcaaccaggggcctgtgcagcgggatgtcctgagtggggtctggccaggacctcgtggagtgcgtcagcaatgcttcactctcagacgcttggcggaggccacaggcggcctgacgtgcggaaaccacggcccgatgttctcaaagccctgctcgccgcaggtggttctggagcagccgggcggaggaagggctggtcggatgtttgcctgtcaagctcaaagcgacagattccactttccactcgtccactcctgagtgatcagggacacgaccgcagcctcgaggcctcaccgccagccagctcccgggccccacaagctcagatgaaacctgtgtcaggcttgagttaaacccctgctgctgtggtcagaccggcgtgagggtgggagtggccacaggccacaggtgtgcccctccctccaggtgctgctgtggtcggccaacaaggtgtttgaggagctgacggacatcgagaggcagttccacaaggccttctacacggtgcgggcctacctcaactgcgagcggtactccgtgggcctcctggacatgaccaaggagaaggaattttttgacgtgtggtctgtgctgatgggagagtcccagccgtactcgggcccacgcacgcctgatggccgggaaattgtcttctacaaagtgatcgactacatcctccacggcaaggaggagatcaaggtcattcccacaccctcagccgatcactgggccctggccagcggccttccaagctacgtggcagaaagcggctttatttgtaacatcatgaatgcttccgctgacgaaatgttcaaatttcaggaaggggccctggacgactccgggtggctcatcaagaatgtgctgtccatgcccatcgtcaacaagaaggaggagattgtgggagtcgccacattttacaacaggaaagacgggaagccctttgacgaacaggacgaggttctcatggagtccctgacacagttcctgggctggtcagtgatgaacaccgacacctacgacaagatgaacaagctggagaaccgcaaggacatcgcacaggacatggtcctttaccacgtgaagtgcgacagggacgagatccagctcatcctgccaaccagagcgcgcctggggaaggagcctgctgactgcgatgaggacgagctgggcgaaatcctgaaggaggagctgccagggcccaccacatttgacatctacgaattccacttctctgacctggagtgcaccgaactggacctggtcaaatgtggcatccagatgtactacgagctgggcgtggtccgaaagttccagatcccccaggaggtcctggtgcggttcctgttctccatcagcaaagggtaccggagaatcacctaccacaactggcgccacggcttcaacgtggcccagacgatgttcacgctgctcatgaccggcaaactgaagagctactacacggacctggaggccttcgccatggtgacagccggcctgtgccatgacatcgaccaccgcggcaccaacaacctgtaccagatgaagtcccagaaccccttggctaagctccacggctcctcgattttggagcggcaccacctggagtttgggaagttcctgctctcggaggaggttggtatactcaccctcggtttctgctgtgggcgctggggacgcagcgtccgcaggcacagggccgtatcctgcggagacttctgatgcagcgggtgagcactgggtgtgtgagcactgggggagggcggcagagaaggcggagggccgaggctgagggcaggtgcatcggaggccctgggaaaacgcttgtggggaagacaactggaaaggcccctcatggggtggggtggaagccgaaggggaagcggcccgggacccaccagcgggggaatgaagggcagccgagccctgagcggcccccaaggacctggacactcagtggacccctccctgcgctccccggtggtgacctctgaggccatctgcgtcccaagccgacgatggagccgctggtggagagctgggcaccctgaggagggccctgagcagcaggcgattaggggtcccgcccaccgagggcccgagggcgggggcgtgagaggcacaggcagccgaggcgaaggggcggggtccccgggcaccctgagaggtggccgcaggcgcctgacgcgctgggcataacctccgcagaccctgaacatctaccagaacctgaaccggcggcagcacgagcacgtgatccacctgatggacatcgccatcatcgccacggacctggccctgtacttcaagaagagagcgatgtttcagaagatcgtggatgagtccaagaactaccaggacaagaagagctgggtggagtacctgtccctggagacgacccggaaggagatcgtcatggccatgatgatgacagcctgcgacctgtctgccatcaccaagccctgggaagtccagagcaaggtcgcacttctcgtggctgctgagttctgggagcaaggtgacttggaaaggacagtcttggatcagcagcccattcctatgatggaccggaacaaggcggccgagctccccaagctgcaagtgggcttcatcgacttcgtgtgcacattcgtgtacaaggagttctctcgtttccacgaagagatcctgcccatgttcgaccgactgcagaacaataggaaagagtggaaggcgctggctgatgagtatgaggccaaagtgaaggctctggaggagaaggaggaggaggagagggtggcagccaagaaagtaggcacagaaatttgcaatggcggcccagcacccaagtcttcaacctgctgtatcctgtgagcactggtcccgtggggaccctatggctccctcaatcttcacccactaggatttgggttctgcctgtggctatttgctacaagaggttaggaagcccaagaaaatgactgaagatcattctggatattttaattttttttttttttttttttttgagatggagtcttgctctgtcacccaggctggagtgccgtggcacgatctcagctcactgcaacctccacctcccaggttcaagcgattctcgtgcctcagcctcctgagtagctgggactacaggcgcccaccaccacacatggctaatttttgtattttcagtacagatggggtttcaccatattgggcaggctggtctcgaactcctgacctcaggtgatcacccgcctcagcttcctgaagtgctgggattacaggcatgagccaccacgcccagcctgtttttataaactgaagccaactgtgaataaactgtagcctacattactcatccatttttggatagttaccactgggagacctttgaaaagggtccatgaactctgaaatcactgagaacatttgcagccacacatgtacatatgtgtacacaggtagacagatggacacaggccgtttctcatccagtttaggaaaacacacatgctcaggaattcagaataaaataaacagaaaacta

SEQ ID NO: 47609 - DNA, 3223 bp, Homo sapiens
atgactgtgactgcggccagggcggctccacgacggtgactgcggccagggcggctccacgacggtgactgcggccagggcggctccacgacggtgactggggtcagggcaggagagtgtggaggccagtgaggagggtccacacccatcggtgaggcaggagtcagggtgctgctgtggtcggccaacaaggtgtttgaggagctgacggacatcgagaggcagttccacaaggccttctacacggtgcgggcctacctcaactgcgagcggtactccgtgggcctcctggacatgaccaaggagaaggaattttttgacgtgtggtctgtgctgatgggagagtcccagccgtactcgggcccacgcacgcctgatggccgggaaattgtcttctacaaagtgatcgactacatcctccacggcaaggaggagatcaaggtcattcccacaccctcagccgatcactgggccctggccagcggccttccaagctacgtggcagaaagcggctttgaaggggccctggacgactccgggtggctcatcaagaatgtgctgtccatgcccatcgtcaacaagaaggaggagattgtgggagtcgccacattttacaacaggaaagacgggaagccctttgacgaacaggacgaggttctcatggagtccctgacacagttcctgggctggtcagtgatgaacaccgacacctacgacaagatgaacaagctggagaaccgcaaggacatcgcacaggacatggtcctttaccacgtgaagtgcgacagggacgagatccagctcatcctgccaaccagagcgcgcctggggaaggagcctgctgactgcgatgaggacgagctgggcgaaatcctgaaggaggagctgccagggcccaccacatttgacatctacgaattccacttctctgacctggagtgcaccgaactggacctggtcaaatgtggcatccagatgtactacgagctgggcgtggtccgaaagttccagatcccccaggaggtcctggtgcggttcctgttctccatcagcaaagggtaccggagaatcacctaccacaactggcgccacggcttcaacgtggcccagacgatgttcacgctgctcatgaccggcaaactgaagagctactacacggacctggaggccttcgccatggtgacagccggcctgtgccatgacatcgaccaccgcggcaccaacaacctgtaccagatgaagtcccagaaccccttggctaagctccacggctcctcgattttggagcggcaccacctggagtttgggaagttcctgctctcggaggaggttggtatactcaccctcggtttctgctgtgggcgctggggacgcagcgtccgcaggcacagggccgtatcctgcggagacttctgatgcagcgggtgagcactgggtgtgtgagcactgggggagggcggcagagaaggcggagggccgaggctgagggcaggtgcatcggaggccctgggaaaacgcttgtggggaagacaactggaaaggcccctcatggggtggggtggaagccgaaggggaagcggcccgggacccaccagcgggggaatgaagggcagccgagccctgagcggcccccaaggacctggacactcagtggacccctccctgcgctccccggtggtgacctctgaggccatctgcgtcccaagccgacgatggagccgctggtggagagctgggcaccctgaggagggccctgagcagcaggcgattaggggtcccgcccaccgagggcccgagggcgggggcgtgagaggcacaggcagccgaggcgaaggggcggggtccccgggcaccctgagaggtggccgcaggcgcctgacgcgctgggcataacctccgcagaccctgaacatctaccagaacctgaaccggcggcagcacgagcacgtgatccacctgatggacatcgccatcatcgccacggacctggccctgtacttcaagaagagagcgatgtttcagaagatcgtggatgagtccaagaactaccaggacaagaagagctgggtggagtacctgtccctggagacgacccggaaggagatcgtcatggccatgatgatgacagcctgcgacctgtctgccatcaccaagccctgggaagtccagagcaaggtcgcacttctcgtggctgctgagttctgggagcaaggtgacttggaaaggacagtcttggatcagcagcccattcctatgatggaccggaacaaggcggccgagctccccaagctgcaagtgggcttcatcgacttcgtgtgcacattcgtgtacaaggagttctctcgtttccacgaagagatcctgcccatgttcgaccgactgcagaacaataggaaagagtggaaggcgctggctgatgagtatgaggccaaagtgaaggctctggaggagaaggaggaggaggagagggtggcagccaagaaagtaggcacagaaatttgcaatggcggcccagcacccaagtcttcaacctgctgtatcctgtgagcactggtcccgtggggaccctatggctccctcaatcttcacccactaggatttgggttctgcctgtggctatttgctacaagaggttaggaagcccaagaaaatgactgaagatcattctggatattttaattttttttttttttttttttttgagatggagtcttgctctgtcacccaggctggagtgccgtggcacgatctcagctcactgcaacctccacctcccaggttcaagcgattctcgtgcctcagcctcctgagtagctgggactacaggcgcccaccaccacacatggctaatttttgtattttcagtacagatggggtttcaccatattgggcaggctggtctcgaactcctgacctcaggtgatcacccgcctcagcttcctgaagtgctgggattacaggcatgagccaccacgcccagcctgtttttataaactgaagccaactgtgaataaactgtagcctacattactcatccatttttggatagttaccactgggagacctttgaaaagggtccatgaactctgaaatcactgagaacatttgcagccacacatgtacatatgtgtacacaggtagacagatggacacaggccgtttctcatccagtttaggaaaacacacatgctcaggaattcagaataaaataaacagaaaacta

SEQ ID NO: 47610 - DNA, 1966 bp, Homo sapiens
agcggccgccgcgagtgtgaggaggcagggcctggtggggcctgggtctgggccttgaccaaggaggcagagaaaggtggcccaaggagggccctggggtgagtctgagcctggtggcagcgctgacccagcaaccaggggcctgtgcagcgggatgtcctgagtggggtctggccaggacctcgtggagtgcgtcagcaatgcttcactctcagacgcttggcggaggccacaggcggcctgacgtgcggaaaccacggcccgatgttctcaaagccctgctcgccgcaggtggttctggagcagccgggcggaggaagggctggtcggatgtttgcctgtcaagctcaaagcgacagattccactttccactcgtccactcctgagtgatcagggacacgaccgcagcctcgaggcctcaccgccagccagctcccgggccccacaagctcagatgaaacctggccacggagccaccaatcagggtctgtgccaggctccacggctgggcaggtggtcagatcagggagcgcacctgtgtcaggcttgagttaaacccctgctgctgtggtcagaccggcgtgagggtgggagtggccacaggccacaggtgtgcccctccctccaggtgctgctgtggtcggccaacaaggtgtttgaggagctgacggacatcgagaggcagttccacaaggccttctacacggtgcgggcctacctcaactgcgagcggtactccgtgggcctcctggacatgaccaaggagaaggaattttttgacgtgtggtctgtgctgatgggagagtcccagccgtactcgggcccacgcacgcctgatggccgggaaattgtcttctacaaagtgatcgactacatcctccacggcaaggaggagatcaaggtcattcccacaccctcagccgatcactgggccctggccagcggccttccaagctacgtggcagaaagcggctttatttgtaacatcatgaatgcttccgctgacgaaatgttcaaatttcaggaaggggccctggacgactccgggtggctcatcaagaatgtgctgtccatgcccatcgtcaacaagaaggaggagattgtgggagtcgccacattttacaacaggaaagacgggaagccctttgacgaacaggacgaggttctcatggagtccctgacacagttcctgggctggtcagtgatgaacaccgacacctacgacaagatgaacaagctggagaaccgcaaggacatcgcacaggacatggtcctttaccacgtgaagtgcgacagggacgagatccagctcatcctgccaaccagagcgcgcctggggaaggagcctgctgactgcgatgaggacgagctgggcgaaatcctgaaggaggagctgccagggcccaccacatttgacatctacgaattccacttctctgacctggagtgcaccgaactggacctggtcaaatgtggcatccagatgtactacgagctgggcgtggtccgaaagttccagatcccccaggaggtcctggtgcggttcctgttctccatcagcaaagggtaccggagaatcacctaccacaactggcgccacggcttcaacgtggcccagacgatgttcacgctgctcatgaccggcaaactgaagagctactacacggacctggaggccttcgccatggtgacagccggcctgtgccatgacatcgaccaccgcggcaccaacaacctgtaccagatgaaggtaggcacctcagggcgggcatgtgaattagccctaaatcaactccacgcccttgggatattaggcttcgcatagcaggctatgtagaaagtggagtccacggccaggccccgtactccagcactgtgggaggccaaggcgaggggaattgcttgagcccaggagttcgagaccagcctgggcaacatggcaagagctctcctctacaaaaactt

SEQ ID NO: 47611 - DNA, 506 bp, Homo sapiens
cgtgtgtgtgtgtgttctttcatgtgcacaccttgtgtttcttgtctcaacaacatcaccctgtccacccaactgggcaagttcttcactgttgggccacagggtacaagaggggagagtgaggctgagccaggggggcgtgtgagcagcctgggatacaggctggagcgccaggaatgacacatctcctcagagatgcctgaggtgtctgaggcttggcaggggatctggagagaagaaaggatgagaagcaagtgggggctgtggcaggccaacctccctcagcccacaatccctcccacagaaggaggagctgccagggcccaccacatttgacatctacgaattccacttctctgacctggagtgcaccgaactggacctggtcaaatgtggcatccagatgtactacgagctgggcgtggtccgaaagttccagatcccccaggaggtgggagacaccgcaggcgcatagtcaggtccctgaggccgcccaggacatgggg

SEQ ID NO: 47612 - DNA, 3284 bp, Homo sapiens
tgcgtgcctggagcagcagcgtctccagggacaggcagccaccatgagcctcagtgaggagcaggcccggagctttctggaccagaaccccgattttgcccgccagtactttgggaagaaactgagccctgagaatgttggccgcggctgcgaggacgggtgcccgccggactgcgacagcctccgggacctctgccaggtggaggagagcacggcgctgctggagctggtgcaggatatgcaggagagcatcaacatggagcgcgtggtcttcaaggtcctgcggcgcctctgcaccctcctgcaggccgaccgctgcagcctcttcatgtaccgccagcgcaacggcgtggccgagctggccaccaggcttttcagcgtgcagccggacagcgtcctggaggactgcctggtgccccccgactccgagatcgtcttcccactggacatcggggtcgtgggccacgtggctcagaccaaaaagatggtgaacgtcgaggacgtggccgagtgccctcacttcagctcatttgctgacgagctcactgactacaagacaaagaatatgctggccacacccatcatgaatggcaaagacgtcgtggcggtgatcatggcagtgaacaagctcaacggcccattcttcaccagcgaagacgaagatgtgttcttgaagtacctgaattttgccacgttgtacctgaagatctatcacctgagctacctccacaactgcgagacgcgccgcggccaggtgctgctgtggtcggccaacaaggtgtttgaggagctgacggacatcgagaggcagttccacaaggccttctacacggtgcgggcctacctcaactgcgagcggtactccgtgggcctcctggacatgaccaaggagaaggaattttttgacgtgtggtctgtgctgatgggagagtcccagccgtactcgggcccacgcacgcctgatggccgggaaattgtcttctacaaagtgatcgactacatcctccacggcaaggaggagatcaaggtcattcccacaccctcagccgatcactgggccctggccagcggccttccaagctacgtggcagaaagcggctttatttgtaacatcatgaatgcttccgctgacgaaatgttcaaatttcaggaaggggccctggacgactccgggtggctcatcaagaatgtgctgtccatgcccatcgtcaacaagaaggaggagattgtgggagtcgccacattttacaacaggaaagacgggaagccctttgacgaacaggacgaggttctcatggagtccctgacacagttcctgggctggtcagtgatgaacaccgacacctacgacaagatgaacaagctggagaaccgcaaggacatcgcacaggacatggtcctttaccacgtgaagtgcgacagggacgagatccagctcatcctgccaaccagagcgcgcctggggaaggagcctgctgactgcgatgaggacgagctgggcgaaatcctgaaggaggagctgccagggcccaccacatttgacatctacgaattccacttctctgacctggagtgcaccgaactggacctggtcaaatgtggcatccagatgtactacgagctgggcgtggtccgaaagttccagatcccccaggaggtcctggtgcggttcctgttctccatcagcaaagggtaccggagaatcacctaccacaactggcgccacggcttcaacgtggcccagacgatgttcacgctgctcatgaccggcaaactgaagagctactacacggacctggaggccttcgccatggtgacagccggcctgtgccatgacatcgaccaccgcggcaccaacaacctgtaccagatgaagtcccagaaccccttggctaagctccacggctcctcgattttggagcggcaccacctggagtttgggaagttcctgctctcggaggagaccctgaacatctaccagaacctgaaccggcggcagcacgagcacgtgatccacctgatggacatcgccatcatcgccacggacctggccctgtacttcaagaagagagcgatgtttcagaagatcgtggatgagtccaagaactaccaggacaagaagagctgggtggagtacctgtccctggagacgacccggaaggagatcgtcatggccatgatgatgacagcctgcgacctgtctgccatcaccaagccctgggaagtccagagcaaggtcgcacttctcgtggctgctgagttctgggagcaaggtgacttggaaaggacagtcttggatcagcagcccattcctatgatggaccggaacaaggcggccgagctccccaagctgcaagtgggcttcatcgacttcgtgtgcacattcgtgtacaaggagttctctcgtttccacgaagagatcctgcccatgttcgaccgactgcagaacaataggaaagagtggaaggcgctggctgatgagtatgaggccaaagtgaaggctctggaggagaaggaggaggaggagagggtggcagccaagaaagtaggcacagaaatttgcaatggcggcccagcacccaagtcttcaacctgctgtatcctgtgagcactggtcccgtggggaccctatggctccctcaatcttcacccactaggatttgggttctgcctgtggctatttgctacaagaggttaggaagcccaagaaaatgactgaagatcattctggatattttaattttttttttttttttttttttgagatggagtcttgctctgtcacccaggctggagtgccgtggcacgatctcagctcactgcaacctccacctcccaggttcaagcgattctcgtgcctcagcctcctgagtagctgggactacaggcgcccaccaccacacatggctaatttttgtattttcagtacagatggggtttcaccatattgggcaggctggtctcgaactcctgacctcaggtgatcacccgcctcagcttcctgaagtgctgggattacaggcatgagccaccacgcccagcctgtttttataaactgaagccaactgtgaataaactgtagcctacattactcatccatttttggatagttaccactgggagacctttgaaaagggtccatgaactctgaaatcactgagaacatttgcagccacacatgtacatatgtgtacacaggtagacagatggacacaggccgtttctcatccagtttaggaaaacacacatgctcaggaattcagaataaaataaacagaaaacta

SEQ ID NO: 47613 - DNA, 3404 bp, Homo sapiens
tgcgtgcctggagcagcagcgtctccagggacaggcagccaccatgagcctcagtgaggagcaggcccggagctttctggaccagaaccccgattttgcccgccagtactttgggaagaaactgagccctgagaatgttggccgcggctgcgaggacgggtgcccgccggactgcgacagcctccgggacctctgccaggtggaggagagcacggcgctgctggagctggtgcaggatatgcaggagagcatcaacatggagcgcgtggtcttcaaggtcctgcggcgcctctgcaccctcctgcaggccgaccgctgcagcctcttcatgtaccgccagcgcaacggcgtggccgagctggccaccaggcttttcagcgtgcagccggacagcgtcctggaggactgcctggtgccccccgactccgagatcgtcttcccactggacatcggggtcgtgggccacgtggctcagaccaaaaagatggtgaacgtcgaggacgtggccgagtgccctcacttcagctcatttgctgacgagctcactgactacaagacaaagaatatgctggccacacccatcatgaatggcaaagacgtcgtggcggtgatcatggcagtgaacaagctcaacggcccattcttcaccagcgaagacgaagatgtgttcttgaagtacctgaattttgccacgttgtacctgaagatctatcacctgagctacctccacaactgcgagacgcgccgcggccaggtgctgctgtggtcggccaacaaggtgtttgaggagctgacggacatcgagaggcagttccacaaggccttctacacggtgcgggcctacctcaactgcgagcggtactccgtgggcctcctggacatgaccaaggagaaggaattttttgacgtgtggtctgtgctgatgggagagtcccagccgtactcgggcccacgcacgcctgatggccgggaaattgtcttctacaaagtgatcgactacatcctccacggcaaggaggagatcaaggtcattcccacaccctcagccgatcactgggccctggccagcggccttccaagctacgtggcagaaagcggctttatttgtaacatcatgaatgcttccgctgacgaaatgttcaaatttcaggaaggggccctggacgactccgggtggctcatcaagaatgtgctgtccatgcccatcgtcaacaagaaggaggagattgtgggagtcgccacattttacaacaggaaagacgggaagccctttgacgaacaggacgaggttctcatggagtccctgacacagttcctgggctggtcagtgatgaacaccgacacctacgacaagatgaacaagctggagaaccgcaaggacatcgcacaggacatggtcctttaccacgtgaagtgcgacagggacgagatccagctcatcctgccaaccagagcgcgcctggggaaggagcctgctgactgcgatgaggacgagctgggcgaaatcctgaaggaggagctgccagggcccaccacatttgacatctacgaattccacttctctgacctggagtgcaccgaactggacctggtcaaatgtggcatccagatgtactacgagctgggcgtggtccgaaagttccagatcccccaggaggtcctggtgcggttcctgttctccatcagcaaagggtaccggagaatcacctaccacaactggcgccacggcttcaacgtggcccagacgatgttcacgctgctcatgaccggcaaactgaagagctactacacggacctggaggccttcgccatggtgacagccggcctgtgccatgacatcgaccaccgcggcaccaacaacctgtaccagatgaagtcccagaaccccttggctaagctccacggctcctcgattttggagcggcaccacctggagtttgggaagttcctgctctcggaggagaccctgaacatctaccagaacctgaaccggcggcagcacgagcacgtgatccacctgatggacatcgccatcatcgccacggacctggccctgtacttcaagaagagagcgatgtttcagaagatcgtggatgagtccaagaactaccaggacaagaagagctgggtggagtacctgtccctggagacgacccggaaggagatcgtcatggccatgatgatgacagcctgcgacctgtctgccatcaccaagccctgggaagtccagagcaaggtcgcacttctcgtggctgctgagttctgggagcaaggtgacttggaaaggacagtcttggatcagcagcccattcctatgatggaccggaacaaggcggccgagctccccaagctgcaagtgggcttcatcgacttcgtgtgcacattcgtgtacaaggagttctctcgtttccacgaagagatcctgcccatgttcgaccgactgcagaacaataggaaagagtggaaggcgctggctgatgagtatgaggccaaagtgaaggctctggaggagaaggaggaggaggagagggtggcagccaagaaagtaggcacagaaatttgcaatggcggcccagcacccaagtcttcaacctgctgtatcctgtgagcactggtcccgtggggaccctatggctccctcaatcttcacccactaggatttgggttctgcctgtggctatttgctacaagaggttaggaagcccaagaaaatgactgaagatcattctggatattttaattttttttttttttttttttttgagatggagtcttgctctgtcacccaggctggagtgccgtggcacgatctcagctcactgcaacctccacctcccaggttcaagcgattctcgtgcctcagcctcctgagtagctgggactacaggcgcccaccaccacacatggctaatttttgtattttcagtacagatggggtttcaccatattgggcaggctggtctcgaactcctgacctcaggtgatcacccgcctcagcttcctgaagtgctgggattacaggcatgagccaccacgcccagcctgtttttataaactgaagccaactgtgaataaactgtagcctacattactcatccatttttggatagttaccactgggagacctttgaaaagggtccatgaactctgaaatcactgagaacatttgcagccacacatgtacatatgtgtacacaggtagacagatggacacaggccgtttctcatccagtttaggaaaacacacatgctcaggaattcagaataaaataaacagaaaactacttgcccattatctgtggtaaaatgatagcggaagcacactacatttgacccatcagaaaattctgccagagaggtcaaggccatgagtaaagcggccatccaacttcagtggtctgagc

SEQ ID NO: 47614 - DNA, 3977 bp, Homo sapiens
agcggccgccgcgagtgtgaggaggcagggcctggtggggcctgggtctgggccttgaccaaggaggcagagaaaggtggcccaaggagggccctggggtgagtctgagcctggtggcagcgctgacccagcaaccaggggcctgtgcagcgggatgtcctgagtggggtctggccaggacctcgtggagtgcgtcagcaatgcttcactctcagacgcttggcggaggccacaggcggcctgacgtgcggaaaccacggcccgatgttctcaaagccctgctcgccgcaggtggttctggagcagccgggcggaggaagggctggtcggatgtttgcctgtcaagctcaaagcgacagattccactttccactcgtccactcctgagtgatcagggacacgaccgcagcctcgaggcctcaccgccagccagctcccgggccccacaagctcagatgaaacctggccacggagccaccaatcagggtctgtgccaggctccacggctgggcaggtggtcagatcagggagcgcacctgtgtcaggcttgagttaaacccctgctgctgtggtcagaccggcgtgagggtgggagtggccacaggccacaggtgtgcccctccctccaggtgctgctgtggtcggccaacaaggtgtttgaggagctgacggacatcgagaggcagttccacaaggccttctacacggtgcgggcctacctcaactgcgagcggtactccgtgggcctcctggacatgaccaaggagaaggaattttttgacgtgtggtctgtgctgatgggagagtcccagccgtactcgggcccacgcacgcctgatggccgggaaattgtcttctacaaagtgatcgactacatcctccacggcaaggaggagatcaaggtcattcccacaccctcagccgatcactgggccctggccagcggccttccaagctacgtggcagaaagcggctttatttgtaacatcatgaatgcttccgctgacgaaatgttcaaatttcaggaaggggccctggacgactccgggtggctcatcaagaatgtgctgtccatgcccatcgtcaacaagaaggaggagattgtgggagtcgccacattttacaacaggaaagacgggaagccctttgacgaacaggacgaggttctcatggagtccctgacacagttcctgggctggtcagtgatgaacaccgacacctacgacaagatgaacaagctggagaaccgcaaggacatcgcacaggacatggtcctttaccacgtgaagtgcgacagggacgagatccagctcatcctgccaaccagagcgcgcctggggaaggagcctgctgactgcgatgaggacgagctgggcgaaatcctgaaggaggagctgccagggcccaccacatttgacatctacgaattccacttctctgacctggagtgcaccgaactggacctggtcaaatgtggcatccagatgtactacgagctgggcgtggtccgaaagttccagatcccccaggaggtcctggtgcggttcctgttctccatcagcaaagggtaccggagaatcacctaccacaactggcgccacggcttcaacgtggcccagacgatgttcacgctgctcatgaccggcaaactgaagagctactacacggacctggaggccttcgccatggtgacagccggcctgtgccatgacatcgaccaccgcggcaccaacaacctgtaccagatgaagtcccagaaccccttggctaagctccacggctcctcgattttggagcggcaccacctggagtttgggaagttcctgctctcggaggaggttggtatactcaccctcggtttctgctgtgggcgctggggacgcagcgtccgcaggcacagggccgtatcctgcggagacttctgatgcagcgggtgagcactgggtgtgtgagcactgggggagggcggcagagaaggcggagggccgaggctgagggcaggtgcatcggaggccctgggaaaacgcttgtggggaagacaactggaaaggcccctcatggggtggggtggaagccgaaggggaagcggcccgggacccaccagcgggggaatgaagggcagccgagccctgagcggcccccaaggacctggacactcagtggacccctccctgcgctccccggtggtgacctctgaggccatctgcgtcccaagccgacgatggagccgctggtggagagctgggcaccctgaggagggccctgagcagcaggcgattaggggtcccgcccaccgagggcccgagggcgggggcgtgagaggcacaggcagccgaggcgaaggggcggggtccccgggcaccctgagaggtggccgcaggcgcctgacgcgctgggcataacctccgcagaccctgaacatctaccagaacctgaaccggcggcagcacgagcacgtgatccacctgatggacatcgccatcatcgccacggacctggccctgtacttcaagtgcgcgcgccttccgggagggggcgcctcgcggggcgggcgggtagcctgggacccccggcagatatgggggcgcacgggcggcacagcccgggggacgcagccccggattccgtccctgcccgccggccccgcgcaccccggatggggcctcgctcgggctccgcgcctccctgcagacgggcgcttggggcggggtctccacacttgctcccacctgcacctcccttgttccctgggttcaggaagagagcgatgtttcagaagatcgtggatgagtccaagaactaccaggacaagaagagctgggtggagtacctgtccctggagacgacccggaaggagatcgtcatggccatgatgatgacagcctgcgacctgtctgccatcaccaagccctgggaagtccagagcaaggtcgcacttctcgtggctgctgagttctgggagcaaggtgacttggaaaggacagtcttggatcagcagcccattcctatgatggaccggaacaaggcggccgagctccccaagctgcaagtgggcttcatcgacttcgtgtgcacattcgtgtacaaggagttctctcgtttccacgaagagatcctgcccatgttcgaccgactgcagaacaataggaaagagtggaaggcgctggctgatgagtatgaggccaaagtgaaggctctggaggagaaggaggaggaggagagggtggcagccaagaaagtaggcacagaaatttgcaatggcggcccagcacccaagtcttcaacctgctgtatcctgtgagcactggtcccgtggggaccctatggctccctcaatcttcacccactaggatttgggttctgcctgtggctatttgctacaagaggttaggaagcccaagaaaatgactgaagatcattctggatattttaattttttttttttttttttttttgagatggagtcttgctctgtcacccaggctggagtgccgtggcacgatctcagctcactgcaacctccacctcccaggttcaagcgattctcgtgcctcagcctcctgagtagctgggactacaggcgcccaccaccacacatggctaatttttgtattttcagtacagatggggtttcaccatattgggcaggctggtctcgaactcctgacctcaggtgatcacccgcctcagcttcctgaagtgctgggattacaggcatgagccaccacgcccagcctgtttttataaactgaagccaactgtgaataaactgtagcctacattactcatccatttttggatagttaccactgggagacctttgaaaagggtccatgaactctgaaatcactgagaacatttgcagccacacatgtacatatgtgtacacaggtagacagatggacacaggccgtttctcatccagtttaggaaaacacacatgctcaggaattcagaataaaataaacagaaaacta

SEQ ID NO: 47615 - DNA, 2216 bp, Homo sapiens
tggtggcgcacacctgtggtcccagctacttaggaggctgaggtgggaggatcacttgagcccaggaggtcaaggctgtattgagccatgattgcaccactgcactccagagtgggtgacagaggcagaccctgtctcaaaaaaaagaaagtggggcccatctgggggggctgcagagcgcagggtgggccaagggcaggtcccacgggcctcacctccaccacctgtgtaacagtcccagaaccccttggctaagctccacggctcctcgattttggagcggcaccacctggagtttgggaagttcctgctctcggaggaggttggtatactcaccctcggtttctgctgtgggcgctggggacgcagcgtccgcaggcacagggccgtatcctgcggagacttctgatgcagcgggtgagcactgggtgtgtgagcactgggggagggcggcagagaaggcggagggccgaggctgagggcaggtgcatcggaggccctgggaaaacgcttgtggggaagacaactggaaaggcccctcatggggtggggtggaagccgaaggggaagcggcccgggacccaccagcgggggaatgaagggcagccgagccctgagcggcccccaaggacctggacactcagtggacccctccctgcgctccccggtggtgacctctgaggccatctgcgtcccaagccgacgatggagccgctggtggagagctgggcaccctgaggagggccctgagcagcaggcgattaggggtcccgcccaccgagggcccgagggcgggggcgtgagaggcacaggcagccgaggcgaaggggcggggtccccgggcaccctgagaggtggccgcaggcgcctgacgcgctgggcataacctccgcagaccctgaacatctaccagaacctgaaccggcggcagcacgagcacgtgatccacctgatggacatcgccatcatcgccacggacctggccctgtacttcaagaagagagcgatgtttcagaagatcgtggatgagtccaagaactaccaggacaagaagagctgggtggagtacctgtccctggagacgacccggaaggagatcgtcatggccatgatgatgacagcctgcgacctgtctgccatcaccaagccctgggaagtccagagcaaggtcgcacttctcgtggctgctgagttctgggagcaaggtgacttggaaaggacagtcttggatcagcagcccattcctatgatggaccggaacaaggcggccgagctccccaagctgcaagtgggcttcatcgacttcgtgtgcacattcgtgtacaaggagttctctcgtttccacgaagagatcctgcccatgttcgaccgactgcagaacaataggaaagagtggaaggcgctggctgatgagtatgaggccaaagtgaaggctctggaggagaaggaggaggaggagagggtggcagccaagaaagtaggcacagaaatttgcaatggcggcccagcacccaagtcttcaacctgctgtatcctgtgagcactggtcccgtggggaccctatggctccctcaatcttcacccactaggatttgggttctgcctgtggctatttgctacaagaggttaggaagcccaagaaaatgactgaagatcattctggatattttaattttttttttttttttttttttgagatggagtcttgctctgtcacccaggctggagtgccgtggcacgatctcagctcactgcaacctccacctcccaggttcaagcgattctcgtgcctcagcctcctgagtagctgggactacaggcgcccaccaccacacatggctaatttttgtattttcagtacagatggggtttcaccatattgggcaggctggtctcgaactcctgacctcaggtgatcacccgcctcagcttcctgaagtgctgggattacaggcatgagccaccacgcccagcctgtttttataaactgaagccaactgtgaataaactgtagcctacattactcatccatttttggatagttaccactgggagacctttgaaaagggtccatgaactctgaaatcactgagaacatttgcagccacacatgtacatatgtgtacacaggtagacagatggacacaggccgtttctcatccagtttaggaaaacacacatgctcaggaattcagaataaaataaacagaaaacta

SEQ ID NO: 47616 - DNA, 1958 bp, Homo sapiens
agcggccgccgcgagtgtgaggaggcagggcctggtggggcctgggtctgggccttgaccaaggaggcagagaaaggtggcccaaggagggccctggggtgagtctgagcctggtggcagcgctgacccagcaaccaggggcctgtgcagcgggatgtcctgagtggggtctggccaggacctcgtggagtgcgtcagcaatgcttcactctcagacgcttggcggaggccacaggcggcctgacgtgcggaaaccacggcccgatgttctcaaagccctgctcgccgcaggtggttctggagcagccgggcggaggaagggctggtcggatgtttgcctgtcaagctcaaagcgacagattccactttccactcgtccactcctgagtgatcagggacacgaccgcagcctcgaggcctcaccgccagccagctcccgggccccacaagctcagatgaaacctggccacggagccaccaatcagggtctgtgccaggctccacggctgggcaggtggtcagatcagggagcgcacctgtgtcaggcttgagttaaacccctgctgctgtggtcagaccggcgtgagggtgggagtggccacaggccacaggtgtgcccctccctccaggtgctgctgtggtcggccaacaaggtgtttgaggagctgacggacatcgagaggcagttccacaaggccttctacacggtgcgggcctacctcaactgcgagcggtactccgtgggcctcctggacatgaccaaggagaaggaattttttgacgtgtggtctgtgctgatgggagagtcccagccgtactcgggcccacgcacgcctgatggccgggaaattgtcttctacaaagtgatcgactacatcctccacggcaaggaggagatcaaggtcattcccacaccctcagccgatcactgggccctggccagcggccttccaagctacgtggcagaaagcggctttatttgtaacatcatgaatgcttccgctgacgaaatgttcaaatttcaggaaggggccctggacgactccgggtggctcatcaagaatgtgctgtccatgcccatcgtcaacaagaaggaggagattgtgggagtcgccacattttacaacaggaaagacgggaagccctttgacgaacaggacgaggttctcatggagtccctgacacagttcctgggctggtcagtgatgaacaccgacacctacgacaagatgaacaagctggagaaccgcaaggacatcgcacaggacatggtcctttaccacgtgaagtgcgacagggacgagatccagctcatcctgccaaccagagcgcgcctggggaaggagcctgctgactgcgatgaggacgagctgggcgaaatcctggtaagaaccttgctcccggtccctcccatggaggccggccacgtgtgaggctgggaggaagagttctgcattctccgggacccgacgtggctttgcacacacggtactcagggatgttggtgctgtgtgtgtatacttgtgtatctaagcaccttagtgtacgtgtgtgtacataagcctggctttcagtctcagccagtgtgtccctgagtgtgtttgcatggccagaatgtggctttgatgtctgcactcctgagtgtatcttcgtgtcttcctgtctcctctgtgcgtttgccagatgttagttttcaccggttctttaggctttcttcactctttttcattgttttttctttttgttcctctgactgactataatctattttttactttgttgattcttctgtttgatgatgtctgctcttggacccctctagttaatattttagttcaattattgtactcttcaactccagtatttctcttttgttctttatcatttcaatctctgggttgaatttctcacttcattcatgtattattttcctgacctatagttatgtatctccgttg

SEQ ID NO: 47617 - DNA, 159 bp, Homo sapiens
ttccattcccagttttgctgcttaatagcttatatattagtcctcgggcaaatgaactatgtaggctgcagattcttactctgtaaaatggtaggagtagtacctcatatactggttattgtgaggataaataatgtacataaataacttagagcagca

SEQ ID NO: 47618 - DNA, 821 bp, Homo sapiens
aaatgtatttataaactggagaaaaatttgtagcatttaaacataaaacctcagcgttataattggtcattccttcctcttgtcaacgtgttacaacatttttgctttgctctgttacatgactcggggcttacctgcatttcacgtgagagaaaagtcaaattcatctccaccccacagcctgctatcttctgccttttaccctaaatctttggaggcgacagcttcctccccatgactgatagttatccatgctcacagctgctggcaggactgactcctttacaactgtggccttgtagttgatctgaacaggatgatcctgtctatggaagcggagtcttctctcactgcctgaaggagaaggctctgctggagatggagggctctcatctgtcaatgggtagcaccgacggtgccccagacatgctgaccatgtgtggatgtcttagaagagtggaaaggcttgagaaatgcaagcttagaatcatttctaatattacttgatgggaagtcagcaaataggaaacttgtaaaaaattggaggacaactttttgccactatcatggacaaatctatcaccactaccccaaatatcggtccctcagagaccaagtccttagattctgaggctctgctgtataattcctgttcagtagagcatctggcgaacctctagtaggacaaacagacagtaacccttgtgagaagtgagggaacttttagaactaggcctcaaggagcactgtacagtagaaacagaatgtgaaccaccacaatgaagaccacatatgcagtttgttttctagtagtcacatta

SEQ ID NO: 47619 - DNA, 362 bp, Homo sapiens
gtaggttgaaagagttaaaacagagcaaacacatttgtgtggtgtgtgctccaggctctattcacacccatctcgagaaaaatctaatataaagaataaaaatagaacagaagaagttggaaaatttccttaaaacgatgcttttgtgaactactacaaattttgaaatctgagcagagacaacaacccacaaggaaagcccctgagagaggacagacggcacggatgctcagaagcgccagacagacccaggttgtcactgcaacgatgaagctccaagagagaattagtcttcaaagtctcaaatcataaatcctagaagattccatccagattacaattcatcaataagcatatttaat

SEQ ID NO: 47620 - DNA, 306 bp, Homo sapiens
ctcagcaatgaaaaagaataaactgctgacacacaaacttggatgaatctcaaaaacattctggatgaaagaaactactcaaaaagaatgtttactgtatgattccatttttatgtttaagaacaggtaaaattaacctgtgatgacagacatcagagtcatggttactcctgaggagaggggtttactagatgggacaggaggggactctctccttctctagggtggcagaaatgctctggatcctggagtgggtgatggttgcatggggtcatacataaataaaacttgctttttacatataga

SEQ ID NO: 47621 - DNA, 333 bp, Homo sapiens
ctccccagtccaaagctcctgcctttcggccgcttctgcaggcccagctcccgcctgccagtggcctctttaggcccagcttattcctcacaacggcctttccaggccccgtttttcacttctggcagcctcttggactctaatttttttatcttttgtgtataaatcccaaaatatggaattttggaatatttccatcattatataaatattttggtaggtaatttatttggagtgagtttctgcaccaagcccgaattttttattttattttccttattatttggtgttaaacaggtttaatgacggtcatggcaactttctggcacaata

SEQ ID NO: 47622 - DNA, 296 bp, Homo sapiens
ctgccatgtatttcttttatacaacaatgaatatacaacctcagattttttgatagtgatgtttataataaaagtaacatattctttgaagaagataatgtaattttattactgtgatcaacaacataatccaaaaagactattatttagtacaggatttctcaaccttggcacactactgacatgttggttcagataatgctttgttgtaggagctgccatgtgcactgtatgatgagcagccttcctggcctttaccccatcgatgctgggagcatccttcccccagttgtgat

SEQ ID NO: 47623 - DNA, 319 bp, Homo sapiens
gccaagcactgtctgaaatactctatttcatgaagggcaggtttttgttaccaattttaacagtgaaggaacagaaaggtttaacaatttgtccatagtcacacgttctatgatgcaactgggacattaacccagggcgcacggtctccaccactatgtgagatctaataatagtcatgactaacatctactgaatgctaacaaagtgccaggcactactgtacttctccccaacccaacgctatgtttttaaatcccccatttttaagggaaggatgccaagtaaaataaggctggctggctggctggatatgcatag

SEQ ID NO: 47624 - DNA, 426 bp, Homo sapiens
atcctacagacagatggcaaaaaatagaatgtatatgtgtttggttttcatgtttatgaatttttattttacatttatgattggctcaatcagagaatcagttaataaatatacaaataaagatgaataagggccgggcatggtggctcacacctgtaatctcagcactttgggaggccaacacgggtggatcacttgatgacaggagatcgagacctacctggccaacgtggcgaaaccctatctctactaaaaatacaaaaattagccaggcatggcggcatgtgcctctaatccgaggacttgggtggctgaggcacatggattgcttgaacccgggtttcaaaaattgcttgaacctgggaggctgcagtgatccgagatcacgtcactgcagcttggcaacagagcaagattctgtgtcaa

SEQ ID NO: 47625 - DNA, 577 bp, Homo sapiens
agcccagaatgtccttaacattttctgaaattcctgcttgaggacagagctaccctcttttgagaaccactggtctcaaatatccctttgccctctttctaccctgccacactccctcacactgcgaccccagcagcctcttaatcatcctccaggactgtagctttttcagaattactttattaagccgctaatttggggttagatacccgtctccttgctcacctaccacttaacacactgttttgtagttgcaagttggtctgcatctccctatttagactacattctgtgaggcaaggaatgcccatcttggtcacctttgcatctctaatgctggcatggtttccacactcaaaagttggagcctaaaaaatggttgaatacatgaagaggaaaacagagaaataaaataaatcaataaaatggattgaaaataagcccttgactttgtgtctatagttggtaaataaaagaaaatataagaaggccctgtttatatgaagctgtatgcatttttattaactcacaacataaaccaagactgaagcctgattggatgccatgcccaaaccat

SEQ ID NO: 47626 - DNA, 415 bp, Homo sapiens
tgcagtgatggggaggggagggggtactctgggtgtagactggggtagggtgggcaaggctgagtgggtgagatatcattacagtggaaacccgaagactgagtatgtgtgagctaagcatgcaccatgaggggtctggcagttgggacggaagtgtactccccatggagagaatgtgcagaagcacgcataaccttctgaccggactgcagcaggcctgggtgacggtggtggtgaaggtggggagtgttgagaaacacaaccagcaaaggatgaaaagggcaaagcatgcattctcttccttaagggaggcttcctaaatgctgcacatgacacttttgcttatagctttttggctagaacttagtcacatggtcatatccagctgcaagagaggctggggaatatagttttt

SEQ ID NO: 47627 - DNA, 1457 bp, Homo sapiens
tgcagtgatggggaggggagggggtactctgggtgtagactggggtagggtgggcaaggctgagtgggtgagatatcattacagtggaaacccgaagactgagtatgtgtgagctaagcatgcaccatgaggggtctggcagttgggacggaagtgtactccccatggagagaatgtgcagaagcacgcataaccttctgaccggactgcagcaggcctgggtgacggtggtggtgaaggtggggagtgttgagaaacacaaccagcaaggtaggcaggggcccgtaagtgaaggactttgaaaggcctgttggagagtttctgtgttatctcaaggccagtgagataaagggcttgaagcagcagatttgtatgttagagtcctctggcctcggggtagagagtggatgaaagcaagcaggatcggattcagagaggtcaattaggagctgttgccagggacagtggcttgaaccaggaaacagcccagagaggtgcagagaggttgaggaatttgagacatctttaagaggtacaaccaacaggtttggagactgggtcggaagtaggaaatgaggaaaatggaggaaaccaacacttatgaagaaacaaagacagaggctgacaaacaaaagcaatagccattctccaggaagaaaatggtggcatgaccatgtgttttgagcaaggaaaaattgcaatgggctagagagattttgaaggactttctagaagagttagaattggagctgggtctccgacatgggtaggattttggtgggtagagaggacattccaggctaaacaatgatgcaagttagagttctaaggcagaacagtgtgtgatttgtttagcatgatttggtcatggttttcttgggagagtcccaaagaactgattctccagggggtgttactaaaactcttattgaaaggagggactacagagatgaatctcatcactctcccagaatggcacagagcttttcatggacccccgggccacctatgtaggaacctcagggggtctgtggaccactaaaagcccaacatgcctgagactccacagatactggcttccaccatgataaaggcaaaaagtccctctttcccaaaatcaatacttttattctcataggcctcctgctgtggtctagtccccatgttgaaagctgctgtcccagggtgttgcttcactacttctaggctcctgcagagtcctgcctcataggccgcactggtgagtgaggccagcaaacccatcagggagactacatgaatccaaacctaagtctgtctgacagcaaagcctgttctctccatctctccaggttcctaagccaggtgagcgttgaacctttcttgaatcaaggttccaattccaaggtaggaaagcacagtcagtcagggaaatatttacactgagaccacgcaccccagccctttcccaacctgct

SEQ ID NO: 47628 - DNA, 930 bp, Homo sapiens
ctttgaggatatttagccactcataaataattgtctcaaggtatttaaaagtgatttgtgccttattttaatgcaaaattagcagttttattctattttaaaaacaaaggcagaaaaacaattctgcatgttattctttaaaaacatccagaataatactaccaagtatttgtatttcaaaccagtaaaattttgaatattcaaagtctgctcttaaacttagacttcctagtattatggtggttatagtgagaatgaaattaaactgggtgagttccgaaataaaggaaagtgttatattctacagtgcccatattttctatggtaactaaatcaaatatttgtaagttcctctgctttttgaaattatttttcaaagaagcaacacctgttatacaacagaattgtataaactaaaaagacttttggccttggtacatagtctttatctggcctgcaatggagtcatggttctttctgaatcccactctcacttttttctttttacccttagatattgcatccgtggtatttcaggggtatagagaaataatattggaatttaggagctatttttttaagtgaaaatattactaagtggtatcttttgatgattacctactttaatgtgtcttagaaaagcaccaaaacatagcatgattattttttcagttaattaaaattagttaataacatgttcatttaaaaactattcattgactttttgtaccagtcatatgcagggtacagtaactgaggatatgggaaataaaataactgacatagtccctgctctgaaggaacaaaggaaaaggaattgcaaatttttattaaaataataataataataataataataataatgtgttttgcctggaagttattagctgagattctaacacacaaaaagttcaaaaaaaaagaacaaaa

SEQ ID NO: 47629 - DNA, 245 bp, Homo sapiens
tgccaagtaatattttatgaatgttgcatatttatctatcaagtgatggacatttgggctctttctactttttagctattaagaataatgctgtgaacatgtgtgcacaagtttttatatagaaatatattttaatttttttcaagtgtatatctagagtggaattaccagatcatatggtaagtatgcaattaatattttgaggaactgccaaactgctttccaaagtgggtgcataattttac

SEQ ID NO: 47630 - DNA, 528 bp, Homo sapiens
agagggaagccctgcctccctgggtctttgcctgtagcagtgagcctagaaatgcatgaagccgcaggacctctcacaaaagatgtgggcaattaaagcagctagagccgggcacggtggctcacgcctatcatcccagcactttgggaggccgaggcgggcagatcacgaggtcaggagattgagaccatcctggctaacacagtgaaaccccatccctactaaaaatacaaaaaattagccaggcatggtgctgggcgcctatagtcccagctacttgggaggctgaggcaggagaatgacatgaacctggggagtggagcttgcagtgagctgagatcgcaccactgcactccagcctggacaacagagtgaggccctgtctcaaaaaaagaaaaagaaaaagcagccagaggcccggcatggtggctcccgcctgcaatcccagcactttgggagggcgaggtgggatgatcgcttgatcccaggacttcaagaccagtctgggcaatgtagtgaaaccccatc

SEQ ID NO: 47631 - DNA, 4270 bp, Homo sapiens
  misc_feature (41)..(41): n is a, c, g, or t
  misc_feature (595)..(595): n is a, c, g, or t
  misc_feature (718)..(718): n is a, c, g, or t
  misc_feature (2456)..(2456): n is a, c, g, or t
  misc_feature (2480)..(2480): n is a, c, g, or t
gatcaatactgaggccgcgtccgacccccttgagccgaganccccccccagcccagcccccaccccaccccccgcacacgccccaccccccccacgacccagcctcataccgcaccagctgaggcacccaagaggattaccccctggggccctctcccgccccccaaaaaagagaagatcccctctcctggcccatcccttcccttcttccctcccccctccccccgaactttccctctcgcatgcttttcccctgcaccacggatcgcctctcggatgccgcttgcctggaagctgcgttaggagcgagcggcggcggtggcggcggtggcggcggcggcggcagctcgggagtgctatgaccggcaaactcgccgagaagctgccggtgaccatgagcagtttgctaaaccaactgcctgacaatctgtaccccgaggagatccccagcgcgctcaacctcttctccggcagcagcgactcggtagtccattacaatcagatggctacagagaatgtaatggacatcggtctgaccaacgagaagcccaacccggaactctcttactccggctccttccagccagcccccggnaacaagaccgtgacctacttgggaaagttcgccttcgactccccttccaactggtgccaggacaacatcattagcctcatgagcgccggcatcttgggggtgcccccggcttcaggggcgctnagcacgcagacgtccacggccagcatggtgcagccaccgcagggtgacgtggaggccatgtatcccgcgctacccccctactccaactgcggcgacctctactcagagcccgtgtctttccacgacccccagggcaatcccgggctcgcctattccccccaggattaccaatcggccaagccggcgttggacagcaatctcttccccatgattcctgactacaacctctaccaccaccccaacgacatgggctccattccggagcacaagcccttccagggcatggaccccatccgggtcaacccgccccctattacccctctggagaccatcaaggcattcaaagacaagcagatccacccgggctttggcagcctgccccagccgccgctcaccctcaagcccatccggccccgcaagtaccccaaccggcctagcaagacaccgctccacgaacggccccacgcgtgcccggccgagggctgcgaccgccgtttcagccgttcggacgagctgacccggcacctgcgcatccacacgggccacaagcccttccagtgccggatctgcatgcggagcttcagccgcagcgaccacctcaccactcacatccgcactcatacgggcgagaagccctttgcctgcgagttctgcgggcgcaagtttgcgcgcagcgacgagcgcaagcgccacgccaagatccacctcaagcaaaaggagaagaaggcggagaagggcggtgcaccctctgcatcctcggcgccccccgtgtcgctggcccccgtggtcaccacctgcgcctgaggatcgggcccccagatccccacttttcccctccagtgcctcccggctgctagcctgaaagcagcgggaaagccagccacggaggcgtaggggccgcgccctggcctctccatggacgtgcggccccttgcttccccttcgatgcccccggttcccaacctttcacgccggccagcggtcaggggccagggctggaggcgccttcccctcgcggtcccccacttagccaaggcgtgggggcggaaaggtggcgtctagcccgctttgttcagttcggatcgccttgatccaggggccgccgggccgcgccaaggacctgcaagggactgaaggcggagcccatccaaccctcgcccgacccaaacacctcattgtttcccccacgtctccctctataccccctcgaagactcgagagggggagggggtaaggagcgcaccaaagcgcagagcttgctgcccgccgcacgcacgcgcgcctgcgtgcggggatgcgcgcgagtgtgtgcgtgctcgcgtgtgtgtgtatgtgtgtgtgtgagtgtgtgtgtgtgcgcgcgcgcaagcgtgtgtgtttaagactcttgagctgaactgggctgtgtttaccccaaactcttccccacctcgggtccccaagccgctgggagatgtcccatgctgggggtccgcacgtggctggaggaggtggtcttccatccgctctgaaatcatgtttcttagagaaatgcctcggatgccgccgacgcggtgctgctgccgccgcttcgggtttggcccctcagaacccctccttttctgagcgcttccctcttaggcctcagggcagtttgatctgtggggagaaagagcagccatcgctgagcctgccttttaaaatatatgtgtatttccttagccccactctaagaaatctatgttcctgagtttgcccnctgccctcccactccttccccttntcccctctaaaccttctcccatctctttcaaaatcttttcccagaaaggcaggcttcaaccagccactccagctttgtgtcttctctcaattacatagcaatttctccttcccaccatcatggggaagctggctctgcttttgccctttgtcatcaccaacacaacagatagaatttaaatataagtatatggtgtgcgtgtgtatgtatgtgtatgtatatgcatgcatgtgtataaagatgcacatgcgtacatatacataacatacacacaatatgtattcctagcaaaataaaatctctaaggtacttggttatccagtgcagtgcaccggaataaagagaatttgtaggcgtatacagctttaaatgatttattttttatgaaaatgttaactgatgagattatatctacatacgtgtgttatgtgtgtggatatagatgcacacatatctgtacatatacatgtgagtgtacatatatacacatatacacatctatgtatggatatgtgtgtatacacatatacacatctctgtccaaaatttcctcaaagatatggggattttttcatgaatccatgtggatgaatgaggtgtctcctttccatacccagtctcaccttctccccaccctacctcacctcttctcaggcacccctcttccccagctgtcctgccagcccttctcgtacagggtggctcctttgaagtggagtaatagggaaggttgctctctgccacagcttgcagcatggtcttgactgaatgtactgttcctgttagcgttacttctcctgtggtcagtaagttgcccagagagaaggaacaaaggtctggagtttacagaatgtctgtttttaaagtcactttatgcgttttccacttttttcttttttaagaaaaagaagtaccatttttgttttgttttgttttgatttttggtggtggataaataatactaaaaggactctagtggaaaggggggatatcgaagagcagggggttgtgaatttccaggtacttggactttttgtagaaggagagagaagaagatgaagtttgccaggagggcccatattttttcagctgaagggtaaaatctttctttgcagagacagtattttgctgaatactttttataatgtgatgattattaaaaaagcaaaaattttggtcacttccaagctagaaggaggaatcagataccctttaatattttttcctcgctccttctggtatatgcatgtcactgcatgataattgagttttcctttgttttaataaaactgttctcagacattaagctaaactaagagaaaaataactttgttgccaaaaggttgtgctatccagattttttatatgtctgcatgtttaaaaaaaaaaagcaacaaaagaaaatgcactctaacttatgtgaactgagagaaaaaaatcaggttttaaacaggaaaacctatggggaatgatattttttgaaagacttttgtataaagttgagtacttagaaaaaagacaaaccagatgtaatatattttgtggatgtttttatttcttggatttatagtaccttatactaaggttaaaaaaatatgcttgatattgtgaaaaggtgaaattcttcaccaacatttcatttgctcctttgtcatattgtaatgccaatataatatagttaatgaaaacagcatttttaaaaaccgaaatattgaaatggtgtaatgttgtaccatttgcactgtgagcaaatgctaatacagtaaatatattgtgtttgctgacaatca

SEQ ID NO: 47632 - DNA, 470 bp, Homo sapiens
  misc_feature (49)..(49): n is a, c, g, or t
gcacgagagaaaagcactctaacttatgttgctttttttttttaaacangcagacatataaaaaaaaaaagcaacaaaagaaaatgcactctaacttatgtgaactgagagaaaaaaatcaggttttaaacaggaaaacctatggggaatgatattttttgaaagacttttgtataaagttgagtacttagaaaaaagacaaaccagatgtaatatattttgtggatgtttttatttcttggatttatagtaccttatactaaggttaaaaaaatatgcttgatattgtgaaaaggtgaaattcttcaccaacatttcatttgctcctttgtcatattgtaatgccaatataatatagttaatgaaaacagcatttttaaaaaccgaaatattgaaatggtgtaatgttgtaccatttgcactgtgagcaaatgctaatacagtaaatatattgtgtttgctgacaatca

SEQ ID NO: 47633 - DNA, 1087 bp, Homo sapiens
ctgcactgccctcctgcacctcttccatgcagctgtgcagaggaaattacctgatgttccaaaccccctcctgttcctgttagcgttacttctcctgtggtcagtaagttgcccagagagaaggaacaaaggtctggagtttacagaatgtctgtttttaaagtcactttatgcgttttccacttttttcttttttaagaaaaagaagtaccatttttgttttgttttgttttgatttttggtggtggataaataatactaaaaggactctagtggaaaggggggatatcgaagagcagggggttgtgaatttccaggtacttggactttttgtagaaggagagagaagaagatgaagtttgccaggagggcccatattttttcagctgaagggtaaaatctttctttgcagagacagtattttgctgaatactttttataatgtgatgattattaaaaaagcaaaaattttggtcacttccaagctagaaggaggaatcagataccctttaatattttttcctcgctccttctggtatatgcatgtcactgcatgataattgagttttcctttgttttaataaaactgttctcagacattaagctaaactaagagaaaaataactttgttgccaaaaggttgtgctatccagattttttatatgtctgcatgtttaaaaaaaaaaagcaacaaaagaaaatgcactctaacttatgtgaactgagagaaaaaaatcaggttttaaacaggaaaacctatggggaatgatattttttgaaagacttttgtataaagttgagtacttagaaaaaagacaaaccagatgtaatatattttgtggatgtttttatttcttggatttatagtaccttatactaaggttaaaaaaatatgcttgatattgtgaaaaggtgaaattcttcaccaacatttcatttgctcctttgtcatattgtaatgccaatataatatagttaatgaaaacagcatttttaaaaaccgaaatattgaaatggtgtaatgttgtaccatttgcactgtgagcaaatgctaatacagtaaatatattgtgtttgctgacaatca

SEQ ID NO: 47634 - DNA, 360 bp, Homo sapiens
  misc_feature (24)..(24): n is a, c, g, or t
aattcgcggccgcgtacgacaganaacagaaggggggaatgatattttttgaaagacttttgtataaagttgagtacttagaaaaaagacaaaccagatgtaatatattttgtggatgtttttatttcttggatttatagtaccttatactaaggttaaaaaaatatgcttgatattgtgaaaaggtgaaattcttcaccaacatttcatttgctcctttgtcatattgtaatgccaatataatatagttaatgaaaacagcatttttaaaaaccgaaatattgaaatggtgtaatgttgtaccatttgcactgtgagcaaatgctaatacagtaaatatattgtgtttgctgacaatca

SEQ ID NO: 47635 - DNA, 4342 bp, Homo sapiens
  misc_feature (41)..(41): n is a, c, g, or t
  misc_feature (595)..(595): n is a, c, g, or t
  misc_feature (718)..(718): n is a, c, g, or t
  misc_feature (2456)..(2456): n is a, c, g, or t
  misc_feature (2480)..(2480): n is a, c, g, or t
gatcaatactgaggccgcgtccgacccccttgagccgaganccccccccagcccagcccccaccccaccccccgcacacgccccaccccccccacgacccagcctcataccgcaccagctgaggcacccaagaggattaccccctggggccctctcccgccccccaaaaaagagaagatcccctctcctggcccatcccttcccttcttccctcccccctccccccgaactttccctctcgcatgcttttcccctgcaccacggatcgcctctcggatgccgcttgcctggaagctgcgttaggagcgagcggcggcggtggcggcggtggcggcggcggcggcagctcgggagtgctatgaccggcaaactcgccgagaagctgccggtgaccatgagcagtttgctaaaccaactgcctgacaatctgtaccccgaggagatccccagcgcgctcaacctcttctccggcagcagcgactcggtagtccattacaatcagatggctacagagaatgtaatggacatcggtctgaccaacgagaagcccaacccggaactctcttactccggctccttccagccagcccccggnaacaagaccgtgacctacttgggaaagttcgccttcgactccccttccaactggtgccaggacaacatcattagcctcatgagcgccggcatcttgggggtgcccccggcttcaggggcgctnagcacgcagacgtccacggccagcatggtgcagccaccgcagggtgacgtggaggccatgtatcccgcgctacccccctactccaactgcggcgacctctactcagagcccgtgtctttccacgacccccagggcaatcccgggctcgcctattccccccaggattaccaatcggccaagccggcgttggacagcaatctcttccccatgattcctgactacaacctctaccaccaccccaacgacatgggctccattccggagcacaagcccttccagggcatggaccccatccgggtcaacccgccccctattacccctctggagaccatcaaggcattcaaagacaagcagatccacccgggctttggcagcctgccccagccgccgctcaccctcaagcccatccggccccgcaagtaccccaaccggcctagcaagacaccgctccacgaacggccccacgcgtgcccggccgagggctgcgaccgccgtttcagccgttcggacgagctgacccggcacctgcgcatccacacgggccacaagcccttccagtgccggatctgcatgcggagcttcagccgcagcgaccacctcaccactcacatccgcactcatacgggcgagaagccctttgcctgcgagttctgcgggcgcaagtttgcgcgcagcgacgagcgcaagcgccacgccaagatccacctcaagcaaaaggagaagaaggcggagaagggcggtgcaccctctgcatcctcggcgccccccgtgtcgctggcccccgtggtcaccacctgcgcctgaggatcgggcccccagatccccacttttcccctccagtgcctcccggctgctagcctgaaagcagcgggaaagccagccacggaggcgtaggggccgcgccctggcctctccatggacgtgcggccccttgcttccccttcgatgcccccggttcccaacctttcacgccggccagcggtcaggggccagggctggaggcgccttcccctcgcggtcccccacttagccaaggcgtgggggcggaaaggtggcgtctagcccgctttgttcagttcggatcgccttgatccaggggccgccgggccgcgccaaggacctgcaagggactgaaggcggagcccatccaaccctcgcccgacccaaacacctcattgtttcccccacgtctccctctataccccctcgaagactcgagagggggagggggtaaggagcgcaccaaagcgcagagcttgctgcccgccgcacgcacgcgcgcctgcgtgcggggatgcgcgcgagtgtgtgcgtgctcgcgtgtgtgtgtatgtgtgtgtgtgagtgtgtgtgtgtgcgcgcgcgcaagcgtgtgtgtttaagactcttgagctgaactgggctgtgtttaccccaaactcttccccacctcgggtccccaagccgctgggagatgtcccatgctgggggtccgcacgtggctggaggaggtggtcttccatccgctctgaaatcatgtttcttagagaaatgcctcggatgccgccgacgcggtgctgctgccgccgcttcgggtttggcccctcagaacccctccttttctgagcgcttccctcttaggcctcagggcagtttgatctgtggggagaaagagcagccatcgctgagcctgccttttaaaatatatgtgtatttccttagccccactctaagaaatctatgttcctgagtttgcccnctgccctcccactccttccccttntcccctctaaaccttctcccatctctttcaaaatcttttcccagaaaggcaggcttcaaccagccactccagctttgtgtcttctctcaattacatagcaatttctccttcccaccatcatggggaagctggctctgcttttgccctttgtcatcaccaacacaacagatagaatttaaatataagtatatggtgtgcgtgtgtatgtatgtgtatgtatatgcatgcatgtgtataaagatgcacatgcgtacatatacataacatacacacaatatgtattcctagcaaaataaaatctctaaggtacttggttatccagtgcagtgcaccggaataaagagaatttgtaggcgtatacagctttaaatgatttattttttatgaaaatgttaactgatgagattatatctacatacgtgtgttatgtgtgtggatatagatgcacacatatctgtacatatacatgtgagtgtacatatatacacatatacacatctatgtatggatatgtgtgtatacacatatacacatctctgtccaaaatttcctcaaagatatggggattttttcatgaatccatgtggatgaatgaggtgtctcctttccatacccagtctcaccttctccccaccctacctcacctcttctcaggcacccctcttccccagctgtcctgccagcccttctcgtacagggtggctcctttgaagtggagtaatagggaaggttgctctctgccacagcttgcagcatggtcttgactgaatgtactgttcctgttagcgttacttctcctgtggtcagtaagttgcccagagagaaggaacaaaggtctggagtttacagaatgtctgtttttaaagtcactttatgcgttttccacttttttcttttttaagaaaaagaagtaccatttttgttttgttttgttttgatttttggtggtggataaataatactaaaaggactctagtggaaaggggggatatcgaagagcagggggttgtgaatttccaggtacttggactttttgtagaaggagagagaagaagatgaagtttgccaggagggcccatattttttcagctgaagggtaaaatctttctttgcagagacagtattttgctgaatactttttataatgtgatgattattaaaaaagcaaaaattttggtcacttccaagctagaaggaggaatcagataccctttaatattttttcctcgctccttctggtatatgcatgtcactgcatgataattgagttttcctttgttttaataaaactgttctcagacattaagctaaactaagagaaaaataactttgttgccaaaaggttgtgctatccagattttttatatgtctgcatgtttaaaaaaaaaaagcaacaaaagaaaatgcactctaacttatgtgaactgagagaaaaaaatcaggttttaaacaggaaaacctatggggaatgatattttttgaaagacttttgtataaagttgagtacttagaaaaaagacaaaccagatgtaatatattttgtggatgtttttatttcttggatttatagtaccttatactaaggttaaaaaaatatgcttgatattgtgaaaaggtgaaattcttcaccaacatttcatttgctcctttgtcatattgtaatgccaatataatatagttaatgaaaacagcatttttaaaaaccgaaatattgaaatggtgtaatgttgtaccatttgcactgtgagcaaatgctaatacagtaaatatattgtgtttgctgacaatcagccggcctataaatctccttattttatttcttgtttttatagcataaagctttagtttggcctgttttttgt

SEQ ID NO: 47636 - DNA, 420 bp, Homo sapiens
ccagtggccatgcatctaccctcaacacactaacctctttacagcattgcagtggttgacagtttcctcctcctccctcactctccccactagaaatctgtgagactcccatacttaacttgttttcctcctccttctgtggaagctcctcttgggctttttcccaggctccctctcccctaaattttgatcattctcagagactcatccttaaatcatttcctttgtctccctgttcattctcctcaagtcacttatcttctctcaaaggccctgtgttttgtgacttgtaaatttctatatgcagcccagccctcagtcctctagtccctctccactgaaagtcccacaggcactcattcgcatgccccagaatgagccatcagcatcctgcttatttcctcttctctctctccactc

SEQ ID NO: 47637 - DNA, 455 bp, Homo sapiens
taacctaaacaacaagaatttatttctcacactccaggaagctgaaagtccaagatcaagctgccagtggattctgttcctggatgagggctctctccctggcttgcagacagctcactgtgccctcgcatggtgaagagagagaacaagcaggctctctggtgtcccttcttataaggacactaatcccaacatgagggccccacccttatgacctcatctaaccccaatcacctcctgaaggccccacctcctaataccatcacactggggcttagcacctcaacatatcaattttggggaaatacaattcagttcacagtgcatagatagatattaattgatattatcaaaagaaaccatgggcagataaacccaaaaccaaactgttttaatggttatctattgggaagaaaaagaaacagggtgaacgggaagttacagaagcaagattt

SEQ ID NO: 47638 - DNA, 883 bp, Homo sapiens
ctatttgtgctaaaagctgaaatttcattattttaaagctaattgcctgaaaatatattggcagaattttcccaaattgtaataactgtgatacatgcatataaaaaaatccttaatgtcaacacacttaaactacatgctaaatagtcaagaaaaaaatggaaacagtagcatccatactggaatcttgccatatttttttcattttagaatagattttggcagtctcatcttagaatcctatccttaggatacatctgaaagcattcctttggcatggaccccagagatagttttggagccaggcattgatgtagaggttcaccaaacatatttagggataatagataaattcataatgcttttttgggtacactgaaatgtttacatactgaattctgtaatatgaactaggaacgcatttactatgagaaaatatggctcttaagcagtgtaagagtgaaaatataagcatatttccattaacagtatattgtactgatcagcagctcttttctcaaaaattttaacatcagttaggcataattattttccataaggtttttttccaaagggcccttatatatttgatatatcccttttgggggcttttaaaaaaaggcaaaattttttttttttcccccccaaacaacaggggggggacaaaacacacgccgcagctaaaacacaggaccacgcgggggggcccttctttttctaccagacggcgaccatagccccccacctacaccacacaaccaccggcggggggcaggcggaggagggcgccaaccaccacaaacaaacaagaccaaatcggaaagaggacacccgcacacacagcaccaccagcagcaagcaacaccacacgaccaagccagtg

SEQ ID NO: 47639 - DNA, 1609 bp, Homo sapiens
ctatttgtgctaaaagctgaaatttcattattttaaagctaattgcctgaaaatatattggcagaattttcccaaattgtaataactgtgatacatgcatataaaaaaatccttaatgtcaacacacttaaactacatgctaaatagtcaagaaaaaaatggaaacagtagcatccatactggaatcttgccatatttttttcattttagaatagattttggcagtctcatcttagaatcctatccttaggatacatctgaaagcattcctttggcatggaccccagagatagttttggagccaggcattgatgtagaggttcaccaaacatatttagggataatagataaattcataatgcttttttgggtacactgaaatgtttacatactgaattctgtaatatgaactaggaacgcatttactatgagaaaatatggctcttaagcagtgtaagagtgaaaatataagcatatttccattaacagtatattgtactgatcagcagctctcattttaacatcagttaggcataatatttcatagttttcaagccttttttttctgctaacattcagacaagtaacaggcaacaaagatttaagaaaaatttatggtggaaaaccttaaaaattgagacaattcaatctatttaatctattaaattttttctctgaattgggtatatggcatcattatttgattttagcagggaacatttggatttagcttatgaaacacagatgttctatgggaacatggcttgaagccaatatgtaatttaatgtttttccattaaacaaacatctgaacaccaacttagctaccaagtgaggtcaagtgcctgaaaagtactgtatacatctaataagcatgttttccttatgtaaaagatgcactttatggcaatgcataccaggctttcacctgctagaaacatacttgttgccaactttgccatctaccactattctcctccttagaacaggtagaaacctattttacaaaaaaaaaaaaaaaaaaagatagacttaagtttatcttagttcaagattgcactttttaaaaaactctggactattttcagcaatgaccgaacagcttgtcacacatcatagttgtgatcttttttgaggagttatttattggggttaatatctactataaataagcattcttgtgcttgttacaaagcataatgcaaattactagttctatactagtataatgaaaatgactagttctatactgttatgtacttttgtcttcctccccaaaaaggaaacagtttagcattgtctaaattcagtggcacttttttagtaatacatttttttttcttagatacaggagaactattgcttttacctgcagaaactcaaatgttttcgctaaaactttaaaattctaaaatacgtagtatgggtattactaattgtacattttacatttcaaaaatagttaaaattcaaatgttaagtctttgacttaaaaaacctttaaatatagataataccttaacaattataactttgtgatattattaaaatatatttgtctgttaacttcatcagttgtattaaataaaaatagttaacagcttgcact

SEQ ID NO: 47640 - DNA, 456 bp, Homo sapiens
actggggcaactggatggcattcatgagaactgagaaaaggagttgaagcaggtttggacaagaaaattaagagtttgtttttgacatgtgaagtttgaggtattagtaagacatccaagtggagatgtccagtaggaatttagaattgggagtcactggcatgcaggtgcagcagaggccagacacagggatgatgaacatgccagatctttctctaaatggagcacagtgcacgtggtgtcattaatagttcttcatttatgtgtcttatgtgtaggcatgactaaggggtagggttgactattcttgagctacctcaccaactgcctattttattccaactcttgttcccatccttgctctccttaagaatctaagaaaaagatgcccactcttgctttcctttgaggcagctgctgtctttttacacagctctcgtctaagcaatgggacaa

SEQ ID NO: 47641 - DNA, 358 bp, Homo sapiens
ttttgtcttatttcatagttggggattaggcttaaaatcctagagtggatttattcagttaaatttattcacactaagatgtagatgactaatactgtatatttttatgtagaccaaattttaaggtaccactgtgcatatgtataccaactacctgaagaagtatttggttggtacaagagatatagaaaggaatcgctgggtgtaccaaggctaatcagttttataattttgcataattttctaactgcgattatcatttagtttagaacaatttatttctcaaggcccatgtaaatattatttttaaaatatacagtcttaagaattcatgggcatattttatggaaaggaggaa

SEQ ID NO: 47642 - DNA, 409 bp, Homo sapiens
ttagcagaaaccagctcatctaaataataataacacccaaaacttgaatagaactccctatgatccaggaactgttttaagtgcttaacactaactcactgaaacatccattacccctgtattctattgaggaaactgtggtaccaagagaggctaagcagcttgctcgaacgcccatacccagtaagaagccaagcttggagatgaaccaattcataggagtgtgtgctctttaccaccatgttatacttcttatctacatggaacactgtaggctttaaaaagtctagaatttttactcaggaggctgagacaggagaattgtttgaacccgggaggtggaggttgtggtgagccgggattgcatcattgcactctagcctgggcaacaagagctaaactccatgtc

SEQ ID NO: 47643 - DNA, 734 bp, Homo sapiens
ctgtttcacgcttttgtctttattatccctcgtaactgcccgccctgcaaccaacccgctcaaacaagcaccctgactggcgcattcttactcattctagcctgggtttcaacttcaaggagcttcagcgcccctcactcccttgccctgaaagctggctaaactacgcaccttttctccccttttgaaatgacctttccagatatttctatggaattcagtgccattttctgccgctgttctcaccacattcattcatcatgtttagttttaaaagtaccagattctgtcgatttctccaactgaactctgaaatctttgaggtcagggagcttgcctcattctattttgtattcccagtacgtgacacatggctggacacaccagaaattgtccgatcaagtttgtgggtattaagagtggtcaaagacgctggggagggcagtgctgggagaagggcagcgcgcgtcttggcgaccccagcgcagttcgaactactccggagtctggtgtggagccgagagggaggcccgcacttttctccccgcggagctgcgctgagtctgaaataggtgtacgcgtcagcggggcaggaaacggaaagacagtgcagtaattggtggaaagctggaagtgggcacctcgagggcctcagccccacgaacacagtcacccaggaaaagcgaaccgcgccaggccctgtcatcgaccgctgggtccgtcctcccagcgct

SEQ ID NO: 47644 - DNA, 401 bp, Homo sapiens
acaatctctaaaatattgttttgtgaaatcggtaagatgcagaacagtaaagaaagctgccatagattatcatcagaaaaacacaagaaactaacagttgtctggaagaaggaaaactagaggctgggaaaaaaaggtggaagggagatttaatttttatggttattttcttttatgctatttgaaattttatcatgtccacttattatatatacagtatgtatatgtacatatatatacacacagtaaggaaaacacataaaagggctgtaattagggcgggtgcggtggctcatgcctgtaatcccaacactttgggaagccgaggtgggcggatcacgaggtcaggagtttgagaccagcgtggacaacatagtgaaaccccatctctactaaaaata

SEQ ID NO: 47645 - DNA, 391 bp, Homo sapiens
attggggtaaagagagattggtttgcttaagcaggaatgcttatagtcagggcttttttatttccaggcttccattgcctctcacacttcgtagcctgtcaaagtcaagttagtgcattaacctcagtgacatagaactgagaaacaaggtcacctatctgaatcttacctacttgtgtgtggtttgtcctccattcattgtaatgctatggtaaagtactccttgaaatatttgcaatcagagacagatcggatgtgttatgactaggttccaactattatagatcatcaccattttccaagtataaaatcagaaggttacacatattaagaaatgctgaaggaacaaagtatgtttggcttcctgcacgataaacatttgtgaattttt

SEQ ID NO: 47646 - DNA, 788 bp, Homo sapiens
cagcctcatttgaagtgcacaacagtcatatgttgctagaggctgctgtactgcacagcataaacacagaagaagatatagaacattcctaccctcacagaaagttgtcatggataagactgctctagaagttgtctgccagtatcagccaccatgccttgcctggattactgcaagagaccagtctccctgatcccagtgtcttcctcctcatgcaaagtggtgtgtgtttctcaagggtaaccttgctccctgtcactcacatacacagcttcttggcctgacacacaagacactgtgtgatctgccctctgcccctccacttgccttattccctgccgtgagtcctcagagacactaacccagctgcatgaaaactcccccagacccttgaccttgggagtcagtcaaccttttgaggttctttgaagctttcatgaaaacctaactttgtgaacatggaaatgataatgctcggccaggcgcggcggctcatgcctgtaatcccagcactttgagaggccaacgcatgtggatcgcttgagcccaggaattcgagaacagcctgggcaacatggtgaaaccttgtctccacaaaaaatacaaaaattagctgggcatgggggcacacacctgcggttccagctactcgagaagctaaggtgggaggatggattgagcccaagaggtggaggctgcagtgagccgtgtactccagcagtgctgtactcgtgtacagtgtactccagcctgggcaacagaaatgagaccctgtctcaaaaaaaaaa

SEQ ID NO: 47647 - DNA, 411 bp, Homo sapiens
ttccacagcaccctgggcttgctgccagtagacccttatctcactgcaattgttctttgcttttctctaccgcctacctatgtgctccttaagggaaaggggagtctttattatcttttatctatagtctctacagtgcctggcacagggctcaaaaagtgtttactgaagggatggatggaaaaatactattgatattttcctatttgttattcagcctgcccatatttaaggtaaactgacattcataaaaatgcacctaaaatgagttatgcaattcaaaactgttacatatattgatggttcagtttaaaattcacgtctctaatgtttttgcactttggctttctcttctaacagaattatatatactatatatcatcctagcactttgggaggccaaggcaggcg

SEQ ID NO: 47648 - DNA, 432 bp, Homo sapiens
tggcttttttttttttgttgttggagacggagttttgctcttgttgcccaggctggagtgcagtggcgcgatctcggctcaccgcaacctccgcctacctatgtgctccttaagggaaaggggagtctttattatcttttatctatagtctctacagtgcctggcacagggctcaaaaagtgtttactgaagggatggatggaaaaatactattgatattttcctatttgttattcagcctgcccatatttaaggtaaactgacattcataaaaatgcacctaaaatgagttatgcaattcaaaactgttacatatattgatggttcagtttaaaattcacgtctctaatgtttttgcactttggctttctcttctaacagaattatatatactatatatcatcctagcactttgggaggccaaggcaggcg

SEQ ID NO: 47649 - DNA, 2289 bp, Homo sapiens
tgctctgtcccctgcaacaaggagccatgccagctggacacacacttcttccagggcctctggcagccaggacagagttgagaccacagctgttgagaccctgagccctgagtctgtattgctcaagaagggccttccccagcaatgacctcctcattgcttctggcctttctcctcctggctccaaccacagtggccactcccagagctggcggtcagtgtccagcatgtggggggcccaccttggaactggagagccagcgggagctgcttcttgatctggccaagagaagcatcttggacaagctgcacctcacccagcgcccaacactgaaccgccctgtgtccagagctgctttgaggactgcactgcagcacctccacggggtcccacagggggcacttctagaggacaacagggaacaggaatgtgaaatcatcagctttgctgagacaggcctctccaccatcaaccagactcgtcttgattttcacttctcctctgatagaactgctggtgacagggaggtccagcaggccagtctcatgttctttgtgcagctcccttccaataccacttggaccttgaaagtgagagtccttgtgctgggtccacataataccaacctcaccttggctactcagtacctgctggaggtggatgccagtggctggcatcaactccccctagggcctgaagctcaagctgcctgcagccaggggcacctgaccctggagctggtacttgaaggccaggtagcccagagctcagtcatcctgggtggagctgcccataggccttttgtggcagcccgggtgagagttgggggcaaacaccagattcaccgacgaggcatcgactgccaaggagggtccaggatgtgctgtcgacaagagttttttgtggacttccgtgagattggctggcacgactggatcatccagcctgagggctacgccatgaacttctgcatagggcagtgcccactacacatagcaggcatgcctggtattgctgcctcctttcacactgcagtgctcaatcttctcaaggccaacacagctgcaggcaccactggagggggctcatgctgtgtacccacggcccggcgccccctgtctctgctctattatgacagggacagcaacattgtcaagactgacatacctgacatggtagtagaggcctgtgggtgcagttagtctatgtgtggtatgggcagcccaaggttgcatgggaaaacacgcccctacagaagtgcacttccttgagaggagggaatgacctcattctctgtccagaatgtggactccctcttcctgagcatcttatggaaattaccccacctttgacttgaagaaaccttcatctaaagcaagtcactgtgccatcttcctgaccactaccctctttcctagggcatagtccatcccgctagtccatcccgctagccccactccagggactcagacccatctccaaccatgagcaatgccatctggttcccaggcaaagacacccttagctcacctttaatagaccccataacccactatgccttcctgtcctttctactcaatggtccccactccaagatgagttgacacaaccccttcccccaatttttgtggatctccagagaggcccttctttggattcaccaaagtttagatcactgctgcccaaaatagaggcttacctacccccctctttgttgtgagcccctgtccttcttagttgtccaggtgaactactaaagctctctttgcataccttcatccattttttgtccttctctgcctttctctatgcccttaaggggtgacttgcctgagctctatcacctgagctcccctgccctctggcttcctgctgaggtcagggcatttcttatccctgttccctctctgtctaggtgtcatggttctgtgtaactgtggctattctgtgtccctacactacctggctacccccttccatggccccagctctgcctacattctgattttttttttttttttttttttgaaaagttaaaaattccttaattttttattcctggtaccactaccacaatttacagggcaatatacctgatgtaatgaaaagaaaaagaaaaagacaaagctacaacagataaaagacctcaggaatgtacatctaattgacactacattgcattaatcaatagctgcactttttgcaaactgtggctatgacagtcctgaacaagaagggtttcctgtttaagctgcagtaacttttctgactatggatcatcgttcctt

SEQ ID NO: 47650 - DNA, 419 bp, Homo sapiens
gtgggttcctgatctgtagctcttccccagaacttgacccctcaaggaaaggaaaagtttcctcgccagacttacctctgactccttccccaaaaaccatccaacccctgcttcccacaggctataatctccttacccaggtgtcccgacaacccccacatccctctggggtcactctggtagctcagacctgaccaataggcagctggaaagctggtaaatttcacttcttttgagattggctgccgtcatctcctccggctcctctctctgcaggccccacaaacccacaggctgtggtgtgagcccatccacttcctgggcctgtacacagcgactgggaggtgggagtctctcctttctctggccccaggatctagcccctcccttcccctctcctccagatgcctcatttgagt

SEQ ID NO: 47651 - DNA, 482 bp, Homo sapiens
aagcaaaaacagacagctgaaaagtcctctatctcctacaagggccctaactggcaccccagatgacacagagcctgcctgcttatgctgtagtctgcctactctgctgtctcttcacatggtctcctcagaactgaactattgtatccatctcacactttatgcctcttctttcttaggcaccccgtccctccatccttccagaaccatctttgaggtctcatggctaataaaaacctaggctttacctgttccctctgtaatccctccaaaagatgagacagatctatgcttggtcatccagtaaactgaccagctgtgggcacgcaagtgtgggaggcagaggcatgctcagagctggctgccaggacctctgacttgccttcctttcacccacccccagtgctccacccaggagtcctgcctggaagctggaatgggcaagggctgctggagtgggacagggagaagaggaaggcctg

SEQ ID NO: 47652 - DNA, 3366 bp, Homo sapiens
tgctctgtcccctgcaacaaggagccatgccagctggacacacacttcttccagggcctctggcagccaggacagagttgagaccacagctgttgagaccctgagccctgagtctgtattgctcaagaagggccttccccagcaatgacctcctcattgcttctggcctttctcctcctggctccaaccacagtggccactcccagagctggcggtcagtgtccagcatgtggggggcccaccttggaactggagagccagcgggagctgcttcttgatctggccaagagaagcatcttggacaagctgcacctcacccagcgcccaacactgaaccgccctgtgtccagagctgctttgaggactgcactgcagcacctccacggggtcccacagggggcacttctagaggacaacagggaacaggaatgtgaaatcatcagctttgctgagacaggcctctccaccatcaaccagactcgtcttgattttcacttctcctctgatagaactgctggtgacagggaggtccagcaggccagtctcatgttctttgtgcagctcccttccaataccacttggaccttgaaagtgagagtccttgtgctgggtccacataataccaacctcaccttggctactcagtacctgctggaggtggatgccagtggctggcatcaactccccctagggcctgaagctcaagctgcctgcagccaggggcacctgaccctggagctggtacttgaaggccaggtagcccagagctcagtcatcctgggtggagctgcccataggccttttgtggcagcccgggtgagagttgggggcaaacaccagattcaccgacgaggcatcgactgccaaggagggtccaggatgtgctgtcgacaagagttttttgtggacttccgtgagattggctggcacgactggatcatccagcctgagggctacgccatgaacttctgcatagggcagtgcccactacacatagcaggcatgcctggtattgctgcctcctttcacactgcagtgctcaatcttctcaaggccaacacagctgcaggcaccactggagggggctcatgctgtgtacccacggcccggcgccccctgtctctgctctattatgacagggacagcaacattgtcaagactgacatacctgacatggtagtagaggcctgtgggtgcagttagtctatgtgtggtatgggcagcccaaggttgcatgggaaaacacgcccctacagaagtgcacttccttgagaggagggaatgacctcattctctgtccagaatgtggactccctcttcctgagcatcttatggaaattaccccacctttgacttgaagaaaccttcatctaaagcaagtcactgtgccatcttcctgaccactaccctctttcctagggcatagtccatcccgctagtccatcccgctagccccactccagggactcagacccatctccaaccatgagcaatgccatctggttcccaggcaaagacacccttagctcacctttaatagaccccataacccactatgccttcctgtcctttctactcaatggtccccactccaagatgagttgacacaaccccttcccccaatttttgtggatctccagagaggcccttctttggattcaccaaagtttagatcactgctgcccaaaatagaggcttacctacccccctctttgttgtgagcccctgtccttcttagttgtccaggtgaactactaaagctctctttgcataccttcatccattttttgtccttctctgcctttctctatgcccttaaggggtgacttgcctgagctctatcacctgagctcccctgccctctggcttcctgctgaggtcagggcatttcttatccctgttccctctctgtctaggtgtcatggttctgtgtaactgtggctattctgtgtccctacactacctggctacccccttccatggccccagctctgcctacattctgatataactgcttcaacactagggggtcctaaaggctttctatcttgctagtccctggggcctcaacatctcatactggttcccttaactctgcctatacctctgtaaataattccttcactaagttctcttgatgaagcaaaaacagacagctgaaaagtcctctatctcctacaagggccctaactggcaccccagatgacacagagcctgcctgcttatgctgtagtctgcctactctgctgtctcttcacatggtctcctcagaactgaactattgtatccatctcacactttatgcctcttctttcttaggcaccccgtccctccatccttccagaaccatctttgaggtctcatggctaataaaaacctaggctttacctgttccctctgtaatccctccacgcaagtgtgggaggcagaggcatgctcagagctggctgccaggacctctgacttgccttcctttcacccacccccagtgctccacccaggagtcctgcctggaagctggaatgggcaagggctgctggagtgggacagggagaagaggaaggcctggatgaggagagggtggcatttgctctgagactgggtcctttttagacctttgcccgtcctcccccacatctcctccctttggctggacagtcctgaaccatgaggtcgataatgtctgcagcccaaggccgagtttgcgcaaaacccatgtgttctttggtaaacgtgatgtctgtgtttgctcagtttatgaccccctcctatgagggtaagaggtccctgaaataggaaccctagaggagaaagtctgaaaaggactgcctgggggactgtaaatctgagcttgagggcttcctgagcaacccatggaagttatcccacctttgacttgaggagaccttcatctaaggagaatctaaggaggccttctggtgtctcccccacacatccccgacccccagatctaacctccttcccaattacagcttagtctccagggctaggactggggtaaagcaaagtgagtcattcacctggggggactaaattttaagggggtggtgaacaatttattaatcaagataggactttaatgcaatattattttaaagtcaaaattaatgcaaaaaatccatgatgaacaaaatagcctacttttaaataaaaacaggatcagcattattccctttcttttttggctctgtcttttgtaataaggggagagagtgggtctgtcttcttctaaacattttcttctagagcttcctagctcctacctctggaccccttcaggcttttctcatttgagcaagataaccactcccacttcttctacttccttacccacccccaagcctg

SEQ ID NO: 47653 - DNA, 599 bp, Homo sapiens
gcccattcctgggagtattcagtggaagctagttcttgtgtcactttcttctctgaatgttactgaagattccctgcccttctctggctcctttcaatgctaagattgtatatctataggtgaagacatggaggcagaaataaatgtgtttagttatcgctaagggaaataaacatgatgcaaaacagtgtgctctcaattttgttggaagaatatagttaaattcattgaaaagagatggcaaagaagtgaatattaatgcttggactgtgggagatgttttcacctttggattgttttgatttttccaacttttctacagttgacttattttaaaacccagtaatgtatctgctacatgtgtgaagtactttctctactgaaacaatagattagggcaggggcaggagggagtttttttgtaggtatgtacatagggtgggatggattgcagagggccttgaaagtcaggcaggactgtttagatttgaaggtcactatagtggcaatgaaaatgactttatttgctaaaccaaactcaggactgataatctaacaaacaatagcatgttaatggggataagaggacagaatacagt

SEQ ID NO: 47654 - DNA, 627 bp, Homo sapiens
attttcaccttcaacctatccttcctgaagcccaaacttttaaagaatttacttccagacctggccttcagcctaatatgattagggtgtttttctgagtgtctgtcaaattatgctggctaatttcaatgagaaaagattttagagtcacagtgaacccatccataaaaggactaaaagctctctctggtccctgagatccacaacccctgagagaagccagaactacaaatgcatcgtctagactttgaagaagcagggtatgattcttaatatagctcacccatcgctaagtcaagcctagactctaatatttttctataacaggagaagcctccctgactggagactagagtctcacatcttctgccaccacatgaatagactaaaaagaaaggagagtcccacatcaggccaagtggtgacctgtggctatttcagctcagaatgtcagcctctgaagcatcaggtttgaatgactttggtgtcatgggattctgtccattgtccgtttgagtctgctgacatgcttcctctggaaagtgcagtttggcatggatgagtcagtggttttttattttggggtgttttttaaaaaataaaaatgaattgctttgagaaatttta

SEQ ID NO: 47655 - DNA, 2176 bp, Homo sapiens
acttcccagccggggccagtcgggagcgaaagtgcgctgagctgcagtgtctggtcgagagtacccgtgggagcgtcgcgccgcggaggcagccgtcccggcgtaggtggcgtggccgaccggacccccaactggcgcctctccccgcgcggggtcccgagctaggagatgggaggcacagctcgtgggcctgggcggaaggatgcggggccgcctggggccgggctcccgccccagcagcggaggttgggggatggtgtctatgacaccttcatgatgatagatgaaaccaaatgtcccccctgttcaaatgtactctgcaatccttctgaaccacctccacccagaagactaaatatgaccactgagcagtttacaggagatcatactcagcactttttggatggaggtgagatgaaggtagaacagctgtttcaagaatttggcaacagaaaatccaatactattcagtcagatggcatcagtgactctgaaaaatgctctcctactgtttctcagggtaaaagttcagattgcttgaatacagtaaaatccaacagttcatccaaggcacccaaagtggtgcctctgactccagaacaagccctgaagcaatataaacaccacctcactgcctatgagaaactggaaataattaattatccagaaatttactttgtaggtccaaatgccaagaaaagacatggagttattggtggtcccaataatggagggtatgatgatgcagatggggcctatattcatgtacctcgagaccatctagcttatcgatatgaggtgctgaaaattattggcaaggggagttttgggcaggtggccagggtctatgatcacaaacttcgacagtacgtggccctaaaaatggtgcgcaatgagaagcgctttcatcgtcaagcagctgaggagatccggattttggagcatcttaagaaacaggataaaactggtagtatgaacgttatccacatgctggaaagtttcacattccggaaccatgtttgcatggcctttgaattgctgagcatagacctttatgagctgattaaaaaaaataagtttcagggttttagcgtccagttggtacgcaagtttgcccagtccatcttgcaatctttggatgccctccacaaaaataagattattcactgcgatctgaagccagaaaacattctcctgaaacaccacgggcgcagttcaaccaaggtcattgactttgggtccagctgtttcgagtaccagaagctctacacatatatccagtctcggttctacagagctccagaaatcatcttaggaagccgctacagcacaccaattgacatatggagttttggctgcatccttgcagaacttttaacaggacagcctctcttccctggagaggatgaaggagaccagttggcctgcatgatggagcttctagggatgccaccaccaaaacttctggagcaatccaaacgtgccaagtactttattaattccaagggcataccccgctactgctctgtgactacccaggcagatgggagggttgtgcttgtggggggtcgctcacgtaggggtaaaaagcggggtcccccaggcagcaaagactgggggacagcactgaaagggtgtgatgactacttgtttatagagttcttgaaaaggtgtcttcactgggacccctctgcccgcttgaccccagctcaagcattaagacacccttggattagcaagtctgtccccagacctctcaccaccatagacaaggtgtcagggaaacgggtagttaatcctgcaagtgctttccagggattgggttctaagctgcctccagttgttggaatagccaataagcttaaagctaacttaatgtcagaaaccaatggtagtatacccctatgcagtgtattgccaaaactgattagctagtggacagagatatgcccagagatgcatatgtgtatatttttatgatcttacaaacctgcaaatggaaaaaatgcaagcccattggtggatgtttttgttagagtagactttttttaaacaagacaaaacatttttatatgattataaaagaattcttcaagggctaattacctaaccagcttgtattggccatctggaatatgcattaaatgactttttataggtcaatgcaaaaaaaaaa

SEQ ID NO: 47656 - DNA, 2270 bp, Homo sapiens
acttcccagccggggccagtcgggagcgaaagtgcgctgagctgcagtgtctggtcgagagtacccgtgggagcgtcgcgccgcggaggcagccgtcccggcgtaggtggcgtggccgaccggacccccaactggcgcctctccccgcgcggggtcccgagctaggagatgggaggcacagctcgtgggcctgggcggaaggatgcggggccgcctggggccgggctcccgccccagcagcggagtggtggagccacagtgttaaagaacagagaagtgatccttaatcatttagaattttgcctccaccatccaccagaaaatgaagtggaaagagaagttgggggatggtgtctatgacaccttcatgatgatagatgaaaccaaatgtcccccctgttcaaatgtactctgcaatccttctgaaccacctccacccagaagactaaatatgaccactgagcagtttacaggagatcatactcagcactttttggatggaggtgagatgaaggtagaacagctgtttcaagaatttggcaacagaaaatccaatactattcagtcagatggcatcagtgactctgaaaaatgctctcctactgtttctcagggtaaaagttcagattgcttgaatacagtaaaatccaacagttcatccaaggcacccaaagtggtgcctctgactccagaacaagccctgaagcaatataaacaccacctcactgcctatgagaaactggaaataattaattatccagaaatttactttgtaggtccaaatgccaagaaaagacatggagttattggtggtcccaataatggagggtatgatgatgcagatggggcctatattcatgtacctcgagaccatctagcttatcgatatgaggtgctgaaaattattggcaaggggagttttgggcaggtggccagggtctatgatcacaaacttcgacagtacgtggccctaaaaatggtgcgcaatgagaagcgctttcatcgtcaagcagctgaggagatccggattttggagcatcttaagaaacaggataaaactggtagtatgaacgttatccacatgctggaaagtttcacattccggaaccatgtttgcatggcctttgaattgctgagcatagacctttatgagctgattaaaaaaaataagtttcagggttttagcgtccagttggtacgcaagtttgcccagtccatcttgcaatctttggatgccctccacaaaaataagattattcactgcgatctgaagccagaaaacattctcctgaaacaccacgggcgcagttcaaccaaggtcattgactttgggtccagctgtttcgagtaccagaagctctacacatatatccagtctcggttctacagagctccagaaatcatcttaggaagccgctacagcacaccaattgacatatggagttttggctgcatccttgcagaacttttaacaggacagcctctcttccctggagaggatgaaggagaccagttggcctgcatgatggagcttctagggatgccaccaccaaaacttctggagcaatccaaacgtgccaagtactttattaattccaagggcataccccgctactgctctgtgactacccaggcagatgggagggttgtgcttgtggggggtcgctcacgtaggggtaaaaagcggggtcccccaggcagcaaagactgggggacagcactgaaagggtgtgatgactacttgtttatagagttcttgaaaaggtgtcttcactgggacccctctgcccgcttgaccccagctcaagcattaagacacccttggattagcaagtctgtccccagacctctcaccaccatagacaaggtgtcagggaaacgggtagttaatcctgcaagtgctttccagggattgggttctaagctgcctccagttgttggaatagccaataagcttaaagctaacttaatgtcagaaaccaatggtagtatacccctatgcagtgtattgccaaaactgattagctagtggacagagatatgcccagagatgcatatgtgtatatttttatgatcttacaaacctgcaaatggaaaaaatgcaagcccattggtggatgtttttgttagagtagactttttttaaacaagacaaaacatttttatatgattataaaagaattcttcaagggctaattacctaaccagcttgtattggccatctggaatatgcattaaatgactttttataggtcaatgcaaaaaaaaaa

SEQ ID NO: 47657 - DNA, 1040 bp, Homo sapiens
acttcccagccggggccagtcgggagcgaaagtgcgctgagctgcagtgtctggtcgagagtacccgtgggagcgtcgcgccgcggaggcagccgtcccggcgtaggtggcgtggccgaccggacccccaactggcgcctctccccgcgcggggtcccgagctaggagatgggaggcacagctcgtgggcctgggcggaaggatgcggggccgcctggggccgggctcccgccccagcagcggagtggtggagccacagtgttaaagaacagagaagtgatccttaatcatttagaattttgcctccaccatccaccagaaaatgaagtggaaagagaagttgggggatggtgtctatgacaccttcatgatgatagatgaaaccaaatgtcccccctgttcaaatgtactctgcaatccttctgaaccacctccacccagaagactaaatatgctgagagatgttacatgtcttgctcaaggtaacccagttggaggacagtcttggcttcagctcatttgtctctagatcctgtcatcttaccactgtgccttgctgcctctgaaaaggcagaaggaagttattctctttctagctttgtggagaaaagcaggtgatacctcaacaccaagccatagggagcttccagtgactctgcaaagaaaaaaaagaccaactcagactccagagcagccccaccagagcctgagcagttggagccttccaccttcccacccctgcgttcctcttgtccttgggcatctcctgtgtgtgcttcggggaggtgatagcagtgctatagaagtagtggagtgaagatgttttcctatccccgtggccttagatagtgtctttgtctttgaagagtcaggggcatctggggagctgtctaaccgtatctatcctgtagactcgggaggaagctgctggctgctgtagacagaagagaatccctgtgcttcgggctcctaggaaggtgtctgccatcctctctgtgccactgttatctgtcttcttccccatcagataacaccatcca

SEQ ID NO: 47658 - DNA, 2325 bp, Homo sapiens
acttcccagccggggccagtcgggagcgaaagtgcgctgagctgcagtgtctggtcgagagtacccgtgggagcgtcgcgccgcggaggcagccgtcccggcgtaggtggcgtggccgaccggacccccaactggcgcctctccccgcgcggggtcccgagctaggagatgggaggcacagctcgtgggcctgggcggaaggatgcggggccgcctggggccgggctcccgccccagcagcggaggtaacggcgccacggggtaacgggctggaggcgccacagggagcggctggcgctgtggtggagccacagtgttaaagaacagagaagtgatccttaatcatttagaattttgcctccaccatccaccagaaaatgaagtggaaagagaagttgggggatggtgtctatgacaccttcatgatgatagatgaaaccaaatgtcccccctgttcaaatgtactctgcaatccttctgaaccacctccacccagaagactaaatatgaccactgagcagtttacaggagatcatactcagcactttttggatggaggtgagatgaaggtagaacagctgtttcaagaatttggcaacagaaaatccaatactattcagtcagatggcatcagtgactctgaaaaatgctctcctactgtttctcagggtaaaagttcagattgcttgaatacagtaaaatccaacagttcatccaaggcacccaaagtggtgcctctgactccagaacaagccctgaagcaatataaacaccacctcactgcctatgagaaactggaaataattaattatccagaaatttactttgtaggtccaaatgccaagaaaagacatggagttattggtggtcccaataatggagggtatgatgatgcagatggggcctatattcatgtacctcgagaccatctagcttatcgatatgaggtgctgaaaattattggcaaggggagttttgggcaggtggccagggtctatgatcacaaacttcgacagtacgtggccctaaaaatggtgcgcaatgagaagcgctttcatcgtcaagcagctgaggagatccggattttggagcatcttaagaaacaggataaaactggtagtatgaacgttatccacatgctggaaagtttcacattccggaaccatgtttgcatggcctttgaattgctgagcatagacctttatgagctgattaaaaaaaataagtttcagggttttagcgtccagttggtacgcaagtttgcccagtccatcttgcaatctttggatgccctccacaaaaataagattattcactgcgatctgaagccagaaaacattctcctgaaacaccacgggcgcagttcaaccaaggtcattgactttgggtccagctgtttcgagtaccagaagctctacacatatatccagtctcggttctacagagctccagaaatcatcttaggaagccgctacagcacaccaattgacatatggagttttggctgcatccttgcagaacttttaacaggacagcctctcttccctggagaggatgaaggagaccagttggcctgcatgatggagcttctagggatgccaccaccaaaacttctggagcaatccaaacgtgccaagtactttattaattccaagggcataccccgctactgctctgtgactacccaggcagatgggagggttgtgcttgtggggggtcgctcacgtaggggtaaaaagcggggtcccccaggcagcaaagactgggggacagcactgaaagggtgtgatgactacttgtttatagagttcttgaaaaggtgtcttcactgggacccctctgcccgcttgaccccagctcaagcattaagacacccttggattagcaagtctgtccccagacctctcaccaccatagacaaggtgtcagggaaacgggtagttaatcctgcaagtgctttccagggattgggttctaagctgcctccagttgttggaatagccaataagcttaaagctaacttaatgtcagaaaccaatggtagtatacccctatgcagtgtattgccaaaactgattagctagtggacagagatatgcccagagatgcatatgtgtatatttttatgatcttacaaacctgcaaatggaaaaaatgcaagcccattggtggatgtttttgttagagtagactttttttaaacaagacaaaacatttttatatgattataaaagaattcttcaagggctaattacctaaccagcttgtattggccatctggaatatgcattaaatgactttttataggtcaatgcaaaaaaaaaa

SEQ ID NO: 47659 - DNA, 2711 bp, Homo sapiens
acttcccagccggggccagtcgggagcgaaagtgcgctgagctgcagtgtctggtcgagagtacccgtgggagcgtcgcgccgcggaggcagccgtcccggcgtaggtggcgtggccgaccggacccccaactggcgcctctccccgcgcggggtcccgagctaggagatgggaggcacagctcgtgggcctgggcggaaggatgcggggccgcctggggccgggctcccgccccagcagcggaggtaacggcgccacggggtaacgggctggaggcgccacagggagcggctggcgctggcaagcgaagcttgggggtggggaggtagagtgagccctcagtaggagggacgagggcaggggtctgactgcctccccgggaccgcccccacctcctctctatcagggccccctccccccatccctgtctcaccgggcgcgggggacggggctagagcggagttagagcaagaagaatttccacccctggattccctctgaaaccctagatcggggtatatgttaagggattacgaaaatctaggactttttgtggggctttttattaaagggggggagcccgggagcaataccttggaaagaagccctgttgcttagagcggataaccaacggctgaactcttggggtttgctgtgaggggtgcggtctagcttcgaatgtacagtggtggagccacagtgttaaagaacagagaagtgatccttaatcatttagaattttgcctccaccatccaccagaaaatgaagtggaaagagaagttgggggatggtgtctatgacaccttcatgatgatagatgaaaccaaatgtcccccctgttcaaatgtactctgcaatccttctgaaccacctccacccagaagactaaatatgaccactgagcagtttacaggagatcatactcagcactttttggatggaggtgagatgaaggtagaacagctgtttcaagaatttggcaacagaaaatccaatactattcagtcagatggcatcagtgactctgaaaaatgctctcctactgtttctcagggtaaaagttcagattgcttgaatacagtaaaatccaacagttcatccaaggcacccaaagtggtgcctctgactccagaacaagccctgaagcaatataaacaccacctcactgcctatgagaaactggaaataattaattatccagaaatttactttgtaggtccaaatgccaagaaaagacatggagttattggtggtcccaataatggagggtatgatgatgcagatggggcctatattcatgtacctcgagaccatctagcttatcgatatgaggtgctgaaaattattggcaaggggagttttgggcaggtggccagggtctatgatcacaaacttcgacagtacgtggccctaaaaatggtgcgcaatgagaagcgctttcatcgtcaagcagctgaggagatccggattttggagcatcttaagaaacaggataaaactggtagtatgaacgttatccacatgctggaaagtttcacattccggaaccatgtttgcatggcctttgaattgctgagcatagacctttatgagctgattaaaaaaaataagtttcagggttttagcgtccagttggtacgcaagtttgcccagtccatcttgcaatctttggatgccctccacaaaaataagattattcactgcgatctgaagccagaaaacattctcctgaaacaccacgggcgcagttcaaccaaggtcattgactttgggtccagctgtttcgagtaccagaagctctacacatatatccagtctcggttctacagagctccagaaatcatcttaggaagccgctacagcacaccaattgacatatggagttttggctgcatccttgcagaacttttaacaggacagcctctcttccctggagaggatgaaggagaccagttggcctgcatgatggagcttctagggatgccaccaccaaaacttctggagcaatccaaacgtgccaagtactttattaattccaagggcataccccgctactgctctgtgactacccaggcagatgggagggttgtgcttgtggggggtcgctcacgtaggggtaaaaagcggggtcccccaggcagcaaagactgggggacagcactgaaagggtgtgatgactacttgtttatagagttcttgaaaaggtgtcttcactgggacccctctgcccgcttgaccccagctcaagcattaagacacccttggattagcaagtctgtccccagacctctcaccaccatagacaaggtgtcagggaaacgggtagttaatcctgcaagtgctttccagggattgggttctaagctgcctccagttgttggaatagccaataagcttaaagctaacttaatgtcagaaaccaatggtagtatacccctatgcagtgtattgccaaaactgattagctagtggacagagatatgcccagagatgcatatgtgtatatttttatgatcttacaaacctgcaaatggaaaaaatgcaagcccattggtggatgtttttgttagagtagactttttttaaacaagacaaaacatttttatatgattataaaagaattcttcaagggctaattacctaaccagcttgtattggccatctggaatatgcattaaatgactttttataggtcaatgcaaaaaaaaaa

SEQ ID NO: 47660 - DNA, 2310 bp, Homo sapiens
acttcccagccggggccagtcgggagcgaaagtgcgctgagctgcagtgtctggtcgagagtacccgtgggagcgtcgcgccgcggaggcagccgtcccggcgtaggtggcgtggccgaccggacccccaactggcgcctctccccgcgcggggtcccgagctaggagatgggaggcacagctcgtgggcctgggcggaaggatgcggggccgcctggggccgggctcccgccccagcagcggagtggtggagccacagtgttaaagaacagagaagtgatccttaatcatttagaattttgcctccaccatccaccagaaaatgaagtggaaagagaagttgggggatggtgtctatgacaccttcatgatgatagatgaaaccaaatgtcccccctgttcaaatgtactctgcaatccttctgaaccacctccacccagaagactaaatatgaccactgagcagtttacaggagatcatactcagcactttttggatggaggtgagatgaaggtagaacagctgtttcaagaatttggcaacagaaaatccaatactattcagtcagatggcatcagtgactctgaaaaatgctctcctactgtttctcagggtaaaagttcagattgcttgaatacagtaaaatccaacagttcatccaaggcacccaaagtggtgcctctgactccagaacaagccctgaagcaatataaacaccacctcactgcctatgagaaactggaaataattaattatccagaaatttactttgtaggtccaaatgccaagaaaagacatggagttattggtggtcccaataatggagggtatgatgatgcagatggggcctatattcatgtacctcgagaccatctagcttatcgatatgaggtgctgaaaattattggcaaggggagttttgggcaggtggccagggtctatgatcacaaacttcgacagtacgtggccctaaaaatggtgcgcaatgagaagcgctttcatcgtcaagcagctgaggagatccggattttggagcatcttaagaaacaggataaaactggtagtatgaacgttatccacatgctggaaagtttcacattccggaaccatgtttgcatggcctttgaattgctgagcatagacctttatgagctgattaaaaaaaataagtttcagggttttagcgtccagttggtacgcaagtttgcccagtccatcttgcaatctttggatgccctccacaaaaataagattattcactgcgatctgaagccagaaaacattctcctgaaacaccacgggcgcagttcaaccaaggtcattgactttgggtccagctgtttcgagtaccagaagctctacacatatatccagtctcggttctacagagctccagaaatcatcttaggaagccgctacagcacaccaattgacatatggagttttggctgcatccttgcagaacttttaacaggacagcctctcttccctggagaggatgaaggagaccagttggcctgcatgatggagcttctagggatgccaccaccaaaacttctggagcaatccaaacgtgccaagtactttattaattccaagggcataccccgctactgctctgtgactacccaggcagatgggagggttgtgcttgtggggggtcgctcacgtaggggtaaaaagcggggtcccccaggcagcaaagactgggggacagcactgaaagggtgtgatgactacttgtttatagagttcttgaaaaggtgtcttcactgggacccctctgcccgcttgaccccagctcaagcattaagacacccttggattagcaagtctgtccccagacctctcaccaccatagacaaggtgtcagggaaacgggtagttaatcctgagagaagccagaactacaaatgcatcgtctagactttgaagaagcagggtatgattcttaatatagctcacccatcgctaagtcaagcctagactctaatatttttctataacaggagaagcctccctgactggagactagagtctcacatcttctgccaccacatgaatagactaaaaagaaaggagagtcccacatcaggccaagtggtgacctgtggctatttcagctcagaatgtcagcctctgaagcatcaggtttgaatgactttggtgtcatgggattctgtccattgtccgtttgagtctgctgacatgcttcctctggaaagtgcagtttggcatggatgagtcagtggttttttattttggggtgttttttaaaaaataaaaatgaattgctttgagaaatttta

SEQ ID NO: 47661 - DNA, 521 bp, Homo sapiens
tcgggtgggaaagaagttgagctgtgaattctcctttcttcatgaaacttacaaattgttttcatatagcattttccatgaaagtttggaatatttatgccaagaatgagcaagttgctaaaacagtctcccttttcatgtcataaaaaagttgacatcgtctaaccagtccttcatttgtcagtgccattatagcaagggtccatgtgggtgacaaaaagtggatggtgtgcccaggaaactgggcaagatggtcacaaggctcttctgagctggtgctaaggggttcctcaagtcaacacacaaatttcaatttcaaggaccataactgtcctatatatttttttcttactctgtctattattcaaagccatccctgatacagtttttgttggggatgaggtgaactgtgtgacagtggggaaagggatggaattgaaacagcatcagtgcaagctttgggacagtctttaaaaaatgataatacaccatccaaatgatttaccaataggtcttctaaa

SEQ ID NO: 47662 - DNA, 1166 bp, Homo sapiens
  misc_feature (980)..(980): n is a, c, g, or t
  misc_feature (986)..(986): n is a, c, g, or t
  misc_feature (991)..(991): n is a, c, g, or t
  misc_feature (997)..(997): n is a, c, g, or t
  misc_feature (1010)..(1010): n is a, c, g, or t
tccaaattgtttatttatatatacaaagaattatcagggttttccatggagtaaatgccccggataatcctctgaaggaagagcatttagtccaacttaatgaaaccgatatccttcgcgtactggacggaaacactggcggcacatatggaggccatattcccggatcagaccgtgccggtttgaacagacacgacaagagcgagaacccgggccgaatttacgcgggtggctccagtacagctgctggtgacccatctttgctctcagccgcacggatcatggccgcagccgctctggggcagatctgggcacgaaagcttctctctgtcccttggcttctgtgtggtcccagaagatatgcctcctccagtttcaaggctgcagacctgcagctggaaatgacacagaagcctcataagaagcctggccccggcgagcccctggtgtttgggaagacatttaccgaccacatgctgatggtggaatggaatgacaagggctggggccagccccgaatccagcccttccagaacctcacgctgcacccagcctcctccagcctccactactccctgcagctgtttgagggcatgaaggcgttcaaaggcaaagaccagcaggtgcgcctcttccgcccctggctcaacatggaccggatgctgcgctcagccatgcgcctgtgcctgccgagtttcgacaagctggagttgctggagtgcatccgccggctcatcgaagtggacaaggactgggtccccgatgccgccggcaccagcctctatgtgcggcctgtgctcattgggaacgagccctcgctgggtgtcagccagcccacgcgcgcgctcctgttcgtcattctctgcccagtgggtgcctacttccctggaggctccgtgaccccggtctccctcctggccgacccagccttcatccgggcctgggtgggcggggtcggcaactacaagttaggtggaatntggccncggtngtgccngagcctcaggggnggacagtcttgctgtggccgccccagtccggggactgtttgtccggccccatggtgcgtggccccgtgtgttcgggcatccggctgcccgggcgtgtcgcacatggcggggcgtactgggcccatctcttcgcgctaacagtctctctgtcctctt

SEQ ID NO: 47663 - DNA, 1599 bp, Homo sapiens
  misc_feature (14)..(14): n is a, c, g, or t
tttgttttttatanaaagtttgttaaaaagaggtggtccggtccggattcccgggatcatggccgcagccgctctggggcagatctgggcacgaaagcttctctctgtcccttggcttctgtgtggtcccagaagatatgcctcctccagtttcaaggctgcagacctgcagctggaaatgacacagaagcctcataagaagcctggccccggcgagcccctggtgtttgggaagacatttaccgaccacatgctgatggtggaatggaatgacaagggctggggccagccccgaatccagcccttccagaacctcacgctgcacccagcctcctccagcctccactactccctgcagctgtttgagggcatgaaggcgttcaaaggcaaagaccagcaggtgcgcctcttccgcccctggctcaacatggaccggatgctgcgctcagccatgcgcctgtgcctgccgagtttcgacaagctggagttgctggagtgcatccgccggctcatcgaagtggacaaggactgggtccccgatgccgccggcaccagcctctatgtgcggcctgtgctcattgggaacgagccctcgctgggtgtcagccagcccacgcgcgcgctcctgttcgtcattctctgcccagtgggtgcctacttccctggaggctccgtgaccccggtctccctcctggccgacccagccttcatccgggcctgggtgggcggggtcggcaactacaagttaggtgggaattatgggcccaccgtgttagtgcaacaggaggcactcaagcggggctgtgaacaggtcctctggctgtatgggcccgaccaccagctcaccgaggtgggaaccatgaacatctttgtctactggacccacgaagatggggtgctggagctggtgacgcccccgctgaatggtgttatcctgcctggagtggtcagacagagtctactggacatggctcagacctggggtgagttccgggtggtggagcgcacgatcaccatgaagcagttgctgcgggccctggaggagggccgcgtgcgggaagtctttggctcgggcaccgcttgccaggtctgcccagtgcaccgaatcctgtacaaagacaggaacctccacattcccaccatggaaaatgggcctgagctgatcctccgcttccagaaggagctgaaggagatccagtacggaatcagagcccacgagtggatgttcccggtgtgaagctgcaggctgtgctccagatccaccgacccgtagcatctcgtcacgccagcactcgcctccctaccaatgactcacctgaagtgcaatacgaaataaaaggccagcgggcggcgtctgggtctctggcgcccccatgtggttgcgacactcccaaagccgtaagggccgacccaggcatcttggcccccagcccctcgtcgcgggttcaggtccgcccattactccttgtcgtgcggtcaaggatacaccttggccccgattccggatctctccgttctcaggccagacccctggtgctgccgttgatttttttttctctgtctttgctgcaattttgaaataaaatgccaaagaacaca

SEQ ID NO: 47664 - DNA, 1822 bp, Homo sapiens
tccaaattgtttatttatatatacaaagaattatcagggttttccatggagtaaatgccccggataatcctctgaaggaagagcatttagtccaacttaatgaaaccgatatccttcgcgtactggacggaaacactggcggcacatatggaggccatattcccggatcagaccgtgccggtttgaacagacacgacaagagcgagaacccgggccgaatttacgcgggtggctccagtacagctgctggtgacccatctttgctctcagccgcacggatcatggccgcagccgctctggggcagatctgggcacgaaagcttctctctgtcccttggcttctgtgtggtcccagaagatatgcctcctccagtttcaaggctgcagacctgcagctggaaatgacacagaagcctcataagaagcctggccccggcgagcccctggtgtttgggaagacatttaccgaccacatgctgatggtggaatggaatgacaagggctggggccagccccgaatccagcccttccagaacctcacgctgcacccagcctcctccagcctccactactccctgcagctgtttgagggcatgaaggcgttcaaaggcaaagaccagcaggtgcgcctcttccgcccctggctcaacatggaccggatgctgcgctcagccatgcgcctgtgcctgccgagtttcgacaagctggagttgctggagtgcatccgccggctcatcgaagtggacaaggactgggtccccgatgccgccggcaccagcctctatgtgcggcctgtgctcattgggaacgagccctcgctgggtgtcagccagcccacgcgcgcgctcctgttcgtcattctctgcccagtgggtgcctacttccctggaggctccgtgaccccggtctccctcctggccgacccagccttcatccgggcctgggtgggcggggtcggcaactacaagttaggtgggaattatgggcccaccgtgttagtgcaacaggaggcactcaagcggggctgtgaacaggtcctctggctgtatgggcccgaccaccagctcaccgaggtgggaaccatgaacatctttgtctactggacccacgaagatggggtgctggagctggtgacgcccccgctgaatggtgttatcctgcctggagtggtcagacagagtctactggacatggctcagacctggggtgagttccgggtggtggagcgcacgatcaccatgaagcagttgctgcgggccctggaggagggccgcgtgcgggaagtctttggctcgggcaccgcttgccaggtctgcccagtgcaccgaatcctgtacaaagacaggaacctccacattcccaccatggaaaatgggcctgagctgatcctccgcttccagaaggagctgaaggagatccagtacggaatcagagcccacgagtggatgttcccggtgtgaagctgcaggctgtgctccagatccaccgacccgtagcatctcgtcacgccagcactcgcctccctaccaatgactcacctgaagtgcaatacgaaataaaaggccagcgggcggcgtctgggtctctggcgcccccatgtggttgcgacactcccaaagccgtaagggccgacccaggcatcttggcccccagcccctcgtcgcgggttcaggtccgcccattactccttgtcgtgcggtcaaggatacaccttggccccgattccggatctctccgttctcaggccagacccctggtgctgccgttgatttttttttctctgtctttgctgcaattttgaaataaaatgccaaagaacaca

SEQ ID NO: 47665 - DNA, 2209 bp, Homo sapiens
aatttgagacggagtctcactctgtcgcccaggctggagtgctgtggtgcaatgtcggctcactgcaacctccgcctcccgggttcaagcgattctcctgcctcagcctcccgaatagctgggattacaggcccccggcaccacggcccggctaattttttgtatttttagtagagacggggtttcatcatgttggaccaggctggtctctaactcctgacctcaggtaatccgcccgcttcggcctcccaaagtgctaagattacagacctgagccacttcgcctggcagggaccgtatttcaagtcctgccctcccaccagcgcctgcgccccgcagcagtgtccggctccctgccgacgccctggagctgggacggcctggggcgctggtcggccgccttcccccagaaggaggcgtgagcggggcgtggccggaacgtctctcttcggagccgcgccccgggcgggcacagttacgcgccgcacggatcatggccgcagccgctctggggcaggtgggttcgcagccccgcgccggggtctgggaaataaccgggggaggcgcacttccgggaagaccactggcctgcagccggtccgactcggcgccgctcctcccgccctggggttccgctgcagggcgcggaggaggatggcgccctttggaaaggagcacgaggctttaatgggatctgggcacgaaagcttctctctgtcccttggcttctgtgtggtcccagaagatatgcctcctccagtttcaaggctgcagacctgcagctggaaatgacacagaagcctcataagaagcctggccccggcgagcccctggtgtttgggaagacatttaccgaccacatgctgatggtggaatggaatgacaagggctggggccagccccgaatccagcccttccagaacctcacgctgcacccagcctcctccagcctccactactccctgcagctgtttgagggcatgaaggcgttcaaaggcaaagaccagcaggtgcgcctcttccgcccctggctcaacatggaccggatgctgcgctcagccatgcgcctgtgcctgccgagtttcgacaagctggagttgctggagtgcatccgccggctcatcgaagtggacaaggactgggtccccgatgccgccggcaccagcctctatgtgcggcctgtgctcattgggaacgagccctcgctgggtgtcagccagcccacgcgcgcgctcctgttcgtcattctctgcccagtgggtgcctacttccctggaggctccgtgaccccggtctccctcctggccgacccagccttcatccgggcctgggtgggcggggtcggcaactacaagttaggtgggaattatgggcccaccgtgttagtgcaacaggaggcactcaagcggggctgtgaacaggtcctctggctgtatgggcccgaccaccagctcaccgaggtgggaaccatgaacatctttgtctactggacccacgaagatggggtgctggagctggtgacgcccccgctgaatggtgttatcctgcctggagtggtcagacagagtctactggacatggctcagacctggggtgagttccgggtggtggagcgcacgatcaccatgaagcagttgctgcgggccctggaggagggccgcgtgcgggaagtctttggctcgggcaccgcttgccaggtctgcccagtgcaccgaatcctgtacaaagacaggaacctccacattcccaccatggaaaatgggcctgagctgatcctccgcttccagaaggagctgaaggagatccagtacggaatcagagcccacgagtggatgttcccggtgtgaagctgcaggctgtgctccagatccaccgacccgtagcatctcgtcacgccagcactcgcctccctaccaatgactcacctgaagtgcaatacgaaataaaaggccagcgggcggcgtctgggtctctggcgcccccatgtggttgcgacactcccaaagccgtaagggccgacccaggcatcttggcccccagcccctcgtcgcgggttcaggtccgcccattactccttgtcgtgcggtcaaggatacaccttggccccgattccggatctctccgttctcaggccagacccctggtgctgccgttgatttttttttctctgtctttgctgcaattttgaaataaaatgccaaagaacaca

SEQ ID NO: 47666 - DNA, 2846 bp, Homo sapiens
gggcatcagcctgtgcgggagctggaataaaggggcccagacctccagggccgggtgcaggtgaaggcagagttggacctcaagtctcagctctgggaattggactcaaggtcctattttcttggaatgaaagttgaaaaaaataagagatggggattgctgtgcttcccaaactcctatctgaagctttgcacctggattggaaatcgaggcagcgtctcatggtcaaagtgacagatgctgcaggctggctgagacgatcccttctgactgtgcgatgtcaaacagcagcagcgtttcccagactagcgacaagtgaccacgcccattcacgtccatcttccagaatcagtgccaactcacccagctcacagggcaggccaggccaggccactctgtctctctcaacctcacgccccaacgcctccccacagggctggggaaagaggccttgtgaggtcaaaggtcaccagagagggcccagcctgctggacacagccagacctgctcttcctactcccctctgggaggacccgcctgagcctcatgcagtgaggactgcagtggctccccaggcccctgtagctgcccctcagccccaggggctgaagggaattggagtcactgccaaaatgggtttgtatttcaggtaatcagagcccagttgatcgaataccttcagagaataagcacctgtactcctgggtctggcggaggaggggctggggaactggactcctgggtctgagggaggaggggtggggcccgtactcctggatgtaagggaggagggtctgaggcctggactccagggtctgagggaggaggggctgggggcccagacttcgggtctgagggaggaggcagctagagtctggactcttacttaggtctgaaggaggcgggcctggggtctgcacccctgagctctgggggagcaggacctgtcggtccttggtcttctaaggcctgtcagcacttgggtacccggaggccttcacttacctgtgtgccttccctggttgttttcttgtctgagctgatttccaggctgcgaccaaaggtctctggggtgggaggcgcttgcgtttgactttgccgcagcatggaggagggggcgggagctgactcagctctttccagcgagccctcgtcagggcagggaggggacttggcctccttcaggaccacctgccccgtctagaatggactgaaactgggacagaacaggcaggccagtgggacctccaagtgcaggaggtggcgagcgagctgccagggcccctgctgtgccccactcaccccctctctcacttctttctccacccaatctgggcacgaaagcttctctctgtcccttggcttctgtgtggtcccagaagatatgcctcctccagtttcaaggctgcagacctgcagctggaaatgacacagaagcctcataagaagcctggccccggcgagcccctggtgtttgggaagacatttaccgaccacatgctgatggtggaatggaatgacaagggctggggccagccccgaatccagcccttccagaacctcacgctgcacccagcctcctccagcctccactactccctgcagctgtttgagggcatgaaggcgttcaaaggcaaagaccagcaggtgcgcctcttccgcccctggctcaacatggaccggatgctgcgctcagccatgcgcctgtgcctgccgagtttcgacaagctggagttgctggagtgcatccgccggctcatcgaagtggacaaggactgggtccccgatgccgccggcaccagcctctatgtgcggcctgtgctcattgggaacgagccctcgctgggtgtcagccagcccacgcgcgcgctcctgttcgtcattctctgcccagtgggtgcctacttccctggaggctccgtgaccccggtctccctcctggccgacccagccttcatccgggcctgggtgggcggggtcggcaactacaagttaggtgggaattatgggcccaccgtgttagtgcaacaggaggcactcaagcggggctgtgaacaggtcctctggctgtatgggcccgaccaccagctcaccgaggtgggaaccatgaacatctttgtctactggacccacgaagatggggtgctggagctggtgacgcccccgctgaatggtgttatcctgcctggagtggtcagacagagtctactggacatggctcagacctggggtgagttccgggtggtggagcgcacgatcaccatgaagcagttgctgcgggccctggaggagggccgcgtgcgggaagtctttggctcgggcaccgcttgccaggtctgcccagtgcaccgaatcctgtacaaagacaggaacctccacattcccaccatggaaaatgggcctgagctgatcctccgcttccagaaggagctgaaggagatccagtacggaatcagagcccacgagtggatgttcccggtgtgaagctgcaggctgtgctccagatccaccgacccgtagcatctcgtcacgccagcactcgcctccctaccaatgactcacctgaagtgcaatacgaaataaaaggccagcgggcggcgtctgggtctctggcgcccccatgtggttgcgacactcccaaagccgtaagggccgacccaggcatcttggcccccagcccctcgtcgcgggttcaggtccgcccattactccttgtcgtgcggtcaaggatacaccttggccccgattccggatctctccgttctcaggccagacccctggtgctgccgttgatttttttttctctgtctttgctgcaattttgaaataaaatgccaaagaacaca

SEQ ID NO: 47667 - DNA, 1600 bp, Homo sapiens
  misc_feature (1)..(2): n is a, c, g, or t
  misc_feature (5)..(5): n is a, c, g, or t
  misc_feature (8)..(8): n is a, c, g, or t
  misc_feature (14)..(14): n is a, c, g, or t
nnccnttntttgantcctctacactgttggcctactgacagttacgcgccgcacggatcatggccgcagccgctctggggcagatctgggcacgaaagcttctctctgtcccttggcttctgtgtggtcccagaagatatgcctcctccagtttcaaggctgcagacctgcagctggaaatgacacagaagcctcataagaagcctggccccggcgagcccctggtgtttgggaagacatttaccgaccacatgctgatggtggaatggaatgacaagggctggggccagccccgaatccagcccttccagaacctcacgctgcacccagcctcctccagcctccactactccctgcagctgtttgagggcatgaaggcgttcaaaggcaaagaccagcaggtgcgcctcttccgcccctggctcaacatggaccggatgctgcgctcagccatgcgcctgtgcctgccgagtttcgacaagctggagttgctggagtgcatccgccggctcatcgaagtggacaaggactgggtccccgatgccgccggcaccagcctctatgtgcggcctgtgctcattgggaacgagccctcgctgggtgtcagccagcccacgcgcgcgctcctgttcgtcattctctgcccagtgggtgcctacttccctggaggctccgtgaccccggtctccctcctggccgacccagccttcatccgggcctgggtgggcggggtcggcaactacaagttaggtgggaattatgggcccaccgtgttagtgcaacaggaggcactcaagcggggctgtgaacaggtcctctggctgtatgggcccgaccaccagctcaccgaggtgggaaccatgaacatctttgtctactggacccacgaagatggggtgctggagctggtgacgcccccgctgaatggtgttatcctgcctggagtggtcagacagagtctactggacatggctcagacctggggtgagttccgggtggtggagcgcacgatcaccatgaagcagttgctgcgggccctggaggagggccgcgtgcgggaagtctttggctcgggcaccgcttgccaggtctgcccagtgcaccgaatcctgtacaaagacaggaacctccacattcccaccatggaaaatgggcctgagctgatcctccgcttccagaaggagctgaaggagatccagtacggaatcagagcccacgagtggatgttcccggtgtgaagctgcaggctgtgctccagatccaccgacccgtagcatctcgtcacgccagcactcgcctccctaccaatgactcacctgaagtgcaatacgaaataaaaggccagcgggcggcgtctgggtctctggcgcccccatgtggttgcgacactcccaaagccgtaagggccgacccaggcatcttggcccccagcccctcgtcgcgggttcaggtccgcccattactccttgtcgtgcggtcaaggatacaccttggccccgattccggatctctccgttctcaggccagacccctggtgctgccgttgatttttttttctctgtctttgctgcaattttgaaataaaatgccaaagaacaca

SEQ ID NO: 47668 - DNA, 2034 bp, Homo sapiens
aatttgagacggagtctcactctgtcgcccaggctggagtgctgtggtgcaatgtcggctcactgcaacctccgcctcccgggttcaagcgattctcctgcctcagcctcccgaatagctgggattacaggcccccggcaccacggcccggctaattttttgtatttttagtagagacggggtttcatcatgttggaccaggctggtctctaactcctgacctcaggtaatccgcccgcttcggcctcccaaagtgctaagattacagacctgagccacttcgcctggcagggaccgtatttcaagtcctgccctcccaccagcgcctgcgccccgcagcagtgtccggctccctgccgacgccctggagctgggacggcctggggcgctggtcggccgccttcccccagaaggaggcgtgagcggggcgtggccggaacgtctctcttcggagccgcgccccgggcgggcacagttacgcgccgcacggatcatggccgcagccgctctggggcagatctgggcacgaaagcttctctctgtcccttggcttctgtgtggtcccagaagatatgcctcctccagtttcaaggctgcagacctgcagctggaaatgacacagaagcctcataagaagcctggccccggcgagcccctggtgtttgggaagacatttaccgaccacatgctgatggtggaatggaatgacaagggctggggccagccccgaatccagcccttccagaacctcacgctgcacccagcctcctccagcctccactactccctgcagctgtttgagggcatgaaggcgttcaaaggcaaagaccagcaggtgcgcctcttccgcccctggctcaacatggaccggatgctgcgctcagccatgcgcctgtgcctgccgagtttcgacaagctggagttgctggagtgcatccgccggctcatcgaagtggacaaggactgggtccccgatgccgccggcaccagcctctatgtgcggcctgtgctcattgggaacgagccctcgctgggtgtcagccagcccacgcgcgcgctcctgttcgtcattctctgcccagtgggtgcctacttccctggaggctccgtgaccccggtctccctcctggccgacccagccttcatccgggcctgggtgggcggggtcggcaactacaagttaggtgggaattatgggcccaccgtgttagtgcaacaggaggcactcaagcggggctgtgaacaggtcctctggctgtatgggcccgaccaccagctcaccgaggtgggaaccatgaacatctttgtctactggacccacgaagatggggtgctggagctggtgacgcccccgctgaatggtgttatcctgcctggagtggtcagacagagtctactggacatggctcagacctggggtgagttccgggtggtggagcgcacgatcaccatgaagcagttgctgcgggccctggaggagggccgcgtgcgggaagtctttggctcgggcaccgcttgccaggtctgcccagtgcaccgaatcctgtacaaagacaggaacctccacattcccaccatggaaaatgggcctgagctgatcctccgcttccagaaggagctgaaggagatccagtacggaatcagagcccacgagtggatgttcccggtgtgaagctgcaggctgtgctccagatccaccgacccgtagcatctcgtcacgccagcactcgcctccctaccaatgactcacctgaagtgcaatacgaaataaaaggccagcgggcggcgtctgggtctctggcgcccccatgtggttgcgacactcccaaagccgtaagggccgacccaggcatcttggcccccagcccctcgtcgcgggttcaggtccgcccattactccttgtcgtgcggtcaaggatacaccttggccccgattccggatctctccgttctcaggccagacccctggtgctgccgttgatttttttttctctgtctttgctgcaattttgaaataaaatgccaaagaacaca

SEQ ID NO: 47669 - DNA, 1933 bp, Homo sapiens
aatttgagacggagtctcactctgtcgcccaggctggagtgctgtggtgcaatgtcggctcactgcaacctccgcctcccgggttcaagcgattctcctgcctcagcctcccgaatagctgggattacaggcccccggcaccacggcccggctaattttttgtatttttagtagagacggggtttcatcatgttggaccaggctggtctctaactcctgacctcaggtaatccgcccgcttcggcctcccaaagtgctaagattacagacctgagccacttcgcctggcagggaccgtatttcaagtcctgccctcccaccagcgcctgcgccccgcagcagtgtccggctccctgccgacgccctggagctgggacggcctggggcgctggtcggccgccttcccccagaaggaggcgtgagcggggcgtggccggaacgtctctcttcggagccgcgccccgggcgggcacagttacgcgccgcacggatcatggccgcagccgctctggggcaggtgggttcgcagccccgcgccggggtctgggaaataaccgggggaggcgcacttccgggaagaccactggcctgcagccggtccgactcggcgccgctcctcccgccctggggttccgctgcagggcgcggaggaggatggcgccctttggaaaggagcacgaggctttaatgggctgtttgagggcatgaaggcgttcaaaggcaaagaccagcaggtgcgcctcttccgcccctggctcaacatggaccggatgctgcgctcagccatgcgcctgtgcctgccgagtttcgacaagctggagttgctggagtgcatccgccggctcatcgaagtggacaaggactgggtccccgatgccgccggcaccagcctctatgtgcggcctgtgctcattgggaacgagccctcgctgggtgtcagccagcccacgcgcgcgctcctgttcgtcattctctgcccagtgggtgcctacttccctggaggctccgtgaccccggtctccctcctggccgacccagccttcatccgggcctgggtgggcggggtcggcaactacaagttaggtgggaattatgggcccaccgtgttagtgcaacaggaggcactcaagcggggctgtgaacaggtcctctggctgtatgggcccgaccaccagctcaccgaggtgggaaccatgaacatctttgtctactggacccacgaagatggggtgctggagctggtgacgcccccgctgaatggtgttatcctgcctggagtggtcagacagagtctactggacatggctcagacctggggtgagttccgggtggtggagcgcacgatcaccatgaagcagttgctgcgggccctggaggagggccgcgtgcgggaagtctttggctcgggcaccgcttgccaggtctgcccagtgcaccgaatcctgtacaaagacaggaacctccacattcccaccatggaaaatgggcctgagctgatcctccgcttccagaaggagctgaaggagatccagtacggaatcagagcccacgagtggatgttcccggtgtgaagctgcaggctgtgctccagatccaccgacccgtagcatctcgtcacgccagcactcgcctccctaccaatgactcacctgaagtgcaatacgaaataaaaggccagcgggcggcgtctgggtctctggcgcccccatgtggttgcgacactcccaaagccgtaagggccgacccaggcatcttggcccccagcccctcgtcgcgggttcaggtccgcccattactccttgtcgtgcggtcaaggatacaccttggccccgattccggatctctccgttctcaggccagacccctggtgctgccgttgatttttttttctctgtctttgctgcaattttgaaataaaatgccaaagaacaca

SEQ ID NO: 47670 - DNA, 1389 bp, Homo sapiens
  misc_feature (14)..(14): n is a, c, g, or t
tttgttttttatanaaagtttgttaaaaagaggtggtccggtccggattcccgggatcatggccgcagccgctctggggcagatctgggcacgaaagcttctctctgtcccttggcttctgtgtggtcccagaagatatgcctcctccagtttcaaggctgcagacctgcagctggaaatgacacagaagcctcataagaagcctggccccggcgagcccctggtgtttgggaagacatttaccgaccacatgctgatggtggaatggaatgacaagggctggggccagccccgaatccagcccttccagaacctcacgctgcacccagcctcctccagcctccactactccctgcagctgtttgagggcatgaaggcgttcaaaggcaaagaccagcaggtgcgcctcttccgcccctggctcaacatggaccggatgctgcgctcagccatgcgcctgtgcctgccgagtttcgacaagctggagttgctggagtgcatccgccggctcatcgaagtggacaaggactgggtccccgatgccgccggcaccagcctctatgtgcggcctgtgctcattgggaacgagccctcgctgggtgtcagccagcccacgcgcgcgctcctgttcgtcattctctgcccagtgggtgcctacttccctggaggctccgtgaccccggtctccctcctggccgacccagccttcatccgggcctgggtgggcggggtcggcaactacaagttaggtgggaattatgggcccaccgtgttagtgcaacaggaggcactcaagcggggctgtgaacaggtcctctggctgtatgggcccgaccaccagctcaccgaggtgggaaccatgaacatctttgtctactggacccacgaagatggggtgctggagctggtgacgcccccgctgaatggtgttatcctgcctggagtggtcagacagagtctactggacatggctcagacctggggtgagttccgggtggtggagcgcacgatcaccatgaagcagttgctgcgggccctggaggagggccgcgtgcgggaagtctttggctcgggcaccgcttgccaggtctgcccagtgcaccgaatcctgtacaaagacaggaacctccacattcccaccatggaaaatgggcctgagctgatcctccgcttccagaaggagctgaaggagatccagtacggaatcagagcccacgagtggatgttcccggtgtgaagctgcaggctgtgctccagatccaccgacccgtagcatctcgtcacgccagcactcgcctccctaccagagacccagacgccgccgctggccttttatttcgtattgcacttcagtcgaccggctgcaaatttagtagtagtaggcgccgc

SEQ ID NO: 47671 - DNA, 3055 bp, Homo sapiens
tccacaaacagagtgctacctccacaaacaggttcaaatgattctcccaggctcaagctatcctcctgcctcggcctcccacagtgctgggattacaggcgcgagccactgcgtgtggcctctttctatgattagatctattttggcatctcttgtttcttggcgtcaatttctgtttttgtttttttttttttctgtttgtgcgcccctttctgtgtttctttttctcatccttcctcttccatctcttactctctttttttcatcttggctctgagggcagctctcctgcccacaggctggctgtcgcactgtgtttgtctctctcatactgtgggtgtcctatccctctgggcagaagcatggctgcaaggctgagcagtctagatgtcgccacccaaaggcaatctggggacccacgctctgatcaccccggaatccctggagcctcacaccagcaagaccacgctgcaggcccatctcccagcaactcacctagcgacaagtgaccacgcccattcacgtccatcttccagaatcagtgccaactcacccagctcacagggcaggccaggccaggccactctgtctctctcaacctcacgccccaacgcctccccacagggctggggaaagaggccttgtgaggtcaaaggtcaccagagagggcccagcctgctggacacagccagacctgctcttcctactcccctctgggaggacccgcctgagcctcatgcagtgaggactgcagtggctccccaggcccctgtagctgcccctcagccccaggggctgaagggaattggagtcactgccaaaatgggtttgtatttcaggtaatcagagcccagttgatcgaataccttcagagaataagcacctgtactcctgggtctggcggaggaggggctggggaactggactcctgggtctgagggaggaggggtggggcccgtactcctggatgtaagggaggagggtctgaggcctggactccagggtctgagggaggaggggctgggggcccagacttcgggtctgagggaggaggcagctagagtctggactcttacttaggtctgaaggaggcgggcctggggtctgcacccctgagctctgggggagcaggacctgtcggtccttggtcttctaaggcctgtcagcacttgggtacccggaggccttcacttacctgtgtgccttccctggttgttttcttgtctgagctgatttccaggctgcgaccaaaggtctctggggtgggaggcgcttgcgtttgactttgccgcagcatggaggagggggcgggagctgactcagctctttccagcgagccctcgtcagggcagggaggggacttggcctccttcaggaccacctgccccgtctagaatggactgaaactgggacagaacaggcaggccagtgggacctccaagtgcaggaggtggcgagcgagctgccagggcccctgctgtgccccactcaccccctctctcacttctttctccacccaatctgggcacgaaagcttctctctgtcccttggcttctgtgtggtcccagaagatatgcctcctccagtttcaaggctgcagacctgcagctggaaatgacacagaagcctcataagaagcctggccccggcgagcccctggtgtttgggaagacatttaccgaccacatgctgatggtggaatggaatgacaagggctggggccagccccgaatccagcccttccagaacctcacgctgcacccagcctcctccagcctccactactccctgcagctgtttgagggcatgaaggcgttcaaaggcaaagaccagcaggtgcgcctcttccgcccctggctcaacatggaccggatgctgcgctcagccatgcgcctgtgcctgccgagtttcgacaagctggagttgctggagtgcatccgccggctcatcgaagtggacaaggactgggtccccgatgccgccggcaccagcctctatgtgcggcctgtgctcattgggaacgagccctcgctgggtgtcagccagcccacgcgcgcgctcctgttcgtcattctctgcccagtgggtgcctacttccctggaggctccgtgaccccggtctccctcctggccgacccagccttcatccgggcctgggtgggcggggtcggcaactacaagttaggtgggtaagtagcacccccatccccagaacgactggcgcactgggcgttggagacacagggaccagcgtgcgtgctttcggccatgcctctggatgtcacatgaaggtgacatcatcagcaccgtgcagggctcagtgctaagtgacctccctggtccctgaaaacaaaccatggaaggaaggaggaggggattatttttcagatggacaaaaaggctcacagatgggaaggcattgggtggaggtcagtggggaaaccaggactggtccctggaagcctccaggagtgaagcttacactcagctcattggcttctcgccccagaagcctcccctgatcccccaggctgggctgcgctccccatacccagctcccacagtcgtttgagcctccaaagcccctcacccccgtgtggactttctgtgtaaatctgtctcccagtggcctcagctcagcagggcaggaaggagacagctgggtctcctgggcaaccaaggcagagggtgggcactggcgtgttgggacaggaatgtggccccagctgggggtgcattcaggtcctttcagccacatcctgtgaggtctcctgagggccaggccctgtgctggcagaagctggggacacagatgagtcagccccgagccctgctctcctgggtctcccaggctggtgggagccccagtattcggagctgcatgttctctggtgaggtgacccagggcattgtgaaagccttcacagaggccagaggcggtggctcacgcctgtaatcccagcactttgggaggctgaggcgggcagatcacgaggtcaggagatcgagaccatcctgattaacacagtgaaaccccatctctactaaaaatac

SEQ ID NO: 47672 - DNA, 1242 bp, Homo sapiens
tccacaaacagagtgctacctccacaaacaggttcaaatgattctcccaggctcaagctatcctcctgcctcggcctcccacagtgctgggattacaggcgcgagccactgcgtgtggcctctttctatgattagatctattttggcatctcttgtttcttggcgtcaatttctgtttttgtttttttttttttctgtttgtgcgcccctttctgtgtttctttttctcatccttcctcttccatctcttactctctttttttcatcttggctctgagggcagctctcctgcccacaggctggctgtcgcactgtgtttgtctctctcatactgtgggtgtcctatccctctgggcagaagcatggctgcaaggctgagcagtctagatgtcgccacccaaaggcaatctggggacccacgctctgatcaccccggaatccctggagcctcacaccagcaagaccacgctgcaggcccatctcccagcaactcacctagcgacaagtgaccacgcccattcacgtccatcttccagaatcagtgccaactcacccagctcacagggcaggccaggccaggccactctgtctctctcaacctcacgccccaacgcctccccacagggctggggaaagaggccttgtgaggtcaaaggtcaccagagagggcccagcctgctggacacagccagacctgctcttcctactcccctctgggaggacccgcctgagcctcatgcagtgaggactgcagtggctccccaggcccctgtagctgcccctcagccccaggggctgaagggaattggagtcactgccaaaatgggtttgtatttcagatctgggcacgaaagcttctctctgtcccttggcttctgtgtggtcccagaagatatgcctcctccagtttcaaggctgcagacctgcagctggaaatgacacagaagcctcataagaagcctggccccggcgagcccctggtgtttgggaagacatttaccgaccacatgctgatggtggaatggaatgacaagggctggggccagccccgacccaggcatcttggcccccagcccctcgtcgcgggttcaggtccgcccattactccttgtcgtgcggtcaaggatacaccttggccccgattccggatctctccgttctcaggccagacccctggtgctgccgttgatttttttttctctgtctttgctgcaattttgaaataaaatgccaaagaacaca

SEQ ID NO: 47673 - DNA, 539 bp, Homo sapiens
  misc_feature (1)..(2): n is a, c, g, or t
  misc_feature (5)..(5): n is a, c, g, or t
  misc_feature (8)..(8): n is a, c, g, or t
  misc_feature (14)..(14): n is a, c, g, or t
nnccnttntttgantcctctacactgttggcctactgacagttacgcgccgcacggatcatggccgcagccgctctggggcagatctgggcacgaaagcttctctctgtcccttggcttctgtgtggtcccagaagatatgcctcctccagtttcaaggctgcagacctgcagctggaaatgacacagaagcctcataagaagcctggccccggcgagcccctggtgtttgggaagacatttaccaatgactcacctgaagtgcaatacgaaataaaaggccagcgggcggcgtctgggtctctggcgcccccatgtggttgcgacactcccaaagccgtaagggccgacccaggcatcttggcccccagcccctcgtcgcgggttcaggtccgcccattactccttgtcgtgcggtcaaggatacaccttggccccgattccggatctctccgttctcaggccagacccctggtgctgccgttgatttttttttctctgtctttgctgcaattttgaaataaaatgccaaagaacaca

SEQ ID NO: 47674 - DNA, 743 bp, Homo sapiens
aatttgagacggagtctcactctgtcgcccaggctggagtgctgtggtgcaatgtcggctcactgcaacctccgcctcccgggttcaagcgattctcctgcctcagcctcccgaatagctgggattacaggcccccggcaccacggcccggctaattttttgtatttttagtagagacggggtttcatcatgttggaccaggctggtctctaactcctgacctcaggtaatccgcccgcttcggcctcccaaagtgctaagattacagacctgagccacttcgcctggcagggaccgtatttcaagtcctgccctcccaccagcgcctgcgccccgcagcagtgtccggctccctgccgacgccctggagctgggacggcctggggcgctggtcggccgccttcccccagaaggaggcgtgagcggggcgtggccggaacgtctctcttcggagccgcgccccgggcgggcacagttacgcgccgcacggatcatggccgcagccgctctggggcaggtgggttcgcagccccgcgccggggtctgggaaataaccgggggaggcgcacttccgggaagaccactggcctgcagccggtccgactcggcgccgctcctcccgccctggggttccgctgcagggcgcggaggaggatggcgccctttggaaaggagcacgaggctttaatggggggggagcaggtagacgcggatgaggtggggcaagtaattggcggggaggt

SEQ ID NO: 47675 - DNA, 423 bp, Homo sapiens
tttttctccatctctctgacccagctgctaaatctccccggtgctctcctcttggcctccatctttcagttgtctgtgtctttgtgtatctgtctctgtctgtcttggtgtctctcatgactgtctggagaagtctctgagcctccccacccgcgtgtccccgcagctgtttgagggcatgaaggcgttcaaaggcaaagaccagcaggtgcgcctcttccgcccctggctcaacatggaccggatgctgcgctcagccatgcgcctgtgcctgccgagtttcgacaagctggagttgctggagtgcatccgccggctcatcgaagtggacaaggactgggtccccgatgccgccggcaccagcctctatgtgcggcctgtgctcattgggaacgaggtgggcccaactccagggctgggaag

SEQ ID NO: 47676 - DNA, 1752 bp, Homo sapiens
  misc_feature (14)..(14): n is a, c, g, or t
tttgttttttatanaaagtttgttaaaaagaggtggtccggtccggattcccgggatcatggccgcagccgctctggggcagatctgggcacgaaagcttctctctgtcccttggcttctgtgtggtcccagaagatatgcctcctccagtttcaaggctgcagacctgcagctggaaatgacacagaagcctcataagaagcctggccccggcgagcccctggtgtttgggaagacatttaccgaccacatgctgatggtggaatggaatgacaagggctggggccagccccgaatccagcccttccagaacctcacgctgcacccagcctcctccagcctccactactccctgcagctgtttgagggcatgaaggcgttcaaaggcaaagaccagcaggtgcgcctcttccgcccctggctcaacatggaccggatgctgcgctcagccatgcgcctgtgcctgccgagtttcgacaagctggagttgctggagtgcatccgccggctcatcgaagtggacaaggactgggtccccgatgccgccggcaccagcctctatgtgcggcctgtgctcattgggaacgagccctcgctgggtgtcagccagcccacgcgcgcgctcctgttcgtcattctctgcccagtgggtgcctacttccctggaggctccgtgaccccggtctccctcctggccgacccagccttcatccgggcctgggtgggcggggtcggcaactacaagttaggtgggaattatgggcccaccgtgttagtgcaacaggaggcactcaagcggggctgtgaacaggtcctctggctgtatgggcccgaccaccagctcaccgaggtgggaaccatgaacatctttgtctactggacccacgaagatggggtgctggagctggtgacgcccccgctgaatggtgttatcctgcctggagtggtcagacagagtctactggacatggctcagacctggggtgagttccgggtggtggagcgcacgatcaccatgaagcagttgctgcgggccctggaggagggccgcgtgcgggaagtctttggctcgggcaccgcttgccaggtctgcccagtgcaccgaatcctgtacaaagacaggaacctccacattcccaccatggaaaatgggcctgagctgatcctccgcttccagaaggagctgaaggagatccagtacggaatcagagcccacgagtggatgttcccggtgtgaagctgcaggctgtgctccagatccaccgacccgtagcatctcgtcacgccagcactcgcctccctaccaatgactcacctgaagtgcaatacgaaataaaaggccagcgggcggcgtctgggtctctggcgcccccatgtggttgcgacactcccaaagccgtaagggccgacccaggcatcttggcccccagcccctcgtcgcgggttcaggtccgcccattactccttgtcgtgcggtcaaggatacaccttggccccgattccggatctctccgttctcaggccagacccctggtgctgccgttgatttttttttctctgtctttgctgcaattttgaaataaaatgccaaagaacacaaaaaaaaaatagtgacagtgtcatcatgaaattagcaaaggtgggaaaaaaaagtcgacggcgcccgaatttatgtagtattacccccgaaattctggacggtaactcgggggtaacagtttccccaaagggggtcgattaaagcttggggta

SEQ ID NO: 47677 - DNA, 3036 bp, Homo sapiens
tccacaaacagagtgctacctccacaaacaggttcaaatgattctcccaggctcaagctatcctcctgcctcggcctcccacagtgctgggattacaggcgcgagccactgcgtgtggcctctttctatgattagatctattttggcatctcttgtttcttggcgtcaatttctgtttttgtttttttttttttctgtttgtgcgcccctttctgtgtttctttttctcatccttcctcttccatctcttactctctttttttcatcttggctctgagggcagctctcctgcccacaggctggctgtcgcactgtgtttgtctctctcatactgtgggtgtcctatccctctgggcagaagcatggctgcaaggctgagcagtctagatgtcgccacccaaaggcaatctggggacccacgctctgatcaccccggaatccctggagcctcacaccagcaagaccacgctgcaggcccatctcccagcaactcacctagcgacaagtgaccacgcccattcacgtccatcttccagaatcagtgccaactcacccagctcacagggcaggccaggccaggccactctgtctctctcaacctcacgccccaacgcctccccacagggctggggaaagaggccttgtgaggtcaaaggtcaccagagagggcccagcctgctggacacagccagacctgctcttcctactcccctctgggaggacccgcctgagcctcatgcagtgaggactgcagtggctccccaggcccctgtagctgcccctcagccccaggggctgaagggaattggagtcactgccaaaatgggtttgtatttcaggtaatcagagcccagttgatcgaataccttcagagaataagcacctgtactcctgggtctggcggaggaggggctggggaactggactcctgggtctgagggaggaggggtggggcccgtactcctggatgtaagggaggagggtctgaggcctggactccagggtctgagggaggaggggctgggggcccagacttcgggtctgagggaggaggcagctagagtctggactcttacttaggtctgaaggaggcgggcctggggtctgcacccctgagctctgggggagcaggacctgtcggtccttggtcttctaaggcctgtcagcacttgggtacccggaggccttcacttacctgtgtgccttccctggttgttttcttgtctgagctgatttccaggctgcgaccaaaggtctctggggtgggaggcgcttgcgtttgactttgccgcagcatggaggagggggcgggagctgactcagctctttccagcgagccctcgtcagggcagggaggggacttggcctccttcaggaccacctgccccgtctagaatggactgaaactgggacagaacaggcaggccagtgggacctccaagtgcaggaggtggcgagcgagctgccagggcccctgctgtgccccactcaccccctctctcacttctttctccacccaatctgggcacgaaagcttctctctgtcccttggcttctgtgtggtcccagaagatatgcctcctccagtttcaaggctgcagacctgcagctggaaatgacacagaagcctcataagaagcctggccccggcgagcccctggtgtttgggaagacatttaccgaccacatgctgatggtggaatggaatgacaagggctggggccagccccgaatccagcccttccagaacctcacgctgcacccagcctcctccagcctccactactccctgcagctgtttgagggcatgaaggcgttcaaaggcaaagaccagcaggtgcgcctcttccgcccctggctcaacatggaccggatgctgcgctcagccatgcgcctgtgcctgccgagtttcgacaagctggagttgctggagtgcatccgccggctcatcgaagtggacaaggactgggtccccgatgccgccggcaccagcctctatgtgcggcctgtgctcattgggaacgagccctcgctgggtgtcagccagcccacgcgcgcgctcctgttcgtcattctctgcccagtgggtgcctacttccctggaggctccgtgaccccggtctccctcctggccgacccagccttcatccgggcctgggtgggcggggtcggcaactacaagttaggtgggaattatgggcccaccgtgttagtgcaacaggaggcactcaagcggggctgtgaacaggtcctctggctgtatgggcccgaccaccagctcaccgaggtgggaaccatgaacatctttgtctactggacccacgaagatggggtgctggagctggtgacgcccccgctgaatggtgttatcctgcctggagtggtcagacagagtctactggacatggctcagacctggggtgagttccgggtggtggagcgcacgatcaccatgaagcagttgctgcgggccctggaggagggccgcgtgcgggaagtctttggctcgggcaccgcttgccaggtctgcccagtgcaccgaatcctgtacaaagacaggaacctccacattcccaccatggaaaatgggcctgagctgatcctccgcttccagaaggagctgaaggagatccagtacggaatcagagcccacgagtggatgttcccggtgtgaagctgcaggctgtgctccagatccaccgacccgtagcatctcgtcacgccagcactcgcctccctaccaatgactcacctgaagtgcaatacgaaataaaaggccagcgggcggcgtctgggtctctggcgcccccatgtggttgcgacactcccaaagccgtaagggccgacccaggcatcttggcccccagcccctcgtcgcgggttcaggtccgcccattactccttgtcgtgcggtcaaggatacaccttggccccgattccggatctctccgttctcaggccagacccctggtgctgccgttgatttttttttctctgtctttgctgcaattttgaaataaaatgccaaagaacaca

SEQ ID NO: 47678 - DNA, 1559 bp, Homo sapiens
gctggtacggtccgggatgtagggatgccgcagcgctctgggatctgggcacgaaagcttctctctgtcccttggcttctgtgtggtcccagaagatatgcctcctccagtttcaaggctgcagacctgcagctggaaatgacacagaagcctcataagaagcctggccccggcgagcccctggtgtttgggaagacatttaccgaccacatgctgatggtggaatggaatgacaagggctggggccagccccgaatccagcccttccagaacctcacgctgcacccagcctcctccagcctccactactccctgcagctgtttgagggcatgaaggcgttcaaaggcaaagaccagcaggtgcgcctcttccgcccctggctcaacatggaccggatgctgcgctcagccatgcgcctgtgcctgccgagtttcgacaagctggagttgctggagtgcatccgccggctcatcgaagtggacaaggactgggtccccgatgccgccggcaccagcctctatgtgcggcctgtgctcattgggaacgagccctcgctgggtgtcagccagcccacgcgcgcgctcctgttcgtcattctctgcccagtgggtgcctacttccctggaggctccgtgaccccggtctccctcctggccgacccagccttcatccgggcctgggtgggcggggtcggcaactacaagttaggtgggaattatgggcccaccgtgttagtgcaacaggaggcactcaagcggggctgtgaacaggtcctctggctgtatgggcccgaccaccagctcaccgaggtgggaaccatgaacatctttgtctactggacccacgaagatggggtgctggagctggtgacgcccccgctgaatggtgttatcctgcctggagtggtcagacagagtctactggacatggctcagacctggggtgagttccgggtggtggagcgcacgatcaccatgaagcagttgctgcgggccctggaggagggccgcgtgcgggaagtctttggctcgggcaccgcttgccaggtctgcccagtgcaccgaatcctgtacaaagacaggaacctccacattcccaccatggaaaatgggcctgagctgatcctccgcttccagaaggagctgaaggagatccagtacggaatcagagcccacgagtggatgttcccggtgtgaagctgcaggctgtgctccagatccaccgacccgtagcatctcgtcacgccagcactcgcctccctaccaatgactcacctgaagtgcaatacgaaataaaaggccagcgggcggcgtctgggtctctggcgcccccatgtggttgcgacactcccaaagccgtaagggccgacccaggcatcttggcccccagcccctcgtcgcgggttcaggtccgcccattactccttgtcgtgcggtcaaggatacaccttggccccgattccggatctctccgttctcaggccagacccctggtgctgccgttgatttttttttctctgtctttgctgcaattttgaaataaaatgccaaagaacaca

SEQ ID NO: 47679 - DNA, 1324 bp, Homo sapiens
  misc_feature (1)..(2): n is a, c, g, or t
  misc_feature (5)..(5): n is a, c, g, or t
  misc_feature (8)..(8): n is a, c, g, or t
  misc_feature (14)..(14): n is a, c, g, or t
nnccnttntttgantcctctacactgttggcctactgacagttacgcgccgcacggatcatggccgcagccgctctggggcagctgtttgagggcatgaaggcgttcaaaggcaaagaccagcaggtgcgcctcttccgcccctggctcaacatggaccggatgctgcgctcagccatgcgcctgtgcctgccgagtttcgacaagctggagttgctggagtgcatccgccggctcatcgaagtggacaaggactgggtccccgatgccgccggcaccagcctctatgtgcggcctgtgctcattgggaacgagccctcgctgggtgtcagccagcccacgcgcgcgctcctgttcgtcattctctgcccagtgggtgcctacttccctggaggctccgtgaccccggtctccctcctggccgacccagccttcatccgggcctgggtgggcggggtcggcaactacaagttaggtgggaattatgggcccaccgtgttagtgcaacaggaggcactcaagcggggctgtgaacaggtcctctggctgtatgggcccgaccaccagctcaccgaggtgggaaccatgaacatctttgtctactggacccacgaagatggggtgctggagctggtgacgcccccgctgaatggtgttatcctgcctggagtggtcagacagagtctactggacatggctcagacctggggtgagttccgggtggtggagcgcacgatcaccatgaagcagttgctgcgggccctggaggagggccgcgtgcgggaagtctttggctcgggcaccgcttgccaggtctgcccagtgcaccgaatcctgtacaaagacaggaacctccacattcccaccatggaaaatgggcctgagctgatcctccgcttccagaaggagctgaaggagatccagtacggaatcagagcccacgagtggatgttcccggtgtgaagctgcaggctgtgctccagatccaccgacccgtagcatctcgtcacgccagcactcgcctccctaccaatgactcacctgaagtgcaatacgaaataaaaggccagcgggcggcgtctgggtctctggcgcccccatgtggttgcgacactcccaaagccgtaagggccgacccaggcatcttggcccccagcccctcgtcgcgggttcaggtccgcccattactccttgtcgtgcggtcaaggatacaccttggccccgattccggatctctccgttctcaggccagacccctggtgctgccgttgatttttttttctctgtctttgctgcaattttgaaataaaatgccaaagaacaca

SEQ ID NO: 47680 - DNA, 1782 bp, Homo sapiens
  misc_feature (14)..(14): n is a, c, g, or t
tttgttttttatanaaagtttgttaaaaagaggtggtccggtccggattcccgggatcatggccgcagccgctctggggcagatctgggcacgaaagcttctctctgtcccttggcttctgtgtggtcccagaagatatgcctcctccagtttcaaggctgcagacctgcagctggaaatgacacagaagcctcataagaagcctggccccggcgagcccctggtgtttgggaagacatttaccgaccacatgctgatggtggaatggaatgacaagggctggggccagccccgaatccagcccttccagaacctcacgctgcacccagcctcctccagcctccactactccctgcagctgtttgagggcatgaaggcgttcaaaggcaaagaccagcaggtgcgcctcttccgcccctggctcaacatggaccggatgctgcgctcagccatgcgcctgtgcctgccgagtttcgacaagctggagttgctggagtgcatccgccggctcatcgaagtggacaaggactgggtccccgatgccgccggcaccagcctctatgtgcggcctgtgctcattgggaacgagccctcgctgggtgtcagccagcccacgcgcgcgctcctgttcgtcattctctgcccagtgggtgcctacttccctggaggctccgtgaccccggtctccctcctggccgacccagccttcatccgggcctgggtgggcggggtcggcaactacaagttaggtgggaattatgggcccaccgtgttagtgcaacaggaggcactcaagcggggctgtgaacaggtcctctggctgtatgggcccgaccaccagctcaccgaggtgggaaccatgaacatctttgtctactggacccacgaagatggggtgctggagctggtgacgcccccgctgaatggtgttatcctgcctggagtggtcagacagagtctactggacatggctcagacctggggtgagttccgggtggtggagcgcacgatcaccatgaagcagttgctgcgggccctggaggagggccgcgtgcgggaagtctttggctcgggcaccgcttgccaggtctgcccagtgcaccgaatcctgtacaaagacaggaacctccacattcccaccatggaaaatgggcctgagctgatcctccgcttccagaaggagctgaaggagatccagtaccaggaacagataatggcctttcttattgaggccctggagagtgggctttctgtgctgctctgtggcctggaaaaccccttggggctaaatcaccctttcctgggagctcccggagccctggatatgtcttcagctttggaaaccccttcctgtgatcctctgcggctcctgggtgccctgtacggaatcagagcccacgagtggatgttcccggtgtgaagctgcaggctgtgctccagatccaccgacccgtagcatctcgtcacgccagcactcgcctccctaccaatgactcacctgaagtgcaatacgaaataaaaggccagcgggcggcgtctgggtctctggcgcccccatgtggttgcgacactcccaaagccgtaagggccgacccaggcatcttggcccccagcccctcgtcgcgggttcaggtccgcccattactccttgtcgtgcggtcaaggatacaccttggccccgattccggatctctccgttctcaggccagacccctggtgctgccgttgatttttttttctctgtctttgctgcaattttgaaataaaatgccaaagaacaca

SEQ ID NO: 47681 - DNA, 1530 bp, Homo sapiens
  misc_feature (21)..(21): n is a, c, g, or t
  misc_feature (31)..(31): n is a, c, g, or t
  misc_feature (33)..(33): n is a, c, g, or t
  misc_feature (43)..(43): n is a, c, g, or t
  misc_feature (52)..(52): n is a, c, g, or t
  misc_feature (63)..(64): n is a, c, g, or t
  misc_feature (84)..(86): n is a, c, g, or t
  misc_feature (88)..(88): n is a, c, g, or t
  misc_feature (90)..(90): n is a, c, g, or t
  misc_feature (92)..(92): n is a, c, g, or t
  misc_feature (94)..(95): n is a, c, g, or t
  misc_feature (99)..(99): n is a, c, g, or t
  misc_feature (101)..(101): n is a, c, g, or t
  misc_feature (103)..(105): n is a, c, g, or t
  misc_feature (123)..(123): n is a, c, g, or t
  misc_feature (173)..(173): n is a, c, g, or t
  misc_feature (224)..(224): n is a, c, g, or t
  misc_feature (230)..(230): n is a, c, g, or t
  misc_feature (243)..(243): n is a, c, g, or t
  misc_feature (283)..(283): n is a, c, g, or t
  misc_feature (304)..(304): n is a, c, g, or t
  misc_feature (330)..(330): n is a, c, g, or t
aagcttctctctgtcccttgncttctgtctngncccacaacanatccccccnccactttcaannctgcagacctgcagctggannncncncncnncccncncnnncaagcctccccccccccnccccccccccccccccccccccccccccccccccccccccccctcccccnccccccccacctcccctccccaccccccccccccccccccacccccccccncccccnccccccccccccnccccccccccccccccccccccccccccccccacccctcncaccccacccccccccccccnccccccaccccccccccccccccccnccccccccccccccccccctcccccccctcccccccccacccacccccccccccccccccccccccccccccacccccccccccccccccaccccctcccccccccccctccaccccccccaccccccccccccccccccccccccccccacccccccacccccccccctccccccccccccaccccccccccccccccccccacccaccccccacgcgcgcgctcctgttcgtcattctctgcccagtgggtgcctacttccctggaggctccgtgaccccggtctccctcctggccgacccagccttcatccgggcctgggtgggcggggtcggcaactacaagttaggtgggaattatgggcccaccgtgttagtgcaacaggaggcactcaagcggggctgtgaacaggtcctctggctgtatgggcccgaccaccagctcaccgaggtgggaaccatgaacatctttgtctactggacccacgaagatggggtgctggagctggtgacgcccccgctgaatggtgttatcctgcctggagtggtcagacagagtctactggacatggctcagacctggggtgagttccgggtggtggagcgcacgatcaccatgaagcagttgctgcgggccctggaggagggccgcgtgcgggaagtctttggctcgggcaccgcttgccaggtctgcccagtgcaccgaatcctgtacaaagacaggaacctccacattcccaccatggaaaatgggcctgagctgatcctccgcttccagaaggagctgaaggagatccagtacggaatcagagcccacgagtggatgttcccggtgtgaagctgcaggctgtgctccagatccaccgacccgtagcatctcgtcacgccagcactcgcctccctaccaatgactcacctgaagtgcaatacgaaataaaaggccagcgggcggcgtctgggtctctggcgcccccatgtggttgcgacactcccaaagccgtaagggccgacccaggcatcttggcccccagcccctcgtcgcgggttcaggtccgcccattactccttgtcgtgcggtcaaggatacaccttggccccgattccggatctctccgttctcaggccagacccctggtgctgccgttgatttttttttctctgtctttgctgcaattttgaaataaaatgccaaagaacaca

SEQ ID NO: 47682 - DNA, 1042 bp, Homo sapiens
  misc_feature (1)..(2): n is a, c, g, or t
  misc_feature (5)..(5): n is a, c, g, or t
  misc_feature (8)..(8): n is a, c, g, or t
  misc_feature (14)..(14): n is a, c, g, or t
nnccnttntttgantcctctacactgttggcctactgacagttacgcgccgcacggatcatggccgcagccgctctggggcagctctcctgcccacaggctggctgtcgcactgtgtttgtctctctcatactgtgggtgtcctatccctctgggcagaagcatggctgcaaggctgagcagtctagatgtcgccacccaaaggcaatctggggacccacgctctgatcaccccggaatccctggagcctcacaccagcaagaccacgctgcaggcccatctcccagcaactcacctagcgacaagtgaccacgcccattcacgtccatcttccagaatcagtgccaactcacccagctcacagggcaggccaggccaggccactctgtctctctcaacctcacgccccaacgcctccccacagggctggggaaagaggccttgtgaggtcaaaggtcaccagagagggcccagcctgctggacacagccagacctgctcttcctactcccctctgggaggacccgcctgagcctcatgcagtgaggactgcagtggctccccaggcccctgtagctgcccctcagccccaggggctgaagggaattggagtcactgccaaaatgggtttgtatttcagatctgggcacgaaagcttctctctgtcccttggcttctgtgtggtcccagaagatatgcctcctccagtttcaaggctgcagacctgcagctggaaatgacacagaagcctcataagaagcctggccccggcgagcccctggtgtttgggaagacatttaccgaccacatgctgatggtggaatggaatgacaagggctggggccagccccgacccaggcatcttggcccccagcccctcgtcgcgggttcaggtccgcccattactccttgtcgtgcggtcaaggatacaccttggccccgattccggatctctccgttctcaggccagacccctggtgctgccgttgatttttttttctctgtctttgctgcaattttgaaataaaatgccaaagaacaca

SEQ ID NO: 47683 - DNA, 400 bp, Homo sapiens
cactccagcctgggcaacagagaccgggcgcagggggagggggagtgtctctgtctgcttctttctctctctctctctctctctctgtatatatatatagtgtgtgtgtgtgtgtgtgtgtgtgtgtgtgtaaaattgatatttagctccagacaaatgggaaattacaaggaaatgccagatttgatatctgggttctaagactttgcagcctaatgcatgtgtcatgctaaaatagaagtagttagacatgtggagttaaatatggtgatggtttctcagatgattaaaatgactgccaccaggttaaggtagttacaaagcagctttctgtaatggcagcagagataataaactgggcaacaagggaggaaccaatttaaaaaaaaaaaagtcgacg

SEQ ID NO: 47684 - DNA, 3597 bp, Homo sapiens
  misc_feature (1)..(1): n is a, c, g, or t
ncgaaggggcgtggccaagcgcaccgcctcggggcggggccggcgttctagcgcatcgcggccgggtgcgtcactcgccaagtggaatttgcccagacaagcaacatggctcggaaacgcgcggccggcggggagccgcggggacgcgaactgcgcagccagaaatccaaggccaagagcaaggcccggcgtgaggaggaggaggaggatgcctttgaagatgagaaacccccaaagaagagccttctctccaaagtttcacaaggaaagaggaaaagaggctgcagtcatcctgggggttcagcagatggtccagcaaaaaagaaagtggccaaggtgactgttaaatctgaaaacctcaaggttataaaggatgaagccctcagcgatggggatgacctcagggactttccaagtgacctcaagaaggcacaccatctgaagagaggggctaccatgaatgaagacagcaatgaagaagaggaagaaagtgaaaatgattgggaagaggttgaagtgaaaagataaaactggagtttgagacatatcttcggagggcgatgaaacgtttcaataaaggggtccatgaggacacacacaaggttcaccttctctgcctgctagcaaatggcttctatcgaaataacatctgcagccagccagatctgcatgctattggcctgtccatcatcccagcccgctttaccagagtgctgcctcgagatgtggacacctactacctctcaaacctggtgaagtggttcattggaacatttacagttaatgcagaactttcagccagtgaacaagataacctgcagactacattggaaaggagatttgctatttactctgctcgagatgatgaggaattggtccatatattcttactgattctccgggctctgcagctcttgacccggctggtattgtctctacagccaattcctctgaagtcagcaacagcaaagggaaagaaaccttccaaggaaagattgactgcggatccaggaggctcctcagaaacttccagccaagttctagaaaaccacaccaaaccaaagaccagcaaaggaaccaaacaagaggaaacctttgctaagggcacctgcaggccaagtgccaaagggaagaggaacaagggaggcagaaagaaacggagcaagccctcctccagcgaggaagatgagggcccaggagacaagcaggagaaggcaacccagcgacgtccgcatggccgggagcggcgggtggcctccagggtgtcttataaagaggagagtgggagtgatgaggctggcagcggctctgattttgagctctccagtggagaagcctctgatccctctgatgaggattccgaacctggccctccaaagcagaggaaagcccccgctcctcagaggacaaaggctgggtccaagagtgcctccaggacccatcgtgggagccatcgtaaggacccaagcttgccagcggcatcctcaagctcttcaagcagtaaaagaggcaagaaaatgtgcagcgatggtgagaaggcagaaaaaagaagcatagctggtatagaccagtggctagaggtgttctgtgagcaggaggaaaagtgggtatgtgtagactgtgtgcacggtgtggtgggccagcctctgacctgttacaagtacgccaccaagcccatgacctatgtggtgggcattgacagtgacggctgggtccgagatgtcacacagaggtacgacccagtctggatgacagtgacccgcaagtgccgggttgatgctgagtggtgggccgagaccttgagaccataccagagcccatttatggacagggagaagaaagaagacttggagtttcaggcaaaacacatggaccagcctttgcccactgccattggcttatataagaaccaccctctgtatgccctgaagcggcatctcctgaaatatgaggccatctatcccgagacagctgccatccttgggtattgtcgtggagaagcggtctactccagggattgtgtgcacactctgcattccagggacacgtggctgaagaaagcaagagtggtgaggcttggagaagtaccctacaagatggtgaaaggcttttctaaccgtgctcggaaagcccgacttgctgagccccagctgcgggaagaaaatgacctgggcctgtttggctactggcagacagaggagtatcagcccccagtggccgtggacgggaaggtgccccggaacgagtttgggaatgtgtacctcttcctgcccagcatgatgcctattggctgtgtccagctgaacctgcccaatctacaccgcgtggcccgcaagctggacatcgactgtgtccaggccatcactggctttgatttccatggcggctactcccatcccgtgactgatggatacatcgtctgcgaggaattcaaagacgtgctcctgactgcctgggaaaatgagcaggcagtcattgaaaggaaggagaaggagaaaaaggagaagcgggctctagggaactggaagttgctggccaaaggtctgctcatcagggagaggctgaagcgtcgctacgggcccaagagtgaggcagcagctccccacacagatgcaggaggtggactctcttctgatgaagaggaggggaccagctctcaagcagaagcggccaggatactggctgcctcctggcctcaaaaccgagaagatgaagaaaagcagaagctgaagggtgggcccaagaagaccaaaagggaaaagaaagcagcagcttcccacctgttcccatttgagaagctgtgagctgagcgcccactagaggggcacccaccagttgctgctgccccactacaggccccacacctgccctgggcatgcccagcccctggtggtggggggttctctgctgagaaggcaaactgaggcagcatgcacggaggcggggtcaggggagacgaggccaagctgaggaggtgctgcaggtcccgtctggctccagcccttgtcagattcacccagggtgaagccttcaaagctttttgctaccaaagcccactcaccctttgagctacagaacactttgctaggagatactcttctgcctcctagacctgttctttccatctttagaaacatcagtttttgtatggaagccaccgggagatttctggatggtggtgcatccgtgaatgcgctgatcgtttcttccagttagagtcttcatctgtccgacaagttcactcgcctcggttgcggacctaggaccatttctctgcaggccacttaccttcccctgagtcaggcttactaatgctgccctcactgcctctttgcagtaggggagagagcagagaagtacaggtcatctgctgggatctagttttccaagtaacattttgtggtgacagaagcctaaaaaaaggctaaaatcaggaaagaaaaggaaaaatacgaattgaaaattaaggaaatgttagtaaaatagatcagtgttaaactagattgtattcattactagataaaatgtataaagctctctgtactaaggagaaatgacttttataacattttgagaaaataataaagcatttatcta

SEQ ID NO: 47685 - DNA, 345 bp, Homo sapiens
caggtgctccagtgtctgcttggatgcaccccaggctgggacggctcagtaagaagggtctgggctctctccctgccctgtcccatgcccttgtcctcccagagttacacagcttagggcaggctgggaacttgctgcctcttcatggggcttcctggtatctgattactgaccctcgcctgtgtcctcccaccactgccacctgtccagagtgaggcagcagctccccacacagatgcaggaggtggactctcttctgatgaagaggaggggaccagctctcaagcagaagcggccaggatactggctgcctcctggcctcaaaaccgagaagatgaagaaaag

SEQ ID NO: 47686 - DNA, 3721 bp, Homo sapiens
  misc_feature (1)..(1): n is a, c, g, or t
ncgaaggggcgtggccaagcgcaccgcctcggggcggggccggcgttctagcgcatcgcggccgggtgcgtcactcgccaagtggaatttgcccagacaagcaacatggctcggaaacgcgcggccggcggggagccgcggggacgcgaactgcgcagccagaaatccaaggccaagagcaaggcccggcgtgaggaggaggaggaggatgcctttgaagatgagaaacccccaaagaagagccttctctccaaagtttcacaaggaaagaggaaaagaggctgcagtcatcctgggggttcagcagatggtccagcaaaaaagaaagtggccaaggtgactgttaaatctgaaaacctcaaggttataaaggatgaagccctcagcgatggggatgacctcagggactttccaagtgacctcaagaaggcacaccatctgaagagaggggctaccatgaatgaagacagcaatgaagaagaggaagaaagtgaaaatgattgggaagaggttgaagaacttagtgagcctgtgctgggtgacgtgagagaaagtacagccttctctcgatctcttctgcctgtgaagccagtggagatagagattgaaacgccagagcaggcgaagacaagagaaagaagtgaaaagataaaactggagtttgagacatatcttcggagggcgatgaaacgtttcaataaaggggtccatgaggacacacacaaggttcaccttctctgcctgctagcaaatggcttctatcgaaataacatctgcagccagccagatctgcatgctattggcctgtccatcatcccagcccgctttaccagagtgctgcctcgagatgtggacacctactacctctcaaacctggtgaagtggttcattggaacatttacagttaatgcagaactttcagccagtgaacaagataacctgcagactacattggaaaggagatttgctatttactctgctcgagatgatgaggaattggtccatatattcttactgattctccgggctctgcagctcttgacccggctggtattgtctctacagccaattcctctgaagtcagcaacagcaaagggaaagaaaccttccaaggaaagattgactgcggatccaggaggctcctcagaaacttccagccaagttctagaaaaccacaccaaaccaaagaccagcaaaggaaccaaacaagaggaaacctttgctaagggcacctgcaggccaagtgccaaagggaagaggaacaagggaggcagaaagaaacggagcaagccctcctccagcgaggaagatgagggcccaggagacaagcaggagaaggcaacccagcgacgtccgcatggccgggagcggcgggtggcctccagggtgtcttataaagaggagagtgggagtgatgaggctggcagcggctctgattttgagctctccagtggagaagcctctgatccctctgatgaggattccgaacctggccctccaaagcagaggaaagcccccgctcctcagaggacaaaggctgggtccaagagtgcctccaggacccatcgtgggagccatcgtaaggacccaagcttgccagcggcatcctcaagctcttcaagcagtaaaagaggcaagaaaatgtgcagcgatggtgagaaggcagaaaaaagaagcatagctggtatagaccagtggctagaggtgttctgtgagcaggaggaaaagtgggtatgtgtagactgtgtgcacggtgtggtgggccagcctctgacctgttacaagtacgccaccaagcccatgacctatgtggtgggcattgacagtgacggctgggtccgagatgtcacacagaggtacgacccagtctggatgacagtgacccgcaagtgccgggttgatgctgagtggtgggccgagaccttgagaccataccagagcccatttatggacagggagaagaaagaagacttggagtttcaggcaaaacacatggaccagcctttgcccactgccattggcttatataagaaccaccctctgtatgccctgaagcggcatctcctgaaatatgaggccatctatcccgagacagctgccatccttgggtattgtcgtggagaagcggtctactccagggattgtgtgcacactctgcattccagggacacgtggctgaagaaagcaagagtggtgaggcttggagaagtaccctacaagatggtgaaaggcttttctaaccgtgctcggaaagcccgacttgctgagccccagctgcgggaagaaaatgacctgggcctgtttggctactggcagacagaggagtatcagcccccagtggccgtggacgggaaggtgccccggaacgagtttgggaatgtgtacctcttcctgcccagcatgatgcctattggctgtgtccagctgaacctgcccaatctacaccgcgtggcccgcaagctggacatcgactgtgtccaggccatcactggctttgatttccatggcggctactcccatcccgtgactgatggatacatcgtctgcgaggaattcaaagacgtgctcctgactgcctgggaaaatgagcaggcagtcattgaaaggaaggagaaggagaaaaaggagaagcgggctctagggaactggaagttgctggccaaaggtctgctcatcagggagaggctgaagcgtcgctacgggcccaagagtgaggcagcagctccccacacagatgcaggaggtggactctcttctgatgaagaggaggggaccagctctcaagcagaagcggccaggatactggctgcctcctggcctcaaaaccgagaagatgaagaaaagcagaagctgaagggtgggcccaagaagaccaaaagggaaaagaaagcagcagcttcccacctgttcccatttgagaagctgtgagctgagcgcccactagaggggcacccaccagttgctgctgccccactacaggccccacacctgccctgggcatgcccagcccctggtggtggggggttctctgctgagaaggcaaactgaggcagcatgcacggaggcggggtcaggggagacgaggccaagctgaggaggtgctgcaggtcccgtctggctccagcccttgtcagattcacccagggtgaagccttcaaagctttttgctaccaaagcccactcaccctttgagctacagaacactttgctaggagatactcttctgcctcctagacctgttctttccatctttagaaacatcagtttttgtatggaagccaccgggagatttctggatggtggtgcatccgtgaatgcgctgatcgtttcttccagttagagtcttcatctgtccgacaagttcactcgcctcggttgcggacctaggaccatttctctgcaggccacttaccttcccctgagtcaggcttactaatgctgccctcactgcctctttgcagtaggggagagagcagagaagtacaggtcatctgctgggatctagttttccaagtaacattttgtggtgacagaagcctaaaaaaaggctaaaatcaggaaagaaaaggaaaaatacgaattgaaaattaaggaaatgttagtaaaatagatcagtgttaaactagattgtattcattactagataaaatgtataaagctctctgtactaaggagaaatgacttttataacattttgagaaaataataaagcatttatcta

SEQ ID NO: 47687 - DNA, 126 bp, Homo sapiens
gaatctgggcacttgtcacagctgggtaggaaacttggatttgccatactctatgtttaaagattacaaagtctgattaagtgccaaaaagagtttttaaaaatgttaatggttcacttttcacat

SEQ ID NO: 47688 - DNA, 460 bp, Homo sapiens
gtttctttgataaggagagtatcctgaccaaagcacccttttcaagtctaaccacctggtagatgcaggaacatccttgtagattcagcatcttttccactgtgtgtggttacagccatggagaaaaagttacatccctgtacttccactgatttttttctttaataatactttccgtgttttaggatgttagatatcagagatttcacaagctctgactgtaataggagaatgcataatgtgaattatgcactgcagaggtgagtacacaagttggctaatgataggttacatggcttgcaatttgggagccagaagcaagtcagcccaggggatccctgtggtgtggagcagctctgtgtcttgactatggtcatgggtgtacaaatatagatgtgatgaagctgtatagaattaatacgcatacacacacacacacagagtacaagtaaacctgggg

SEQ ID NO: 47689 - DNA, 430 bp, Homo sapiens
gctctgttgcccaggcagcacactgcagccttgaaccctgggttcaagcaatcttcctgcctcaacctcccaagcagctgggactataggtgggcaccaccacacctggctaatttttttaatttttagtagagatggcatctcactatgttgctcaggctggtcttgaacccctgagcttaagtaattctcctgccttggcctgctttaagaattatagaaaaggctatatgtaatcttttgtgatttacctttttcattcaaaaatcatgtttttgaatatgagaagcaacacgagtcaaccattcaaaaagattataagggtataatctaatatccagtccacactgaaatttcccaagttatctaaaaaatgcagagatggggtctcatcttgttgtatagctggagttcattcgactgctatata

SEQ ID NO: 47690 - DNA, 661 bp, Homo sapiens
cctctgtctggccgccagcctgggctttctccagctgatttgtagataaaatctctgacagtggatcttttacccaagaattgcttaagatgttcttcagatcctcaatttcagcagaatggctgacaccaactggcatgggtgagcccagagagaggctgggaattaaaaaaaagtttacttagagaacaagcagttgccagtgaaacgttggtgcactgtagacttcagacataaaaacagcagccatcactgacttctggcaaattcaagtaaaacaacaaacatcgaaacttccagacattctgttgggggaagttgccaaagacgttggctgccatagtcagctttaccatcttcgataagaaaatactcctcttcaccatatacaagaatttattaagtacctgctttgcctacaccattttgcacttagtatgttttcgttacatatttgataggaatgagagaaagggcacaggtgggcccctcagaacagagcatttaattgagtacattcggagcatattttgagtatgaacctccctaacaacacaccttttaacagtgattcaggggaaagattcagcttttgtggggtctgaagtttgtacagtttcaagagcccttttaagaggaaaaaaatacaaaatcacaaaag

SEQ ID NO: 47691 - DNA, 510 bp, Homo sapiens
caggaaactgagcaatcattcaaacccatgtctgtctgaatgcaaagcccatattcccccaccccaccctgcatctgtactgcttctcagacctacagagattattagtaccatctctagattgtaaactgatggagggtggatttactggttcattccagaaacctagggctgagtttatggaaggctctgggtagccaggtgcctcttcctccaccaaccagcagtgtcctaatgggcgattatgtagtaatgattcggcactgtggacaacagcatctagaggtgcatacacctcatgcctagcccagacaatatgtccctggatggcctcctctaccccagaggtgtctagaacccagtttgaaataaatacttcattaatattcagtaacctttacaatgtgacagatggtcctaaacaacttgcacaaattagctggttgactcttcataacaactctgttaggtggatacaaatattatgctcattttaaagctgaggaaact

SEQ ID NO: 47692 - DNA, 325 bp, Homo sapiens
gggtcatgcggcgtccctttctgcttcacgtgaagcagcctattggtgaatccttggccccgtggagacctgcatgcgatagatgaatgattccggtgaatgggtgcccctggtgccctggtttgcgttcatcgtctctggaggtgctgtacatattgctgtacttccgcatttttccataaagtgcgccatctttccagggcttcctgctgcttcccagtggctttccctgagtttagtttacagaggaatttattttggggagcgatagtgcatgcagaggggaaggtgttgtgttcagggatggacaggagttgggaggggt

SEQ ID NO: 47693 - DNA, 370 bp, Homo sapiens
gagacggagtctccgtctgtcacccaggctgaagtgtagtggcgtgatcttggctcactgcaacctccgcctcccgggctcaaacgattctcctgcctcagcctcccaagtagctggaattacaggcacccgccaccatgccccgctaatttttgttatttttagtagagacagggtgatggtcttgagcccctgactttgtgatccacctgcctcggcctcccaaagtgccaaacttgggtttctgtaaagcaaaccaaatcatttggatagcagaagtgatgtactctatgtataagtggcaatttaagggcagaaaagaaaaaagagtatatatatatatatgtaaatattgcatttatatatatgt

SEQ ID NO: 47694 - DNA, 380 bp, Homo sapiens
gagattagaggccaggaggaaagtaaggttgtggagggccaaagcaaagtgtttgtgtgtgtgtgtgtatgcatgtgtgagtgcatgtccgtgagtgtgtgtatatgcacgtgtgtatatgtgaggctatgtgtgtgcatgtgtgtatgtatgtgctcatgtgcgtttgcacgtgcgcttgtgtgtgcgtgtgcacgtgtggtgagtgcatgtatgtcagtgcatgtgtgtgcgtgtgtgtatgagtgcatgctcatgagtgcatgtgcacctgtgtggtcgtgagtgcacgtatgtgcttgtgcatgtgtgcctgtgcagatgtgtatatgagtgcgtgtgtgcgtgtatgagtgcgtgcgtgtacacatgagtgcatg

SEQ ID NO: 47695 - DNA, 551 bp, Homo sapiens
agctggtgaaggtccattactgacgctctgaggcttggttgaatggaacaggaagacctgaagtgaaagaggagctttgacaagctcctggacgctgatcagagcaaagggagcagacatgtggcgctcagcacacggaagagtgtgtagagcagagtaagagcgcctggaaccctgaagcttcctctaggccctcccactgcagggcgctgtatcagaggctggagagcctagtgtcaagcatatttcagtctttgtggaacttggcatcctgtaggctatattttgcccctgggcatgtttgatttagcttatataaaatatttttttaaatattggagccagtgtttgtaagttaggttatttcacattaaaaaaatatcttgaaaacatagaaggtcaggaagcgcacagacggcatctacctacagcaacagtgtgggctggtccctttgggctctctggcccgggctgtgcgtgccagtttcacactttccagccgtggcccctgcactcatctttgctacctgcctccataaatatctgagttt

SEQ ID NO: 47696 - DNA, 319 bp, Homo sapiens
cttgccttgagaagtattacacatttttcaaataaaaatccaccaaacagcactgtacttttaacatataatcatgagactgctttaataccccatttcgtaatttcagccaagcttattaacagaaatgccaaaatacctttcattacaacataatttgttcacaacatgtccatttgtgatttccatttaaggacaataggtgagtctaagaaatttgctttcaagatctcctattttcctcactcttgtctgggtgtgttcagctattgtctgattttctctaacccctctaaccttttttcttggagagaatatg

SEQ ID NO: 47697 - DNA, 610 bp, Homo sapiens
agttactctatttttttggtgggaggacaggatttcattctgttgcccaggctggagtacagtggtgtgatgtgatcatagctactgcagccttgaactacttgtcttttaagtgattctcccacctcagcctcctgggtagctgggctgcaggtgtataccaccatgcccagctagtttttaaaatttatctattttttaaaatttttaatagagaatagggtcttactgtgttgcccaggcttgtctcaaactcctggccttaagcaaccctcatgcctcgacctcccaaagtgctggtattataggcatgaaccaccatgccccagcctgttctattttattattaattattgtcgttagtctcttagtatgcctaatttaaaagttaaactttattataggtatgtatacataagaaaaaacatagggtttgttactatctgtgatttcagacattcactgggggtcttgtaatatatcttctgcagataaaagggaactactatatactacttctttttccatgttaatgtgcagtctaggatctgtactaagaagttgaataaaaatggtgattttgggcattcttgccttcttgatttaaaga

SEQ ID NO: 47698 - DNA, 427 bp, Homo sapiens
aatatagtcctaatcaaaattttctagctctttattttacttatattttgggggactcatcagttatgattaaatgggtcaactagtaacagaaatctaagtaatacttgtaaactaaatagaattaattttcccttgatgtagaagtcaagaggctggtatggtgatgttgtgatttcatcagcctctcagtttttctcaatccttctattctgcgttcctattctgtagcttccatcctcaaggtcaagtcatggtctaaagatgtctgtctgtctattgcagctccaaccatcacatctgagttttagaaatagagatgtagaaaaaaagaaaggcctgtcaatggaatgctttctgcttctctgaagtccctcttaaaattgtttaaattttaacacctatctacaagggtggctaggatatg

SEQ ID NO: 47699 - DNA, 448 bp, Homo sapiens
tgccatattcccttggctagaatcaagaaacaggtcctgtccacactcaagggtaggggatgtcagtgccaggaggctggaatcactgggagagtctgtctacaaaaatgaaaaaccaaaggtttaatgaggtgaaacagtcaaagtaaacacagcagtttgtgttagcattaactgctgcttctgatgaaccattcaggaaagcacactctagacactagtatattgaggcacataggacactaaagattgaagcagaaattgagatgtcccccccacgcctgtttttcccaagaccagctatatctctcatctacgcatgatttcagtgttaagtctatcatatgttaccccctaacaagacattcttagcacaactgagaggggcaccacaggtgagtcccaagatttttcttgtaaatcctcacattctggatctctcaaaaaa

SEQ ID NO: 47700 - DNA, 414 bp, Homo sapiens
gagaatgtttgaacccgggaggcagaggttgcagtgagcagaaattgtgccattgcactccagcctgggcagcaagagtgagacaacgactcaaaagaaaattacttacttatttttgcatgagaccctggccttttaggatacaagtgaaccacaatgcaatacagaagggtcacggcatgtaaaactgcacattgttcctgtctgagtcgtgatgaatggttttggacagtatttattggcatttttaatttctactagaaaaacattcggaaacatatagtcatgtgtatcacctttagttaataattggctttttaagctgtcactaagaggtcaatgaaaagggaatcactgatattttcttattcccagtttctgcctttaactttccagagacactggagactgttg

SEQ ID NO: 47701 - DNA, 470 bp, Homo sapiens
gctctccagggctactccagctgtgcgcggtttccacctctgcagctggtattccagtcaggggaatggggacaaggctgggatgggggatggggaccagggtcaagaacaaaacgtggtgctgttcactatgattaattaacccagcaccagagccccgagccgcggtgctaaaaatacctgcttccctctgagatgcggcagctgccacgcagcaacttttacccacgccgtttgtcataatctgacactgctaaggagtgtccacagggccgtgcgtctgcaagaatcggactcatccgcagtccaccagccagctggtcctcggaaaccatccacggcgctgtcctaccttcactctcctcccatccctgagcccagccaatgtgcctaccacctgccactgcctgccggttcgcagctcctcctggaaccgagcggaccacccccagaggtgggagccaaagctt

SEQ ID NO: 47702 - DNA, 365 bp, Homo sapiens
gcacctcatggcctgacagcacatatgcatttatttgttgtctacctcctcccaccagaatatgagctcaagagcacggggactgttgggctgtgttcactgctgggcctccagcacctaggacggttcttggcacacagtggaggcgcagcattgctgaatgaatgaatgtgattaaactgggaggaaacaaaattaaacatttatcaaatctctacctaagctaagaagtcttagaagaaatcaaagagatggattaaccaatttgattaaaaattttaaatatccttgcttttattttttaattttaattttattttttttcagacatggagtcttgctgtgttgcccagcctacaaactcc

SEQ ID NO: 47703 - DNA, 168 bp, Homo sapiens
aaagtaagttttgtgatcgaagggacggctttgttttctacatgtcctagcacttaggaggggtgccttgagcacagcaggtgcacaatcaataattgttgaatgaataaataaacacaaagtggctggaatcttatcagaagccaaagcaataagagactccccatg

SEQ ID NO: 47704 - DNA, 388 bp, Homo sapiens
agaagcgagcaaaagttcctttactgtaaggtcacttggaaaggtcaatagaaagcggctgttaaacatgatgttattctcagtgaaactgtatgcatccaagagaaggaactaactttaatgtttcacactgaagaaattgtgtgagagatacaagtacctttgtgactattgatttttaaagaacttttattgagaattcactgaacttattttaaattctctatgcaaagcttttctcactagggtagtttcattattctacatctggcaggcacgactttcaatgaatcagaaaggaaataaagttaactatgccttgcgcctggtagatgagaaagcagcctctcaagtcaccctttttcatagcgttttctctcttgggatg

SEQ ID NO: 47705 - DNA, 387 bp, Homo sapiens
acttccgcctcccaggttcaagcaattctgcttcagcgtctccaacagctggaattacaggaacgcgccatcacgacccgctaatttttgtatttttagtagagacggggttttccgtatgttgcccaggttggtctcgaactcctggcctgaagtgatctgcccacctcagcccccaaagtgctgggattacaggtgtgaatcactgcacccagccaaatgtttgtatttctttgacattattctttccccaactactgcttaagttgagtgctcaaataattgacttttaattttcacatatggtataggttcccgtgtgttaagagggacggttaatatcctaataatcctcacaaaggaggaaaaaaaccaaacacatcatcc

SEQ ID NO: 47706 - DNA, 694 bp, Homo sapiens
gaaaataagggtctgagagtcatacaagctgggaaaagggagaggccagcctgggacccaggctcaggtagggaaggggaattggggcctgacaatatttgaacccctaatgttcgtactgatctcattggatcttccaggcaaccatgtaaggtcaatctcattatcctcactttatagcattaactgaggctcagagggatgaaatgactattcaaagacacaaacccaagacactcaggaaggtacaaaaatgtccatgcgctcctgaaatcatctgcaaaatgttttatgtttgtacttgtatccatttcccagggtaaggagcttaaaactttcaaaggattctccaaggggtcagtgattctcaaagattaagagccactaatttaagccaaggctattctgattccaaagcctgttctctgaggccccctgtgccagactctggttaagagaacgttctttaaagtcaaactcatataaaacccagatcgtactagctgtgagaccttatttcctcatctataaaatagggattcagccaggcgtggtggcacacacttttagtcccagctgcttggaaggctgaggtgggaggatggcttgagcccaggaggcagggctgcagtgagctgtgattgtgccactgcactccagcctgggtgatagaacgagaccccgcctctttaaa

SEQ ID NO: 47707 - DNA, 744 bp, Homo sapiens
agtaaacccctttaagctgcagacatccagggagttcacactcactagtgtgagaaagactggaggcaggagagagattgatgacagccttcctcagtggtgtgagcctggaagaggagatagctcccaccacaaaaaggcagggggccttaccaacccttctccatagttaacgaaagccttcagttgctgaggaagatcagcaaaccctgtcagcttggggcactgcatcttgggtagggaaaaaattaaaacccactactcctgtggttggagcaggaaaccaacctgggcctagcacattagaggtctcctactgctgggagaggggtaggaccactgagaaaagccttatccttgagacacagggttggtcccagggctgcctaagactggggctagagcctccttttggcacctaccaccacttgctacttagcaagcactaagtagcaagcaaaagcagtctactgctagggggaggaacaagcatgtggagataaactcctctgaggtgcaggcactcagggaaggatgaaagctgaggacaaagcaggaaaactgagaaaaacactctggcaccctaggaaaaaccagctatatgctgtctaaaagagacacaccttaactacaaagatataaataggttgcaagtaaatggacagaaagagatacaccatgcaaacagtaagtataaggaagcaaacaaaataagacatcaagacaaggaatatgattagaggc

SEQ ID NO: 47708 - DNA, 1988 bp, Homo sapiens
gattacagacatgagccacctcgcccagccttttcatagctgagtgatattccattgtgtggatggatcacactagctactctgacccatggatcccctgggcccagccaagccacagtggctgtggcgccgctgtctggccgggctgctgtttcagctgctggtggctgtgtgtttcttctcctacctgcgtgtgtcccgagacgatgccactggatcccctaggccagggcttatggcagtggaacctgtcaccggggctcccaatgggtcccgctgccaggacagcatggcgacccctgcccaccccaccctactgatcctgctgtggacgtggccttttaacacacccgtggctctgccccgctgctcagagatggtgcccggcgcggccgactgcaacatcactgccgactccagtgtgtacccacaggcagacgcggtcatcgtgcaccactgggatatcatgtacaaccccagtgccaacctcccgccccccaccaggccgcaggggcagcgctggatctggttcagcatggagtcccccagcaactgccggcacctggaagccctggacggatacttcaatctcaccatgtcctaccgcagcgactccgacatcttcacgccctacggctggctggagccgtggtccggccagcctgcccacccaccgctcaacctctcggccaagaccgagctggtggcctgggcggtgtccaactggaagccggactcggccagggtgcgctactaccagagcctgcaggctcatctcaaggtggacgtgtacggacgctcccacaagcccctgcccaaggggaccatgatggagacgctgtcccggtacaagttctatctggccttcgagaactccttgcaccccgactacatcaccgagaagctgtggaggaacgccctggaggcctgggccgtgcccgtggtgctgggccccagcagaagcaactacgagaggttcctgccgcccgacgccttcatccacgtggatgacttccagagccccaaggacctggcccggtacctgcaggagctggacaaggaccacgcccgctacctgagctactttcgctggcgggagacgctgcggcctcgctccttcagctgggcactggctttctgcaaggcctgctggaagctgcagcaggaatccaggtaccagacggtgcgcagcatagcggcttggttcacctgagaggccggcatggggcctgggctgccagggacctcactttcccagggcctcacctacctagggtctcactagtcgggggatttacctacctggggcctcggctgcctggggcctcggctgcctggggtctcacctgcctggggcctcacctgctggagtctttggtggccaggcatgtgacttacctgggatttcacttgccgggcttcactgccaggagcctcccctgctggggaccttgccagctggggctggggatggtgcctactggggaccttgctttctggaggctgcacctactgaggatctcggctgttggggactttacctgctgggacctgctcccagagaccttgccacactgaatgtcacctgctaggagcctcacccgctgggaggcacagggcccaagggagctggatgtgttgcccaaggtgtgcagggcaggtcagggaagggcagggtcccctaaggaggagggcgaagggtatgtgtgtgaccatcagcagtggtgtgcacatggctgggggacactcggtgtgagcgccagcggatgggtgtcacaaatgcatcactgtgggtgtgacctcggcgtgactctgatagtgcctgtggatgtgttgcgatgcctcaccctggaggcactgggccctgagaacgggtgcccttgaggccctgcccccgggcgatggtgcaggctggtttgcttgtggttttattgctgttgttaaccacccatgaggggtgcaaacagataatgctgttaacattttca

SEQ ID NO: 47709 - DNA, 903 bp, Homo sapiens
tgcctgttggatagtcatcgggtggtttttgctccttctgcattcctcagataaggaatttttgtctctagggcctgttcagtggtcaccaagtgattttgctctcctcagatctcagcccatattttaaactgtttcccaatttaactatctattgaaatcaccattggaattttttttaggggaaaaattctttatttgtcctgggggaagaaaaaacaaaaaatgttattcttgaggaatttttgtgaaactctggatggggataagactgaattcagggatggattgcctaatccaaaatttatcgtgtgcagaggggaatataaaaagtcactaggacgatataagacccatatacaactctgtagcttgggcagcagacctggaagaagaggcaacttgtgggactgcctaattgtgcaactaattaggcagtaaagctcgatcctgaaatgtcttgaggaaatgccttctgtgctagatctcacaggcagctgggacagtgtagtagtatctactcctgcctttctcttagcagcaagacctgtaaagaaaagctcaagctttgctgaaataacttctaacaacaacgcctgtgttggttagagggcgggagcacagtgcatgctgttagagcaaatgcaaaaattaaatccctatagtaggtgatgatgctgcagtgatggctctccacctaggtgatgatactgcaatgatggctctccacctaggtgatgatactgcaatgatggctctccacctgtttctcacagttaacctgaatccatagctgagattaactgtgataaagaaaaatcactaacagatgaaaactttcagtgattcggagaattgtacctaagaaatctaaacaaatatttcctttaaaatgtcacagaa

SEQ ID NO: 47710 - DNA, 454 bp, Homo sapiens
accaagaagataaaagtagttaatacctcagctttggtcatcctcacaattcgtgaggctgatttacttcagattttgctaaagataaagtgggtccccaaatcagggaagtgttaaacctatgctaccagaacacaattttcagaaattcaggatgcatttatccatgcctgtagctagctactttctcaatatgccttcatctactgttgactgcacaccagctctgatccaggtcggggcattgagccaggtggtgttaagggaaacaaggataagacagagccagtgccctgtgccttgggtaattacccacaaaactgtaacacaaggcaaaccgggacaaaggccatgggaagagctggtggaagacctaggttgactgctgacccatggtgatctctgcagccacggacagagaggaatgtgttccagtcccagaggaccagaagga

SEQ ID NO: 47711 - DNA, 366 bp, Homo sapiens
tattttgaagctcacaatttgcataaatgtttaggattgttattccttttcctttttctctttttttgagatggagtctctcactctgttgcccaggctggagtgttgttgatggcaacagtgggccatctggaccatctggagtggccactgccaagatgctggctgcagccaggaggctctgcccatgctgtgagcttcacagagccagagggagcggggacaagcaggagcccagctccttccaagttggcgggtgggagctccccaggcatagctgcagctgcccaagtcatggctgctggctgagcctccctgtgttcttggagaccaggagcaggcaggagccctgctctcctgggtgca

SEQ ID NO: 47712 - DNA, 457 bp, Homo sapiens
ataagccactctttcttccttggggtgcaatgaggaaaggcttacttgaatgaatttccctcaaaatggaaacatgagacttaagggaaaggaggttcctacctaaaaatcaatagttatatatcaaattgaaatatgtatcatagatcttgtttcaaagtagaagtactgccgtggtggctcatgcctgtaatcccagcactttgggaggctgaggcgggcagatcactaggtcaggaatttgagaccagcctgaccaacatggtgaaaccccgtctctatgaaaaatacaaaaagtagccaggcgtggcggtgtgcacctgtggtcccagctactagggaggctgaggcaggagaatcgcttgaacccggggagcagaggttgcagtgagccaagatggtgccactgcactccagcctgggtgacagagcaagactccatctcaaggaaaaaaaa

SEQ ID NO: 47713 - DNA, 291 bp, Homo sapiens
ctcaagtcctatctgttcagtgacttcttccttctcctttccaatttatagaatactccttagccctgccacacattttatacttccattgtgttgaatctatctttttatatacggatgctttagtttaaacttcagattgtaacctccttgaggaaagggcttggattacagattttacttgtattctctgcagtgtcttataatagatgttcaacaaatgtatatgttgatcaattgaaatgataatagaacccttaatagctgaagatatgtaacgtgcatctaaga

SEQ ID NO: 47714 - DNA, 289 bp, Homo sapiens
caacccccctttttaatgaaaagcttatggaaagcaagactatttctattcagtgttgtactatggtatttgtgcacagcaggtctggccttttttctcctaggagttttctttttgttttccctactcattattacatactggcttttgtaatcttcggtatttcaaaaatcacattttacgctattagcaaagtcaacataaattaagttagctaagttgggtttttcattttattaattattggactccatggtaaagagtggggtggtgctatgtaatctgaaaa

SEQ ID NO: 47715 - DNA, 494 bp, Homo sapiens
ttcctttctctgggaattcccttggagaagaaatctggctgatcaaatctccttgtaaacatgctgtgaagactctgggggaaaccactaatgatatttgttagtggcagtctttatctttgagagacttttagcagcatgaaccttacccccgtagttagaattgtatatggtaaacaaacctggaatctaaggattcatgggtaatggcttcttgaaaagtgtcaagtaagctatgtaactatggcaggagatggaactacttcagggttaaaaaagctggctttcatttcgtgcaagtaatgtacttgtgtacatcttttggagaaccatatgttaaatccgaatcagaccaagtcctaatgtggtaagaaaagggctgtggagtagtattggcagtcctgggcttttccctatgttccctgtaccttgtgattacttatagctttgacattattagtaaagcttgatacttggtaaaataaaaaaaactt

SEQ ID NO: 47716 - DNA, 823 bp, Homo sapiens
gggtcaagcctagggcagaattacctggttgggggtgggaaggtagtgtcttgtaaaaatcagatctctgggttctaccttcagcgtttctgattcagtaggtctaggataagctcaggaacctgcaattttaagaagctaccacctaccaagtaagtcaaagaccacacttttaaaattccagctacaaatcagcagttgggaagagaaagtataaccatttaatcaatttcaaaaagctgatattctagtacagtaattctatacactggagtagagggtatattttgtcttccaggaacatttggcaggatttggagacattttggttgtcacatctgagataatatcattggcatctactgagcagatgctaagcatcctacgatgcacaggacagccccccacaacaaaggattatcctccaaaatgttaacagtgtcactgagaaactctattcatgaggatattctgctctcccaacaatggccccccaccccgcccatcagccccaatccattggaaatcagtgctacacagtttaggtcacaatgcagagacttatgcgagatcccctgaaaaacttttgagaccccagaaatcttttttaaaatggtgaatttcattaaagagatagaaaaggagaagattagaactgacaataaaggaaagtaagtatgggcaacaagggtgaaccaaaaaagggatcaaaggaggctgaggcgctgagtgacagcagcgggaaatcaatgctgcccctcagtggacgcagcccatttgtaaagagatgataaacccatgaaaaataacaggcacaaaaaat

SEQ ID NO: 47717 - DNA, 492 bp, Homo sapiens
  misc_feature (1)..(1): n is a, c, g, or t
  misc_feature (7)..(7): n is a, c, g, or t
naatttngccctcgaggccaagaattcggcacagccatgttggtcaggctggtcttgaacttctgacctcagtgatctgcctgcctcggcctcccaaagtgctgggactataggcatgaggcactgcgcccggccatgtatttattgacaggatctagctatgttgcccaggctggtctcaaccttctgggctcagctgatcctcctgagtaactggtactacacgtgtgagccactgtgactggttcgattagggttaaatttatttcaatacccatattgtgggaaaccaggaatttgcttgcttgtttttactacatttaaatttgttatggaaatttaataatctctacaaatacagacagagcagtgcaataaattttcatgtacctcatgaaaatacctcacccaacctcactggttatcaactcatggccaatcttgtttcctctataacctcacccactctcttctcctatattatttttgaaa

SEQ ID NO: 47718 - DNA, 231 bp, Homo sapiens
taggaaatgccatgcaaccaggaactactggacatgactcttccagctcatgatctaacccagaccctgcccctctttagctgtagttccccgtttcccactgctcgctggacagtgctacttggctatctctgtgtcttcttaaattccatgtggtaggctgggtgtggtggctcatgcctgtaatcccagcactttgagaggctgaggtgggaggattgctttgaggcc

SEQ ID NO: 47719 - DNA, 315 bp, Homo sapiens
accccctttccatacacaaaggtcagctgaagtagctgaaggataatgaaatagtcctctgttccttgattatgagctgatagcaatcatatgaagttcaacagagatgaagtcaatgcacataaatataaaagtattcattgatgttaaccctaacattaaacaggttcaggaaggggtaggcctggtttgatagcagctcatgtgaaaaagacacagaggcaatgcatgtgtggggatagggggaatatgggaaatctttgtacctttcagtcaattttgctgtgaacctgaagctgttctaaaatgtagtct

SEQ ID NO: 47720 - DNA, 365 bp, Homo sapiens
agaggcagaaacctttctatcaaccctggcttccaggggtcagctctagccttccactgtattccctggcttgattcttcagcataaggctgcaaaatctgtcttctgagtcacatagagagacctacagcaggatcaagatcaagcaatatctatcaccataaagacacatttgcataacatgttatacttgaataaaacttaaataatacaatttagagaaaattccattaaatgtgatagagctgatgggcatgctatgaaacagaacataattggagcaaatcttccttgtcactcttggtctttggagatgcaatagaaatcctttgttaacctcctaataaactgttattcaaaagtta

SEQ ID NO: 47721 - DNA, 580 bp, Homo sapiens
atctagatgatctgtgtatgggtggagctctggcaatagttactacaaaggtcgacattcagatcttctgaaattattacagcagtttattctttcatttagtatagtgatcaaatacctgctatctgcctggtgctattctaggctccagataaggacccctgcttcagggagctaacattgttgtatgcatgcagaggggaaaaggaaagggagtgaacctgaaaataaacaaatataatatgttttaaaaaaagatacattgaatcatgtttaagtatgaacaaattaaaatgaagagaggtgatggacaaaggctaggaaaaagaggctggctttagacacctaaaatctacagatttcagaagattttttggttgtgaccagacagctaaacagtctgtgagtactttggcaagaacataaatggcgtaagaactgctgtgtccatatttttgaaagctgactctaagtcaggagaaataactatcttctgtgaacccgggagaagagacgtatccttgacattagctgaggtcagtatggccagtcaattcttttctctgccaaaaaaaaaaaa

SEQ ID NO: 47722 - DNA, 597 bp, Homo sapiens
  misc_feature (592)..(593): n is a, c, g, or t
gcagccgccatcatgcctggctaacttttgtatttttagtagagacggggtttcgccatgttggccaggctgatctcgaactcctgatctcaggtgacccgcctgcctcagcctctgaaagtgctgagattacaggcgtgaaccaccacgcccggcctgattttatattaatataaacaaagattcatctcccagctctgccactttgtgaaggttaaggtgtcacttagcctctccaagtcacagtaaaatggaacaatggcacctgccctcacagagctgctgtgaaggtaatagatcatttgctgctaggacctggcacatgcagccttgcccaaatggtggctgttattactggaagtttccaggccaaggaaggctggcatccacagcccttcacccaaagcccaccaggaacacacttgtagttagtctagtttggtttcttgctctttgcagcgagggaactcacatcaggggaacctcgggttgcctcagtaggaagaaagaaaagaaagaaagaaaagaaagaaagaaagaaagaaagaaagaaagaaagaaagaaagaaagaaagaaagaaagaaagaaagnnagaa

SEQ ID NO: 47723 - DNA, 383 bp, Homo sapiens
aagtgctaaagtggtacccctttccagaagatgattgtttatctaggagtccaagcactaaaagctttcaaacaagagtcacttgacaatttttaaaatgataatttccttaaaaaaaaaagactgaaattgctgaagagtaatttgccacaatgtgcagagcatagagatggtgaagtgctgtgaactacaagtaattgctcttaatgtcatgatggcccagttggttcagtgttgatagggccttgcaaatcgtgtagaacaacaacagtgtgtcctagcagtctcagtgtctatgacctggaagtccaggtttccatattagtggtacttctgaagtttagaaatcttaactctaaaagaatccaattattttcacaatc

SEQ ID NO: 47724 - DNA, 763 bp, Homo sapiens
  misc_feature (3)..(3): n is a, c, g, or t
ccnacctcagtatctcccaccttagccttccgagtggcaggaccacaagcgtgcaccaccctgcctgtagagagggatattttgtagagacagggtctcactgtgttgtccaggctggtctcaaactcctggcctcaagcaatcctcccagattgctgggattacaggcatgagccactgtgcctggctggttctgtttcttctctagtcttacttctgtcaggctcacttacctgacttcatgtagaagcattcttcctggatccatgttattctcttttctgctaacctgatattctctttctagcagtgctagttacttgtttctttcagtattcagcatatatagcttttcgtgactgcttcagattacactcaaaattccacctgcacaatgaagcagataccacctacggacttccaccttcccttatttccccttccatttagtcaggggcaccctccactccacctgtgtatggtttgtatttactttaggttgtctttaagttctaaactcctcaaggcacaatttgattttgttctcttgatactgtgcctaatacctttgtatttcataaataataaaatatacatatttcttattttttatatacaataattttgtgaggatgtatttaataatgctaattaacaaagcaaatactgtacctaaaacaaaatgcatggttataattgtccgtttggttttttatttttattttttttgagagtgaaagtttattacaaatgaaagatttga

SEQ ID NO: 47725 - DNA, 455 bp, Homo sapiens
acctcatttatgcctttaggggactttttagtttttcttagttctttaacaacagatgctgtgtatctaatagacttatcaaacattcattgagcattaaggaataggagatccagtaacttctagcaaggatattatagtttatttgaagagacacaaatcaaaacagatttttgttggtaaaaacctattttgccaggcttagtggcttacgcctgtaatcctagcactttgggagtccaaagtgggtggattgcttaagtccaggagtttgagaccaacctgggcaacatggcgaaaccccatcactacaaaaaaatacaaaaattatctgggcgtggtagcacacacctgtaatcccagctactcagaagcccgtggcgggttgcaatgagccaagattgtgccagtgcactccagcgtgggtgacagaaagagaccctgtctcaaaaaaa

SEQ ID NO: 47726 - DNA, 493 bp, Homo sapiens
taaaatggggaggaaccctcagttccaggaattgcccacccctttcctggaaaactcatgaataatccaccctttgtttagcatataaacaagaaataaccataaaaatgggcaactaggtgtgcaccactgctcttcttatggagtagccattctttcattcctttactttcataataaacttgctttcacttaaaaaaaaacttgacccttaccttatgccatgtataaaaattaactcacaatgaatcaggaggtattcctttttcctgactgcctttgaactgggacatcatttttttccctgtcttcagacttgaactgaaacatcagcttttcttgagtctcaacctgctgttctttggactagaactgcaccattggctctcttgggtttccagcttaacaactgtagatcttggaacttggcagctttcataaatacatgagttaatttcttaaaataaatatattcatatgtatgtatataaaa

SEQ ID NO: 47727 - DNA, 1090 bp, Homo sapiens
atcccagcatgcattattaagcgcttgacttgcttccagacaaaggttgtctcaagtttgttgctcaaaccgagttctggagaacgccatcagctcgctgcttaaaattaaaccacaggttccattatgggtcgacttgatgggaaagtcatcatcctgacggccgctgctcaggggattggccaagcagctgccttagcttttgcaagagaaggtgccaaagtcatagccacagacattaatgagtccaaacttcaggaactggaaaagtacccgggtattcaaactcgtgtccttgatgtcacaaagaagaaacaaattgatcagtttgccaatgaagttgagagacttgatgttctctttaatgttgctggttttgtccatcatggaactgtcctggattgtgaggagaaagactgggacttctcgatgaatctcaatgtgcgcagcatgtacctgatgatcaaggcattccttcctaaaatgcttgctcagaaatctggcaatattatcaacatgtcttctgtggcttccagcgtcaaaggagttgtgaacagatgtgtgtacagcacaaccaaggcagccgtgattggcctcacaaaatctgtggctgcagatttcatccagcagggcatcaggtgcaactgtgtgtgcccaggaacagttgatacgccatctctacaagaaagaatacaagccagaggaaatcctgaagaggcacggaatgatttcctgaagagacaaaagacgggaagattcgcaactgcagaagaaatagccatgctctgcgtgtatttggcttctgatgaatctgcttatgtaactggtaaccctgtcatcattgatggaggctggagcttgtgattttaggatctccatggtgggaaggaaggcaggcccttcctatccacagtgaacctggttacgaagaaaactcaccaatcatctccttcctgttaatcacatgttaatgaaaataagctctttttaatgatgtcactgtttgcaagagtctgattctttaagtatattaatctctttgtaatctcttctgaaatcattgtaaagaaataaaaatattgaactcata

SEQ ID NO: 47728 - DNA, 1871 bp, Homo sapiens
atcccagcatgcattattaagcgcttgacttgcttccagacaaaggttgtctcaagtttgttgctcaaaccgagttctggagaacgccatcagctcgctgcttaaaattaaaccacaggttccattatgggtcgacttgatgggaaagtcatcatcctgacggccgctgctcaggggattggccaagcagctgccttagcttttgcaagagaaggtgccaaagtcatagccacagacattaatgagtccaaacttcaggaactggaaaagtacccgggtattcaaactcgtgtccttgatgtcacaaagaagaaacaaattgatcagtttgccaatgaagttgagagacttgatgttctctttaatgttgctggttttgtccatcatggaactgtcctggattgtgaggagaaagactgggacttctcgatgaatctcaatgtgcgcagcatgtacctgatgatcaaggcattccttcctaaaatgcttgctcagaaatctggcaatattatcaacatgtcttctgtggcttccagcgtcaaaggtgggtctgtctccttccgaggactgcgatgctcatacacgcacatcattaagagctctgcgtttgggaacaggcatagcagagattataatttcaagtattgaaatgatttcaaaactgcttttttcaaaattggtattaagttccttaaccacagatcttttgctctcgatgtgagccagtggtaaaattaaattaaaatgtggggtatttttgccctcccttttattctttctaatggacatggaaatgaacatcaaactgggagaaagaaccatttaacatttaattaatttaaaatagtgtattgagcaccggtatgtgctctggccataaaagaattcacagtccaaaactaggagcaaggcagcaaacatcatcttctccagtgtgatgatatataacagaggtttgtacaaagcgctgtcaaaatacagggaaataactgcctgtgagtttgtggaatgcttcacaaagacagttgatctgagccatcagcaagaagtcaagttgaaggacaaggacagcagtacaaaatgtggattatgtcacaatctggcatagttggatctgtgagtttaaaatgaaatagttactgctgagataccatttcttctctttgcaaggatacacatattcaacatacacaagagaggaatgtaaagaagtgcctaggcctcctgttttattgttttgttttgttattaatcttcattttcttttggaatctgcctaagagttatggcaactgatgatgagaaactaagactaccaatgttaagagttgtgaacagatgtgtgtacagcacaaccaaggcagccgtgattggcctcacaaaatctgtggctgcagatttcatccagcagggcatcaggtgcaactgtgtgtgcccaggaacagttgatacgccatctctacaagaaagaatacaagccagaggaaatcctgaagaggcacggaatgatttcctgaagagacaaaagacgggaagattcgcaactgcagaagaaatagccatgctctgcgtgtatttggcttctgatgaatctgcttatgtaactggtaaccctgtcatcattgatggaggctggagcttgtgattttaggatctccatggtgggaaggaaggcaggcccttcctatccacagtgaacctggttacgaagaaaactcaccaatcatctccttcctgttaatcacatgttaatgaaaataagctctttttaatgatgtcactgtttgcaagagtctgattctttaagtatattaatctctttgtaatctcttctgaaatcattgtaaagaaataaaaatattgaactcata

SEQ ID NO: 47729 - DNA, 1249 bp, Homo sapiens
atcccagcatgcattattaagcgcttgacttgcttccagacaaaggttgtctcaagtttgttgctcaaaccgagttctggagaacgccatcagctcgctgcttaaagggaaatgctgttgtgagagagaatgaggagagaactaggtaaggctgtgagagccatcagacctcgatgcaagtccacccgcgagggaggaaaagaaggaaaccaggttgagtggaagcatcccagacagctgtgcagtctaagagaacttcagcaagattaaaccacaggttccattatgggtcgacttgatgggaaagtcatcatcctgacggccgctgctcaggggattggccaagcagctgccttagcttttgcaagagaaggtgccaaagtcatagccacagacattaatgagtccaaacttcaggaactggaaaagtacccgggtattcaaactcgtgtccttgatgtcacaaagaagaaacaaattgatcagtttgccaatgaagttgagagacttgatgttctctttaatgttgctggttttgtccatcatggaactgtcctggattgtgaggagaaagactgggacttctcgatgaatctcaatgtgcgcagcatgtacctgatgatcaaggcattccttcctaaaatgcttgctcagaaatctggcaatattatcaacatgtcttctgtggcttccagcgtcaaaggagttgtgaacagatgtgtgtacagcacaaccaaggcagccgtgattggcctcacaaaatctgtggctgcagatttcatccagcagggcatcaggtgcaactgtgtgtgcccaggaacagttgatacgccatctctacaagaaagaatacaagccagaggaaatcctgaagaggcacggaatgatttcctgaagagacaaaagacgggaagattcgcaactgcagaagaaatagccatgctctgcgtgtatttggcttctgatgaatctgcttatgtaactggtaaccctgtcatcattgatggaggctggagcttgtgattttaggatctccatggtgggaaggaaggcaggcccttcctatccacagtgaacctggttacgaagaaaactcaccaatcatctccttcctgttaatcacatgttaatgaaaataagctctttttaatgatgtcactgtttgcaagagtctgattctttaagtatattaatctctttgtaatctcttctgaaatcattgtaaagaaataaaaatattgaactcata

SEQ ID NO: 47730 - DNA, 2148 bp, Homo sapiens
atcccagcatgcattattaagcgcttgacttgcttccagacaaaggttgtctcaagtttgttgctcaaaccgagttctggagaacgccatcagctcgctgcttaaaattaaaccacaggttccattatgggtcgacttgatgggaaagtcatcatcctgacggccgctgctcaggggattggccaagcagctgccttagcttttgcaagagaaggtgccaaagtcatagccacagacattaatgagtccaaacttcaggaactggaaaagtacccgggtattcaaactcgtgtccttgatgtcacaaagaagaaacaaattgatcagtttgccaatgaagttgagagacttgatgttctctttaatgttgctggttttgtccatcatggaactgtcctggattgtgaggagaaagactgggacttctcgatgaatctcaatgtgcgcagcatgtacctgatgatcaaggcattccttcctaaaatgcttgctcagaaatctggcaatattatcaacatgtcttctgtggcttccagcgtcaaaggtgggtctgtctccttccgaggactgcgatgctcatacacgcacatcattaagagctctgcgtttgggaacaggcatagcagagattataatttcaagtattgaaatgatttcaaaactgcttttttcaaaattggtattaagttccttaaccacagatcttttgctctcgatgtgagccagtggtaaaattaaattaaaatgtggggtatttttgccctcccttttattctttctaatggacatggaaatgaacatcaaactgggagaaagaaccatttaacatttaattaatttaaaatagtgtattgagcaccggtatgtgctctggccataaaagaattcacagtccaaaactaggagcaaggcagcaaacatcatcttctccagtgtgatgatatataacagaggtttgtacaaagcgctgtcaaaatacagggaaataactgcctgtgagtttgtggaatgcttcacaaagacagttgatctgagccatcagcaagaagtcaagttgaaggacaaggacagcagtacaaaatgtggattatgtcacaatctggcatagttggatctgtgagtttaaaatgaaatagttactgctgagataccatttcttctctttgcaaggatacacatattcaacatacacaagagaggaatgtaaagaagtgcctaggcctcctgttttattgttttgttttgttattaatcttcattttcttttggaatctgcctaagagttatggcaactgatgatgagaaactaagactaccaatgttaagtaagttcagcatttcaattaagtctcaattaagttgtgcctatactgatattatttccctagatccagaaactgactctattgaaggaaaaaaatctgatatcaatctttttaaaaggggaggaatgtgggagaaagcatgaaaatggctactgggaaaacttatttgtgttacctttctgaaggaaaatacattttttattccttcaattgttgaacctttcctccaccctcaggagttgtgaacagatgtgtgtacagcacaaccaaggcagccgtgattggcctcacaaaatctgtggctgcagatttcatccagcagggcatcaggtgcaactgtgtgtgcccaggaacagttgatacgccatctctacaagaaagaatacaagccagaggaaatcctgaagaggcacggaatgatttcctgaagagacaaaagacgggaagattcgcaactgcagaagaaatagccatgctctgcgtgtatttggcttctgatgaatctgcttatgtaactggtaaccctgtcatcattgatggaggctggagcttgtgattttaggatctccatggtgggaaggaaggcaggcccttcctatccacagtgaacctggttacgaagaaaactcaccaatcatctccttcctgttaatcacatgttaatgaaaataagctctttttaatgatgtcactgtttgcaagagtctgattctttaagtatattaatctctttgtaatctcttctgaaatcattgtaaagaaataaaaatattgaactcatagcaggagaatagtttttaaaataaatctcgatttgttagca

SEQ ID NO: 47731 - DNA, 1056 bp, Homo sapiens
atcccagcatgcattattaagcgcttgacttgcttccagacaaaggttgtctcaagtttgttgctcaaaccgagttctggagaacgccatcagctcgctgcttaaaattaaaccacaggttccattatgggtcgacttgatgggaaagtcatcatcctgacggccgctgctcaggggattggccaagcagctgccttagcttttgcaagagaaggtgccaaagtcatagccacagacattaatgagtccaaacttcaggaactggaaaagtacccgggtattcaaactcgtgtccttgatgtcacaaagaagaaacaaattgatcagtttgccaatgaagttgagagacttgatgttctctttaatgttgctggttttgtccatcatggaactgtcctggattgtgaggagaaagactgggacttctcgatgaatctcaatgtgcgcagcatgtacctgatgatcaaggcattccttcctaaaatgcttgctcagaaatctggcaatattatcaacatgtcttctgtggcttccagcgtcaaaggagttgtgaacagatgtgtgtacagcacaaccaaggcagccgtgattggcctcacaaaatctgtggctgcagatttcatccagcagggcatcaggtgcaactgtgtgtgcccaggaacagttgatacgccatctctacaagaaagaatacaagccagaggaaatcctgaagaggcacggaatgatttcctgaagagacaaaagacgggaagattcgcaactgcagaagaaatagccatgctctgcgtgtatttggcttctgatgaatctgcttatgtaactggtaaccctgtcatcattgatggaggctggagcttgtgattttaggatctccatggtgggaaggaaggcaggcccttcctatccacagtgaacctggttacgaagaaaactcaccaatcatctccttcctgttaatcacatgttaatgaaaataagctctttttaatgatattaatctctttgtaatctcttctgaaatcattgtaaagaaataaaaatattgaactcata

SEQ ID NO: 47732 - DNA, 976 bp, Homo sapiens
atcccagcatgcattattaagcgcttgacttgcttccagacaaaggttgtctcaagtttgttgctcaaaccgagttctggagaacgccatcagctcgctgcttaaaattaaaccacaggttccattatgggtcgacttgatgggaaagtcatcatcctgacggccgctgctcaggggattggccaagcagctgccttagcttttgcaagagaaggtgccaaagtcatagccacagacattaatgagtccaaacttcaggaactggaaaagtacccgggtattcaaactcgtgtccttgatgtcacaaagaagaaacaaattgatcagtttgccaatgaagttgagagacttgatgttctctttaatgttgctggttttgtccatcatggaactgtcctggattgtgaggagaaagactgggacttctcgatgaatctcaatgtgcgcagcatgtacctgatgatcaaggcattccttcctaaaatgcttgctcagaaatctggcaatattatcaacatgtcttctgtggcttccagcgtcaaaggaacagttgatacgccatctctacaagaaagaatacaagccagaggaaatcctgaagaggcacggaatgatttcctgaagagacaaaagacgggaagattcgcaactgcagaagaaatagccatgctctgcgtgtatttggcttctgatgaatctgcttatgtaactggtaaccctgtcatcattgatggaggctggagcttgtgattttaggatctccatggtgggaaggaaggcaggcccttcctatccacagtgaacctggttacgaagaaaactcaccaatcatctccttcctgttaatcacatgttaatgaaaataagctctttttaatgatgtcactgtttgcaagagtctgattctttaagtatattaatctctttgtaatctcttctgaaatcattgtaaagaaataaaaatattgaactcata

SEQ ID NO: 47733 - DNA, 677 bp, Homo sapiens
gagaacgccatcagctcgctgcttaaagtaagatttcctaatacttttgaaatgaaactttagaacggaaagaggggaggtttaatttttagatgttgtttttttctgcacgttgcctgtttcaaaattaatctgagcagttagatcagtgtaaagatgggtttttaaagagcctgaaactctgtggtatgtatgttttataaagtagcccaagaaaaaaggattcttacggtatcctaagtgaagagttttcttcctggctcttgaaaacaatggcttcctgaatatgctgtttgtgtctctgctaatcaaaaatcaacattttgattctaacttttggactaaggaagccaacatgtatggttttcacattggatatattgagaggtgccttgttttaccatttcaggccgtgtttgctctcattttctcaaagaaatctgttttagtttgagattacagtttatcaaatgttaaggctttgaccccaaaatctggtcccagaaagacaggaaggccagctaagaggaggttttcagagtgcatagaaaggctgctctgtgcttcggcatttgttctggaagtgcttcttcggttggcaaagattcctagcaaaacctttgactggaggctttacagggccatacacccaatatcactaatgacagtgttgtaaa

SEQ ID NO: 47734 - DNA, 478 bp, Homo sapiens
tcattttcttttggaatctgcctaagagttatggcaactgatgatgagaaactaagactaccaatgttaagtaagttcagcatttcaattaagtctcaattaagttgtgcctatactgatattatttccctagatccagaaactgactctattgaaggaaaaaaatctgatatcaatctttttaaaaggggaggaatgtgggagaaagcatgaaaatggctactgggaaaacttatttgtgttacctttctgaaggaaaatacattttttattccttcaattgttgaacctttcctccaccctcaggagttgtgaacagatgtgtgtacagcacaaccaaggcagccgtgattggcctcacaaaatctgtggctgcagatttcatccagcagggcatcaggtgcaactgtgtgtgcccaggtgagtaaggcacacctgttttgtaagcaaagttttactgaaacacttccacacccaa

SEQ ID NO: 47735 - DNA, 490 bp, Homo sapiens
cagaggccatttagttccagatcacaggacactcagcagttctaaatcaaccaaatgttaatttggatttccctgaattaagtgtttaagtgaggtttcctgttaggacaagggtaaattgtttagttatcctagtcacaggaaaatttcaaaatacagcctgtatcaaacctggttaattgttctgtctccttgtgtttatcactgcagtctgcttatgtaactggtaaccctgtcatcattgatggaggctggagcttgtgattttaggatctccatggtgggaaggaaggcaggcccttcctatccacagtgaacctggttacgaagaaaactcaccaatcatctccttcctgttaatcacatgttaatgaaaataagctctttttaatgatgtcactgtttgcaagagtctgattctttaagtatattaatctctttgtaatctcttctgaaatcattgtaaagaaataaaaatattgaactcata

SEQ ID NO: 47736 - DNA, 1131 bp, Homo sapiens
atcccagcatgcattattaagcgcttgacttgcttccagacaaaggttgtctcaagtttgttgctcaaaccgagttctggagaacgccatcagctcgctgcttaaaattaaaccacaggttccattatgggtcgacttgatgggaaagtcatcatcctgacggccgctgctcaggggattggccaagcagctgccttagcttttgcaagagaaggtgccaaagtcatagccacagacattaatgagtccaaacttcaggaactggaaaagtacccgggtattcaaactcgtgtccttgatgtcacaaagaagaaacaaattgatcagtttgccaatgaagttgagagacttgatgttctctttaatgttgctggttttgtccatcatggaactgtcctggattgtgaggagaaagactgggacttctcgatgaatctcaatgtgcgcagcatgtacctgatgatcaaggcattccttcctaaaatgcttgctcagaaatctggcaatattatcaacatgtcttctgtggcttccagcgtcaaaggagttgtgaacagatgtgtgtacagcacaaccaaggcagccgtgattggcctcacaaaatctgtggctgcagatttcatccagcagggcatcaggtgcaactgtgtgtgcccaggaacagttgatacgccatctctacaagaaagaatacaagccagaggaaatcctgaagaggcacggaatgatttcctgaagagacaaaagacgggaagattcgcaactgcagaagaaatagccatgctctgcgtgtatttggcttctgatgaatctgcttatgtaactggtaaccctgtcatcattgatggaggctggagcttgtgattttaggatctccatggtgggaaggaaggcaggcccttcctatccacagtgaacctggttacgaagaaaactcaccaatcatctccttcctgttaatcacatgttaatgaaaataagctctttttaatgatgtcactgtttgcaagagtctgattctttaagtatattaatctctttgtaatctcttctgaaatcattgtaaagaaataaaaatattgaactcatagcaggagaatagtttttaaaataaatctcgatttgttagca

SEQ ID NO: 47737 - DNA, 2107 bp, Homo sapiens
atcccagcatgcattattaagcgcttgacttgcttccagacaaaggttgtctcaagtttgttgctcaaaccgagttctggagaacgccatcagctcgctgcttaaaattaaaccacaggttccattatgggtcgacttgatgggaaagtcatcatcctgacggccgctgctcaggggattggccaagcagctgccttagcttttgcaagagaaggtgccaaagtcatagccacagacattaatgagtccaaacttcaggaactggaaaagtacccgggtattcaaactcgtgtccttgatgtcacaaagaagaaacaaattgatcagtttgccaatgaagttgagagacttgatgttctctttaatgttgctggttttgtccatcatggaactgtcctggattgtgaggagaaagactgggacttctcgatgaatctcaatgtgcgcagcatgtacctgatgatcaaggcattccttcctaaaatgcttgctcagaaatctggcaatattatcaacatgtcttctgtggcttccagcgtcaaaggtgggtctgtctccttccgaggactgcgatgctcatacacgcacatcattaagagctctgcgtttgggaacaggcatagcagagattataatttcaagtattgaaatgatttcaaaactgcttttttcaaaattggtattaagttccttaaccacagatcttttgctctcgatgtgagccagtggtaaaattaaattaaaatgtggggtatttttgccctcccttttattctttctaatggacatggaaatgaacatcaaactgggagaaagaaccatttaacatttaattaatttaaaatagtgtattgagcaccggtatgtgctctggccataaaagaattcacagtccaaaactaggagcaaggcagcaaacatcatcttctccagtgtgatgatatataacagaggtttgtacaaagcgctgtcaaaatacagggaaataactgcctgtgagtttgtggaatgcttcacaaagacagttgatctgagccatcagcaagaagtcaagttgaaggacaaggacagcagtacaaaatgtggattatgtcacaatctggcatagttggatctgtgagtttaaaatgaaatagttactgctgagataccatttcttctctttgcaaggatacacatattcaacatacacaagagaggaatgtaaagaagtgcctaggcctcctgttttattgttttgttttgttattaatcttcattttcttttggaatctgcctaagagttatggcaactgatgatgagaaactaagactaccaatgttaagtaagttcagcatttcaattaagtctcaattaagttgtgcctatactgatattatttccctagatccagaaactgactctattgaaggaaaaaaatctgatatcaatctttttaaaaggggaggaatgtgggagaaagcatgaaaatggctactgggaaaacttatttgtgttacctttctgaaggaaaatacattttttattccttcaattgttgaacctttcctccaccctcaggagttgtgaacagatgtgtgtacagcacaaccaaggcagccgtgattggcctcacaaaatctgtggctgcagatttcatccagcagggcatcaggtgcaactgtgtgtgcccaggaacagttgatacgccatctctacaagaaagaatacaagccagaggaaatcctgaagaggcacggaatgatttcctgaagagacaaaagacgggaagattcgcaactgcagaagaaatagccatgctctgcgtgtatttggcttctgatgaatctgcttatgtaactggtaaccctgtcatcattgatggaggctggagcttgtgattttaggatctccatggtgggaaggaaggcaggcccttcctatccacagtgaacctggttacgaagaaaactcaccaatcatctccttcctgttaatcacatgttaatgaaaataagctctttttaatgatgtcactgtttgcaagagtctgattctttaagtatattaatctctttgtaatctcttctgaaatcattgtaaagaaataaaaatattgaactcata

SEQ ID NO: 47738 - DNA, 1194 bp, Homo sapiens
atcccagcatgcattattaagcgcttgacttgcttccagacaaaggttgtctcaagtttgttgctcaaaccgagttctggagaacgccatcagctcgctgcttaaaattaaaccacaggttccattatgggtcgacttgatgggaaagtcatcatcctgacggccgctgctcaggggattggccaagcagctgccttagcttttgcaagagaaggtgccaaagtcatagccacagacattaatgagtccaaacttcaggaactggaaaagtacccgggtattcaaactcgtgtccttgatgtcacaaagaagaaacaaattgatcagtttgccaatgaagttgagagacttgatgttctctttaatgttgctggttttgtccatcatggaactgtcctggattgtgaggagaaagactgggacttctcgatgaatctcaatgtgcgcagcatgtacctgatgatcaaggcattccttcctaaaatgcttgctcagaaatctggcaatattatcaacatgtcttctgtggcttccagcgtcaaaggagttgtgaacagatgtgtgtacagcacaaccaaggcagccgtgattggcctcacaaaatctgtggctgcagatttcatccagcagggcatcaggtgcaactgtgtgtgcccaggaacagttgatacgccatctctacaagaaagaatacaagccagaggaaatcctgaagaggcacggaatgatttcctgaagagacaaaagacgggaagattcgcaactgcagaagaaatagccatgctctgcgtgtatttggcttctgatgaatctgcttatgtaactggtaaccctgtcatcattgatggaggctggagcttgtgattttaggatctccatggtgggaaggaaggcaggcccttcctatccacagtgaacctggttacgaagaaaactcaccaatcatctccttcctgttaatcacatgttaatgaaaataagctctttttaatgatgtcactgtttgcaagagtctgattctttaagtatattaatctctttgtaatctcttctgaaatcattgtaaagaaataaaaatattgaactcatagcaggagaatagtttttaaaataaatctcgatttgttagcaaaaaaatggaaggatagagagtggaaggaaggaacaaagatgagagaccaagaagagaggggg

SEQ ID NO: 47739 - DNA, 2218 bp, Homo sapiens
atcccagcatgcattattaagcgcttgacttgcttccagacaaaggttgtctcaagtttgttgctcaaaccgagttctggagaacgccatcagctcgctgcttaaaattaaaccacaggttccattatgggtcgacttgatgggaaagtcatcatcctgacggccgctgctcaggggattggccaagcagctgccttagcttttgcaagagaaggtgccaaagtcatagccacagacattaatgagtccaaacttcaggaactggaaaagtacccgggtattcaaactcgtgtccttgatgtcacaaagaagaaacaaattgatcagtttgccaatgaagttgagagacttgatgttctctttaatgttgctggttttgtccatcatggaactgtcctggattgtgaggagaaagactgggacttctcgatgaatctcaatgtgcgcagcatgtacctgatgatcaaggcattccttcctaaaatgcttgctcagaaatctggcaatattatcaacatgtcttctgtggcttccagcgtcaaaggtgggtctgtctccttccgaggactgcgatgctcatacacgcacatcattaagagctctgcgtttgggaacaggcatagcagagattataatttcaagtattgaaatgatttcaaaactgcttttttcaaaattggtattaagttccttaaccacagatcttttgctctcgatgtgagccagtggtaaaattaaattaaaatgtggggtatttttgccctcccttttattctttctaatggacatggaaatgaacatcaaactgggagaaagaaccatttaacatttaattaatttaaaatagtgtattgagcaccggtatgtgctctggccataaaagaattcacagtccaaaactaggagcaaggcagcaaacatcatcttctccagtgtgatgatatataacagaggtttgtacaaagcgctgtcaaaatacagggaaataactgcctgtgagtttgtggaatgcttcacaaagacagttgatctgagccatcagcaagaagtcaagttgaaggacaaggacagcagtacaaaatgtggattatgtcacaatctggcatagttggatctgtgagtttaaaatgaaatagttactgctgagataccatttcttctctttgcaaggatacacatattcaacatacacaagagaggaatgtaaagaagtgcctaggcctcctgttttattgttttgttttgttattaatcttcattttcttttggaatctgcctaagagttatggcaactgatgatgagaaactaagactaccaatgttaagtaagttcagcatttcaattaagtctcaattaagttgtgcctatactgatattatttccctagatccagaaactgactctattgaaggaaaaaaatctgatatcaatctttttaaaaggggaggaatgtgggagaaagcatgaaaatggctactgggaaaacttatttgtgttacctttctgaaggaaaatacattttttattccttcaattgttgaacctttcctccaccctcaggagttgtgaacagatgtgtgtacagcacaaccaaggcagccgtgattggcctcacaaaatctgtggctgcagatttcatccagcagggcatcaggtgcaactgtgtgtgcccagcgactggacttactcaggagattggaaaatatgcttatcaaactctttggaacaaggaactagcctgtgactcagtgaaccaatcacagaagaaaacttgaggaggactgagaacagttgatacgccatctctacaagaaagaatacaagccagaggaaatcctgaagaggcacggaatgatttcctgaagagacaaaagacgggaagattcgcaactgcagaagaaatagccatgctctgcgtgtatttggcttctgatgaatctgcttatgtaactggtaaccctgtcatcattgatggaggctggagcttgtgattttaggatctccatggtgggaaggaaggcaggcccttcctatccacagtgaacctggttacgaagaaaactcaccaatcatctccttcctgttaatcacatgttaatgaaaataagctctttttaatgatgtcactgtttgcaagagtctgattctttaagtatattaatctctttgtaatctcttctgaaatcattgtaaagaaataaaaatattgaactcata

SEQ ID NO: 47740 - DNA, 474 bp, Homo sapiens
cctgtcattcttcaagaaggaaactcactgggaaataccttacacttctatagttgaggagacctgcgatttggaaggaaaggaggaggttcagtgaagagtgggatggctacatttgatacagagcccaagacttgtgttcaagtcccctctgctgcagggtctcactctgctgcagggtccagcccaggctggaatgcagtggtgcgatcgtggctcactgcagcctcgacatcctgggcttaggtgattctcccacctctgccttctgagtagctgggattacaggcatatgccgccatgcctggctgattttttctttttctttttttggtagagacaggatctggccctattacccgggctggtctcgaactcctgggcttaaaggatctgcctgtttcgacctcccaaagtgctgggattacaggcaggaaccactgtgtccagctcctcccgatttctgggggaaaa

SEQ ID NO: 47741 - DNA, 1335 bp, Homo sapiens
gttccctatctgtcctcctccctccctgggaaacaggtgtgtctgaactggggctggaagcagagcctgagagctggatgactggccttgggcctatttccggtaggaatcagtggacttggcggcagaggcagtgcggatccggcgttctccactgatcttttccaaggctgtacagacatggcggcggcttttcggaaggcggctaagtcccggcagcgggaacacagagagcgaagccagcctggctttcgaaaacatctgggcctgctggagaaaaagaaagattacaaacttcgtgcagatgactaccgtaaaaaacaagaatacctcaaagctcttcggaagaaggctcttgaaaaaaatccagatgaattctactacaaaatgactcgggttaaactccaggatggagtacatattattaaggagactaaggaagaagtaaccccagaacaactaaagctgatgagaactcaggacgtcaaatatatagaaatgaagagggttgcagaagctaagaaaatcgaaagactaaaatcagagctccatctgctggatttccaggggaagcaacagaacaagcatgtgttcttttttgacaccaaaaaggaagttgaacagtttgatgtcgcaactcacctgcaaacagccccggagctagtcgacagagtctttaataggcccaggatagagaccttgcagaaagaaaaagtgaaaggagttaccaatcagactggacttaagcgaatagctaaagaaaggcaaaagcagtataactgcctgacacagcggattgaacgagagaagaaattgttcgttattgctcagaaaattcaaacacgcaaagatcttatggataaaactcagaaagtgaaggtgaagaaagaaacggtgaactccccagctatttataaatttcagagtcgtcgaaaacgttgacgtgttatagataagccttgtcattctgtatcaaaaatctgttgtcgttttctagtaacttcaaattccattactccaaatggcatggttttccggtttgtaaccataactaaattgtcagtctgacatttaatgtctttctatggacaacattaaatctccctcccttctgtaattgtttttggattgtgaaattagtcttatttttatatacttaattttttttttctttgagatagggtctttgttgccaggctggaagtgcagtgtgtgattatggctcactgcaactttgaactcctgggctcaagtgatcttcctgcatcagcctcttgagtagctgggaccacagacatgtgccaccatgtctgagtaatgtttaaattttctgta

SEQ ID NO: 47742 - DNA, 960 bp, Homo sapiens
  misc_feature (907)..(907): n is a, c, g, or t
gttccctatctgtcctcctccctccctgggaaacaggtgtgtctgaactggggctggaagcagagcctgagagctggatgactggccttgggcctatttccggtaggaatcagtggacttggcggcagaggcagtgcggatccggcgttctccactgatcttttccaaggctgtacagacatggcggcggcttttcggaaggcggctaagtcccggcagcgggaacacagagagcgaagccagcctggctttcgaaaacatctgggcctgctggagaaaaagaaagattacaaacttcgtgcagatgactaccgtaaaaaacaagaatacctcaaagctcttcggaagaaggctcttgaaaaaaatccagatgaattctactacaaaatgactcgggttaaactccaggatggagtacatattattaaggagactaaggaagaagtaaccccagaacaactaaagctgatgagaactcaggacgtcaaatatatagaaatgaagagggttgcagaagctaagaaaatcgaaagactaaaatcagagctccatctgctggatttccaggggaagcaacagaacaagcatgtgttcttttttgacaccaaaaaggaagttgaacagtttgatgtcgcaactcacctgcaaacagccccggagctagtcgacagagtctttaataggcccaggatagagaccttgcagaaagaaaaagtgaaaggagttaccaatcagactggacttaagcgaatagctaaagaaaggcaaaagcagtataactgcctgacacagcggattgaacgagagaagaaattgttcgttattgctcagaaaattcaaacacgcaaagatcttatggtaaacccgaagtgaggggacaagaacggggaatcccagtttaattagngtgaagtggggttagaacttggtggttaatgggggttaataaaaacaggggcg

SEQ ID NO: 47743 - DNA, 2363 bp, Homo sapiens
gttccctatctgtcctcctccctccctgggaaacaggtgtgtctgaactggggctggaagcagagcctgagagctggatgactggccttgggcctatttccggtaggaatcagtggacttggcggcagaggcagtgcggatccggcgttctccactgatcttttccaaggctgtacagacatggcggcggcttttcggaaggcggctaagtcccggcagcgggaacacagagagcgaagccagcctggctttcgaaaacatctgggcctgctggagaaaaagaaagattacaaacttcgtgcagagtgagttcagtctttctggtagaggcgctgccaagaaagcttacaacctccttgcactgcagctgaattgcctgagtgtccaacaggggataatttcctgccattgataaaatggccaaagctctggcagcctgtcagataattttttctgtgatcctaaatttctctctttgtttaggcagatcattatttatttaactgtagttgcattgtgaattatttgtattatgttgttccagatcattttctcatagtggctttgatttggctctgccttggtgtttgagcccaaagttgaatctttttctctttgttttcttgaagtgcaggatataatctgaaattccatttgttgagtctcttacatcaccatgtgtgtgatgtggaatgaagagatgtgaaagatggattcatgagaccaagcgtgggtgataatgaactctgaaaacattttataaaacaattatccccattcttgttctctgttagcactttgtttgcaaaatacttcttaattatttgttagcgatacatgtcagctgaggtcctttttatgcccctggtctagatggtggtgatggattaaatgggtttctgtaggtcccagagattttaaggctaatgataattaagtattgttattgggccaggcagtgttctaggatatttaccgtttttacactgatttgtccctcccaacaaccttctgggatgggttactattaccgtattcattttacaaatgaaattgggattcaggatggttaaataacttatccaaggttacttagccagaagttgtcaagtccagatttgaacccatgctgtctggctccagagtccatgattctagtcattgcgctatactgtactgtgtagtttctgaattacatatggtcatttggtgcccaagcttgcaccatatcctaaggagttttaatttgtactttgtttggtgtctccctgtaatgatataaatggcactgaaacatatataggctggggacagttaatttcaggttccactggaataggaactgttgattagactgtggaccctgcgaagacatgagctcagctcagtgacagtggagtgtccagatccagtcagtgcttttggcttttttgagtttcactctgtgtgaccttttagatgcttgtaaagtttgcttattgtgggtttttggttttttaaaattatctatttttttttttttgctatgaacctcatttaacctgtcttttagtgactaccgtaaaaaacaagaatacctcaaagctcttcggaagaaggctcttgaaaaaaatccagatgaattctactacaaaatgactcgggttaaactccaggatggagtacatattattaaggagactaaggaagaagtaaccccagaacaactaaagctgatgagaactcaggacgtcaaatatatagaaatgaagagggttgcagaagctaagaaaatcgaaagactaaaatcagagctccatctgctggatttccaggggaagcaacagaacaagcatgtgttcttttttgacaccaaaaaggaagttgaacagtttgatgtcgcaactcacctgcaaacagccccggagctagtcgacagagtctttaataggcccaggatagagaccttgcagaaagaaaaagtgaaaggagttaccaatcagactggacttaagcgaatagctaaagaaaggcaaaagcagtataactgcctgacacagcggattgaacgagagaagaaattgttcgttattgctcagaaaattcaaacacgcaaagatcttatggataaaactcagaaagtgaaggtgaagaaagaaacggtgaactccccagctatttataaatttcagagtcgtcgaaaacgttgacgtgttatagataagccttgtcattctgtatcaaaaatctgttgtcgttttctagtaacttcaaattccattactccaaatggcatggttttccggtttgtaaccataactaaattgtcagtctgacatttaatgtctttctatggacaacattaaatctccctcccttctgta

SEQ ID NO: 47744 - DNA, 1116 bp, Homo sapiens
gttccctatctgtcctcctccctccctgggaaacaggtgtgtctgaactggggctggaagcagagcctgagagctggatgactggccttgggcctatttccggtaggaatcagtggacttggcggcagaggcagtgcggatccggcgttctccactgatcttttccaaggctgtacagacatggcggcggcttttcggaaggcggctaagtcccggcagcgggaacacagagagcgaagccagcctggctttcgaaaacatctgggcctgctggagaaaaagaaagattacaaacttcgtgcagatgactaccgtaaaaaacaagaatacctcaaagctcttcggaagaaggctcttgaaaaaaatccagatgaattctactacaaaatgactcgggttaaactccaggatggagtacatattattaaggagactaaggaagaagtaaccccagaacaactaaagctgatgagaactcaggacgtcaaatatatagaaatgaagagggttgcagaagctaagaaaatcgaaagactaaaatcagagctccatctgctggatttccaggggaagcaacagaacaagcatgtgttcttttttgacaccaaaaaggaagttgaacagtttgatgtcgcaactcacctgcaaacagccccggagctagtcgacagagtctttaataggcccaggatagagaccttgcagaaagaaaaagtgaaaggagttaccaatcagactggacttaagcgaatagctaaagaaaggcaaaagcagtataactgcctgacacagcggattgaacgagagaagaaattgttcgttattgctcagaaaattcaaacacgcaaagatcttatggataaaactcagaaagtgaaggtgaagaaagaaacggtgaactccccagctatttataaatttcagagtcgtcgaaaacgttgacgtgttatagataagccttgtcattctgtatcaaaaatctgttgtcgttttctagtaacttcaaattccattactccaaatggcatggttttccggtttgtaaccataactaaattgtcagtctgacatttaatgtctttctatggacaacattaaatctccctcccttctgta

SEQ ID NO: 47745 - DNA, 522 bp, Homo sapiens
gttccctatctgtcctcctccctccctgggaaacaggtgtgtctgaactggggctggaagcagagcctgagagctggatgactggccttgggcctatttccggtaggaatcagtggacttggcggcagaggcagtgcggatccggcgttctccactgatcttttccaaggctgtacagacatggcggcggcttttcggaaggcggctaagtcccggcagcgggaacacagagagcgaagccagcctggctttcgaaaacatctgggcctgctggagaaaaagaaagattacaaacttcgtgcagatgactaccgtaaaaaacaagaatacctcaaagctcttcggaagaaggctcttgaaaaaaatccagatgaattctactacaaaatgactcgggttaaactccaggatggagtacataattattaaagggggggagggggaaaaaaccccccctttttatacaaaaaaacggcggggggcgcccatcaggacgcccaatatattagaaaggaagaggcg

SEQ ID NO: 47746 - DNA, 244 bp, Homo sapiens
tctccctcctgtcgctagagcccttcccttcctttccatacatgtcctagtccatcctcactttctcactccttggcaatagcttactttcctgatttttctttgctgactttacctgatcaaatctgttcatccactagaacaatcattctaaaacacaagtctggtttattgtttttgtttttgttgttgttgtttgtttttcttttctttccaccctcaggtcccatacttcacagcactc

SEQ ID NO: 47747 - DNA, 422 bp, Homo sapiens
aatgattattgggaccataaatatgtctaaaaataagcctcccttctaaaactttgcaattgcttatggcagtggttctcaagcttcggtctgtatcagaatcacctggcaagcttcttaaaacacaaactgtaggagcctacccacaatttctgattcagtgggtctggggtattgattgagaactggcctgtagaacaagttcccagttgatgctgatgcttgtctgggaatcacactttaagaactgctgccttaaggcattatacctctagactagttaaaacatcatcttgactaaaaagtttatgataaagttttggcatcctaccccaaaacacaaagaatcacagaaatgatataacccaatgttatcaaagctttgaaaaagcaagtgccctcaactgtacttgatagtattt

SEQ ID NO: 47748 - DNA, 355 bp, Homo sapiens
caatagttccaacaacccacaaaagtattttccaatcattataatgacctctctactctctctaaggcatagtgctaggtaatgaagtggactctgcctatcaagatggtcagaccctgagcgaagagggagtgggaaggcctgaggtgtcttcaggctgcctggggaccggggacccaggccagacagacagcagctccagggctgcggaaaggcccagccctgcacacacagcgctggctctgatactcctctgaggagcctgctgcctctgaccacaccttgtgtgtgtggttcaggaatacccaagttcatctgccaaattcaggatacaaccctgactgttccgggcttt

SEQ ID NO: 47749 - DNA, 675 bp, Homo sapiens
aaacaggtcaggtaaacccacatgcccaaagtcacacacaaggcagcattctgaagttcagtcgtttcattttgcctaaatgaatatgagagatatcttccatttttccatcccaattccctatccgcctgtctgagcctcaggaaactagcctcatgacttcctccacacacttccctgccctctggtttctgagtgggacgtggagagagggaggagatggaagttggggtctttattcccacagcaccccacccctacccccgcagacttaactaaggctggcagtggccttcaaccaaaggccatagtgtctggtgtacacagccctcttgttccaagtcccggtaaccactgcctccccttgtcctagcccctccgtcttacgctaaccattgtaatttttctacatcctgcccacaccattataaataagttaatgatttattgtgtcgtcttcaaattactgaagtggggagtgtgccttctgtttcctgttgtgacgctgcagataatagcaagtaagttaaacagtaagtaaatatttcctatttcagaggaatataaaacatcacacttagtgcttgcttcagcagcatatatactaaaattggaacgatacagagaagattagcatgacccctgcgcaaggatggcacgcaaatttgtgaagca

SEQ ID NO: 47750 - DNA, 161 bp, Homo sapiens
aagaaattcaaatgtcagtgtccttaaataaagctttactgacacacagccatactcatttgtttatgttttatctgtggctgatttccagctaccacagcagagttgtatatagttgaaacggagattgtatggcctctaaaatctaaaatatttgctaa

SEQ ID NO: 47751 - DNA, 2519 bp, Homo sapiens
ggcacgaggctcgggtcaaatgcgcgcctcggaccctagtgcgcgtgcgcgctggtggctccgcccctttggagctacttcctcatgctgcccgctcgcctaccgttcaggctgctgagccttttccttcgtggatccgctcccacggcagcgcgccatggcctccgggagccgctcctggagaggaggtgcgctgccgcctcctccttccagcactcatcgagtctgggacgcgagcttccttatgaccccgtggacacggagggctttggagaaggtggtgacatgcaggagcgttttctgttcccggagtacatcctggatccggagccgcaacccacccgcgaaaagcagctgcaggagctccagcaacagcaggaggaggaggagcgacagaggcagcagcggcgggaggagcggcgacagcaaaacctacgggccaggtcccgggagcacccggtcgtggggcacccggacccggcattgccgcccagcggcgtgaactgctcgggctgcggggcagagctgcactgccaggacgccggagtgcccggctacctgccccgagagaagttcctccgcacggcggaggcagacggcgggctggcacggaccgtgtgccagcgctgctggctgctgtcgcaccaccggcgcgctctacgcctgcaggtgagccgcgagcagtacctggagctggtgagcgccgcgttgcggcggcccggcccctccctggtgctctacatggtggacctgctggacctgcccgacgccctgctgcccgacttgcccgcgctggtgggccccaagcagctgatcgtgctgggaaacaaagtggacctcctgccccaggatgctcctggctaccggcagaggctgcgggagcgactgtgggaggactgtgcccgcgccgggctcctgctggcccctggccaccaagggccacagcgccccgtcaaggacgagccacaggacggggagaatccgaatccgccgaactggtcccgcacagtggtcagggacgtgcggctgatcagcgccaagaccggctatggagtggaagagttgatctctgcccttcagcgctcctggcgctaccgtggggacgtctacttagtgggcgccaccaacgccggcaaatccactctctttaacacgctcctggagtccgattactgcactgccaagggctccgaggccatcgacagagccaccatctccccttggccaggtactacattaaaccttctgaagtttcctatttgcaacccaactccttacagaatgtttaaaaggcatcaaagacttaaaaaagattcaactcaagctgaagaagatcttagtgagcaagaacaaaatcagcttaatgtcctcaaaaagcatggttatgtcgtaggaagagttggaaggacattcttgtattcagaagaacagaaggataacattccctttgagtttgatgctgattcacttgcctttgacatggaaaatgaccctgttatgggtacacacaaatccaccaaacaagtagaattgactgcacaagatgtgaaagatgcccactggttttatgacacccctggaattacaaaagaaaattgtattttaaatcttctaacagaaaaagaagtaaatattgttttgccaacacagtccattgttccaagaacttttgtgcttaaaccaggaatggttctgtttttgggtgctataggccgcatagatttcctgcagggaaatcagtcagcttggtttacagtcgtggcttccaacatcctccctgtgcatatcacctccttggacagggcagacgctctgtatcagaagcatgcaggtcatacgttactccagattccaatgggtggaaaagaacgaatggcaggatttcctcctcttgttgctgaagacattatgttaaaagaaggactgggggcatctgaagcagtggccgacatcaagttttcctctgcaggttgggtttcagtaacacctaattttaaggacagactgcatctccgaggctatacacctgaaggaacagttttgaccgtccggccccctctcttgccatatattgttaacatcaaaggacagcgcatcaagaaaagtgtggcctataaaaccaagaagcctccttcccttatgtacaacgtgaggaagaagaaaggaaagataaatgtatgagaccgaccttgttcactccagatattaactgtattgaacacaacaaaatacattgaatttgtattaaacatataacgcataaataaagctcccattcttaaaaaaaaaacaaaacaagaaaaaaaaaaaaaaaaaaaaaacaacagggaaaaaagacaaaaagaagatgaagaaaaaaaacacagagggaacgaggggcgcaagaggaagagagcgggggatgcacgggaagggaccagaacagaaggtgagacgggagcacgacggcagcatgggagacgaaaagggaggggcagagcaaaggggggcgcgggggggtcgcgggagaggggagcggg

SEQ ID NO: 47752 - DNA, 2174 bp, Homo sapiens
  misc_feature (2150)..(2150): n is a, c, g, or t
  misc_feature (2168)..(2168): n is a, c, g, or t
ggcacgaggctcgggtcaaatgcgcgcctcggaccctagtgcgcgtgcgcgctggtggctccgcccctttggagctacttcctcatgctgcccgctcgcctaccgttcaggctgctgagccttttccttcgtggatccgctcccacggcagcgcgccatggcctccgggagccgctcctggagaggaggtgcgctgccgcctcctccttccagcactcatcgagtctgggacgcgagcttccttatgaccccgtggacacggagggctttggagaaggtggtgacatgcaggagcgttttctgttcccggagtacatcctggatccggagccgcaacccacccgcgaaaagcagctgcaggagctccagcaacagcaggaggaggaggagcgacagaggcagcagcggcgggaggagcggcgacagcaaaacctacgggccaggtcccgggagcacccggtcgtggggcacccggacccggcattgccgcccagcggcgtgaactgctcgggctgcggggcagagctgcactgccaggacgccggagtgcccggctacctgccccgagagaagttcctccgcacggcggaggcagacggcgggctggcacggaccgtgtgccagcgctgctggctgctgtcgcaccaccggcgcgctctacgcctgcaggtgagccgcgagcagtacctggagctggtgagcgccgcgttgcggcggcccggcccctccctggtgctctacatggtggacctgctggacctgcccgacgccctgctgcccgacttgcccgcgctggtgggccccaagcagctgatcgtgctgggaaacaaagtggacctcctgccccaggatgctcctggctaccggcagaggctgcgggagcgactgtgggaggactgtgcccgcgccgggctcctgctggcccctggccaccaagggccacagcgccccgtcaaggacgagccacaggacggggagaatccgaatccgccgaactggtcccgcacagtggtcagggacgtgcggctgatcagcgccaagaccggctatggagtggaagagttgatctctgcccttcagcgctcctggcgctaccgtggggacgtctacttagtgggcgccaccaacgccggcaaatccactctctttaacacgctcctggagtccgattactgcactgccaagggctccgaggccatcgacagagccaccatctccccttggccaggtactacattaaaccttctgaagtttcctatttgcaacccaactccttacagaatgtttaaaaggcatcaaagacttaaaaaagattcaactcaagctgaagaagatcttagtgagcaagaacaaaatcagcttaatgtcctcaaaaagcatggttatgtcgtaggaagagttggaaggacattcttgtattcagaagaacagaaggataacattccctttgagtttgatgctgattcacttgcctttgacatggaaaatgaccctgttatgggtacacacaaatccaccaaacaagtagaattgactgcacaagatgtgaaagatgcccactggttttatgacacccctggaattacaaaagaaaattgtattttaaatcttctaacagaaaaagaagtaaatattgttttgccaacacagtccattgttccaagaacttttgtgcttaaaccaggaatggttctgtttttgggtgctataggccgcatagatttcctgcagggaaatcagtcagcttggtttacagtcgtggcttccaacatcctccctgtgcatatcacctccttggacagggcagacgctctgtatcagaagcatgcaggtcatacgttactccagattccaatgggtggaaaagaacgaatggcaggatttcctcctcttgttgctgaagacattatgttaaaagaaggactgggggcatctgaagcagtggccgacatcaagttttcctctgcaggttgggtttcagtaacacctaattttaaggacagactgcatctccgaggctatacacctgaaggaacagttttgaccgtccggccccctctcttgccatatattgttaacatcaaaggacagcgcatcaagaaaagtgtggcctataaaaccaagaagcctccttcccttatgttacctgnccccgggcggccgctccnaaaagg

SEQ ID NO: 47753 - DNA, 2000 bp, Homo sapiens
ggcacgaggctcgggtcaaatgcgcgcctcggaccctagtgcgcgtgcgcgctggtggctccgcccctttggagctacttcctcatgctgcccgctcgcctaccgttcaggctgctgagccttttccttcgtggatccgctcccacggcagcgcgccatggcctccgggagccgctcctggagaggaggtgcgctgccgcctcctccttccagcactcatcgagtctgggacgcgagcttccttatgaccccgtggacacggagggctttggagaaggtggtgacatgcaggagcgttttctgttcccggagtacatcctggatccggagccgcaacccacccgcgaaaagcagctgcaggagctccagcaacagcaggaggaggaggagcgacagaggcagcagcggcgggaggagcggcgacagcaaaacctacgggccaggtcccgggagcacccggtcgtggggcacccggacccggcattgccgcccagcggcgtgaactgctcgggctgcggggcagagctgcactgccaggacgccggagtgcccggctacctgccccgagagaagttcctccgcacggcggaggcagacggcgggctggcacggaccgtgtgccagcgctgctggctgctgtcgcaccaccggcgcgctctacgcctgcaggtgagccgcgagcagtacctggagctggtgagcgccgcgttgcggcggcccggcccctccctggtgctctacatggtggacctgctggacctgcccgacgccctgctgcccgacttgcccgcgctggtgggccccaagcagctgatcgtgctgggaaacaaagtggacctcctgccccaggatgctcctggctaccggcagaggctgcgggagcgactgtgggaggactgtgcccgcgccgggctcctgctggcccctggccaccaagggccacagcgccccgtcaaggacgagccacaggacggggagaatccgaatccgccgaactggtcccgcacagtggtcagggacgtgcggctgatcagcgccaagaccggctatggagtggaagagttgatctctgcccttcagcgctcctggcgctaccgtggggacgtctacttagtgggcgccaccaacgccggcaaatccactctctttaacacgctcctggagtccgattactgcactgccaagggctccgaggccatcgacagagccaccatctccccttggccaggtactacattaaaccttctgaagtttcctatttgcaacccaactccttacagaatgtttaaaaggcatcaaagacttaaaaaagattcaactcaagctgaagaagatcttagtgagcaagaacaaaatcagcttaatgtcctcaaaaagcatggttatgtcgtaggaagagttggaaggacattcttgtattcagaagaacagaaggataacattccctttgagtttgatgctgattcacttgcctttgacatggaaaatgaccctgttatgggtacacacaaatccaccaaacaagtagaattgactgcacaagatgtgaaagatgcccactggttttatgacacccctggaattacaaaagaaaattgtattttaaatcttctaacagaaaaagaagtaaatattgttttgccaacacagtccattgttccaagaacttttgtgcttaaaccaggaatggttctgtttttgggtgctataggccgcatagatttcctgcagggaaatcagtcagcttggtttacagtcgtggcttccaacatcctccctgtgcatatcacctccttggacagggcagacgctctgtatcagaagcatgcaggtcatacgttactccagattccaatgggtggaaaagaacgaatggcaggatttcctcctcttgttgctgaagacattatgttaaaagaaggactgggggcatctgaagcagtggccgacatcaagttttcctctgcaggtaattttatgccaagcactttttaaaaagt

SEQ ID NO: 47754 - DNA, 2327 bp, Homo sapiens
ggcacgaggctcgggtcaaatgcgcgcctcggaccctagtgcgcgtgcgcgctggtggctccgcccctttggagctacttcctcatgctgcccgctcgcctaccgttcaggctgctgagccttttccttcgtggatccgctcccacggcagcgcgccatggcctccgggagccgctcctggagaggaggtgcgctgccgcctcctccttccagcactcatcgagtctgggacgcgagcttccttatgaccccgtggacacggagggctttggagaaggtggtgacatgcaggagcgttttctgttcccggagtacatcctggatccggagccgcaacccacccgcgaaaagcagctgcaggagctccagcaacagcaggaggaggaggagcgacagaggcagcagcggcgggaggagcggcgacagcaaaacctacgggccaggtcccgggagcacccggtcgtggggcacccggacccggcattgccgcccagcggcgtgaactgctcgggctgcggggcagagctgcactgccaggacgccggagtgcccggctacctgccccgagagaagttcctccgcacggcggaggcagacggcgggctggcacggaccgtgtgccagcgctgctggctgctgtcgcaccaccggcgcgctctacgcctgcaggtgagccgcgagcagtacctggagctggtgagcgccgcgttgcggcggcccggcccctccctggtgctctacatggtggacctgctggacctgcccgacgccctgctgcccgacttgcccgcgctggtgggccccaagcagctgatcgtgctgggaaacaaagtggacctcctgccccaggatgctcctggctaccggcagaggctgcgggagcgactgtgggaggactgtgcccgcgccgggctcctgctggcccctggccaccaagggccacagcgccccgtcaaggacgagccacaggacggggagaatccgaatccgccgaactggtcccgcacagtggtcagggacgtgcggctgatcagcgccaagaccggctatggagtggaagagttgatctctgcccttcagcgctcctggcgctaccgtggggacgtctacttagtgggcgccaccaacgccggcaaatccactctctttaacacgctcctggagtccgattactgcactgccaagggctccgaggccatcgacagagccaccatctccccttggccaggtactacattaaaccttctgaagtttcctatttgcaacccaactccttacagaatgtttaaaaggcatcaaagacttaaaaaagattcaactcaagctgaagaagatcttagtgagcaagaacaaaatcagcttaatgtcctcaaaaagcatggttatgtcgtaggaagagttggaaggacattcttgtattcagaagaacagaaggataacattccctttgagtttgatgctgattcacttgcctttgacatggaaaatgaccctgttatgggtacacacaaatccaccaaacaagtagaattgactgcacaagatgtgaaagatgcccactggttttatgacacccctggaattacaaaagaaaattgtattttaaatcttctaacagaaaaagaagtaaatattgttttgccaacacagtccattgttccaagaacttttgtgcttaaaccaggaatggttctgtttttgggtgctataggccgcatagatttcctgcagattccaatgggtggaaaagaacgaatggcaggatttcctcctcttgttgctgaagacattatgttaaaagaaggactgggggcatctgaagcagtggccgacatcaagttttcctctgcaggttgggtttcagtaacacctaattttaaggacagactgcatctccgaggctatacacctgaaggaacagttttgaccgtccggccccctctcttgccatatattgttaacatcaaaggacagcgcatcaagaaaagtgtggcctataaaaccaagaagcctccttcccttatgtacaacgtgaggaagaagaaaggaaagataaatgtatgagaccgaccttgttcactccagatattaactgtattgaacacaacaaaatacattgaatttgtattaaacatataacgcataataagtccattcaaaaaaaaaaaaaaaaaaaaaaatgttgggcggcgggcccgaaaagcttcaacccctgtgggggggggccctggttcttgaatgtgaaggtccaagaccgctcgcaaggtgttcccaaaaacccgggacgcttgaacccgcgcggcttcggcacggccgcgtacccgggg

SEQ ID NO: 47755 - DNA, 1679 bp, Homo sapiens
ggcacgaggctcgggtcaaatgcgcgcctcggaccctagtgcgcgtgcgcgctggtggctccgcccctttggagctacttcctcatgctgcccgctcgcctaccgttcaggctgctgagccttttccttcgtggatccgctcccacggcagcgcgccatggcctccgggagccgctcctggagaggaggtgcgctgccgcctcctccttccagcactcatcgagtctgggacgcgagcttccttatgaccccgtggacacggagggctttggagaaggtggtgacatgcaggagcgttttctgttcccggagtacatcctggatccggagccgcaacccacccgcgaaaagcagctgcaggagctccagcaacagcaggaggaggaggagcgacagaggcagcagcggcgggaggagcggcgacagcaaaacctacgggccaggtcccgggagcacccggtcgtggggcacccggacccggcattgccgcccagcggcgtgaactgctcgggctgcggggcagagctgcactgccaggacgccggagtgcccggctacctgccccgagagaagttcctccgcacggcggaggcagacggcgggctggcacggaccgtgtgccagcgctgctggctgctgtcgcaccaccggcgcgctctacgcctgcaggtgagccgcgagcagtacctggagctggtgagcgccgcgttgcggcggcccggcccctccctggtgctctacatggtggacctgctggacctgcccgacgccctgctgcccgacttgcccgcgctggtgggccccaagcagctgatcgtgctgggaaacaaagtggacctcctgccccaggatgctcctggctaccggcagaggctgcgggagcgactgtgggaggactgtgcccgcgccgggctcctgctggcccctggccaccaagggccacagcgccccgtcaaggacgagccacaggacggggagaatccgaatccgccgaactggtcccgcacagtggtcagggacgtgcggctgatcagcgccaagaccggctatggagtggaagagttgatctctgcccttcagcgctcctggcgctaccgtggggacgtctacttagtgggcgccaccaacgccggcaaatccactctctttaacacgctcctggagtccgattactgcactgccaagggctccgaggccatcgacagagccaccatctccccttggccaggtactacattaaaccttctgaagtttcctatttgcaacccaactccttacagaatgtttaaaaggcatcaaagacttaaaaaagattcaactcaagctgaagaagatcttagtgagcaagaacaaaatcagcttaatgtcctcaaaaagcatggttatgtcgtaggaagagttggaaggacattcttgtattcagaagaacagaaggataacattccctttgagtttgatgctgattcacttgcctttgacatggaaaatgaccctgttatgggtacacacaaatccaccaaacaagtagaattgactgcacaagatgtgaaagatgcccactggttttatgacacccctggaattacaaaagaaaattgtatttaatctctacacagagagtaatatgtttgccacacgtcatgtcagactttgtctacagatgtctgttgggaggcgaa

SEQ ID NO: 47756 - DNA, 548 bp, Homo sapiens
cttgagttcagcctgggtaacatagcaagacgcagtttcttaaaaaataataaaataataagagagtgaaagagagtgacagcgttctctgatagtccattttcagctttggtttggtatttttaataagatgattgctaacagccttttgtgttgtgtcacatgcctgcataggttgggtttcagtaacacctaattttaaggacagactgcatctccgaggctatacacctgaaggaacagttttgaccgtccggccccctctcttgccatatattgttaacatcaaaggacagcgcatcaagaaaagtgtggcctataaaaccaagaagcctccttcccttatgtacaacgtgaggaagaagaaaggaaagataaatgtatgagaccgaccttgttcactccagatattaactgtattgaacacaacaaaatacattgaatttgtattaaacatataacgcataaataaagctcccattcttaccctttttttcttttttcttttttttttttttctgagactgagccctgctctgttgcccagg

SEQ ID NO: 47757 - DNA, 2343 bp, Homo sapiens
ggcacgaggctcgggtcaaatgcgcgcctcggaccctagtgcgcgtgcgcgctggtggctccgcccctttggagctacttcctcatgctgcccgctcgcctaccgttcaggctgctgagccttttccttcgtggatccgctcccacggcagcgcgccatggcctccgggagccgctcctggagaggaggtgcgctgccgcctcctccttccagcactcatcgagtctgggacgcgagcttccttatgaccccgtggacacggagggctttggagaaggtggtgacatgcaggagcgttttctgttcccggagtacatcctggatccggagccgcaacccacccgcgaaaagcagctgcaggagctccagcaacagcaggaggaggaggagcgacagaggcagcagcggcgggaggagcggcgacagcaaaacctacgggccaggtcccgggagcacccggtcgtggggcacccggacccggcattgccgcccagcggcgtgaactgctcgggctgcggggcagagctgcactgccaggacgccggagtgcccggctacctgccccgagagaagttcctccgcacggcggaggcagacggcgggctggcacggaccgtgtgccagcgctgctggctgctgtcgcaccaccggcgcgctctacgcctgcaggtgagccgcgagcagtacctggagctggtgagcgccgcgttgcggcggcccggcccctccctggtgctctacatggtggacctgctggacctgcccgacgccctgctgcccgacttgcccgcgctggtgggccccaagcagctgatcgtgctgggaaacaaagtggacctcctgccccaggatgctcctggctaccggcagaggctgcgggagcgactgtgggaggactgtgcccgcgccgggctcctgctggcccctggccaccaagggccacagcgccccgtcaaggacgagccacaggacggggagaatccgaatccgccgaactggtcccgcacagtggtcagggacgtgcggctgatcagcgccaagaccggctatggagtggaagagttgatctctgcccttcagcgctcctggcgctaccgtggggacgtctacttagtgggcgccaccaacgccggcaaatccactctctttaacacgctcctggagtccgattactgcactgccaagggctccgaggccatcgacagagccaccatctccccttggccaggtactacattaaaccttctgaagtttcctatttgcaacccaactccttacagaatgtttaaaaggcatcaaagacttaaaaaagattcaactcaagctgaagaagatcttagtgagcaagaacaaaatcagcttaatgtcctcaaaaagcatggttatgtcgtaggaagagttggaaggacattcttgtattcagaagaacagaaggataacattccctttgagtttgatgctgattcacttgcctttgacatggaaaatgaccctgttatgggtacacacaaatccaccaaacaagtagaattgactgcacaagatgtgaaagatgcccactggttttatgacacccctggaattacaaaagaaaattgtattttaaatcttctaacagaaaaagaagtaaatattgttttgccaacacagtccattgttccaagaacttttgtgcttaaaccaggaatggttctgtttttgggtgctataggccgcatagatttcctgcagggaaatcagtcagcttggtttacagtcgtggcttccaacatcctccctgtgcatatcacctccttggacagggcagacgctctgtatcagaagcatgcaggtcatacgttactccagattccaatgggtggaaaagaacgaatggcaggatttcctcctcttgttgctgaagacattatgttaaaagaaggactgggggcatctgaagcagtggccgacatcaagttttcctctgcaggttgggtttcagtaacacctaattttaaggacagactgcatctccgaggctatacacctgaaggaacagttttgaccgtccggccccctctcttgccatatattgttaacatcaaaggacagcgcatcaagaaaagtgtggcctataaaaccaagaagcctccttcccttatgtacaacgtgaggaagaagaaaggaaagataaatgtatgagaccgaccttgttcactccagatattaactgtattgaacacaacaaaatacattgaatttgtattaaacatataacgcataaataaagctcccattcttaccctttttttcttttttcttttttttttttttctgagactgagccctgctctgttgcccagg

SEQ ID NO: 47758 - DNA, 2226 bp, Homo sapiens
ggcacgaggctcgggtcaaatgcgcgcctcggaccctagtgcgcgtgcgcgctggtggctccgcccctttggagctacttcctcatgctgcccgctcgcctaccgttcaggctgctgagccttttccttcgtggatccgctcccacggcagcgcgccatggcctccgggagccgctcctggagaggaggtgcgctgccgcctcctccttccagcactcatcgagtctgggacgcgagcttccttatgaccccgtggacacggagggctttggagaaggtggtgacatgcaggagcgttttctgttcccggagtacatcctggatccggagccgcaacccacccgcgaaaagcagctgcaggagctccagcaacagcaggaggaggaggagcgacagaggcagcagcggcgggaggagcggcgacagcaaaacctacgggccaggtcccgggagcacccggtcgtggggcacccggacccggcattgccgcccagcggcgtgaactgctcgggctgcggggcagagctgcactgccaggacgccggagtgcccggctacctgccccgagagaagttcctccgcacggcggaggcagacggcgggctggcacggaccgtgtgccagcgctgctggctgctgtcgcaccaccggcgcgctctacgcctgcaggtgagccgcgagcagtacctggagctggtgagcgccgcgttgcggcggcccggcccctccctggtgctctacatggtggacctgctggacctgcccgacgccctgctgcccgacttgcccgcgctggtgggccccaagcagctgatcgtgctgggaaacaaagtggacctcctgccccaggatgctcctggctaccggcagaggctgcgggagcgactgtgggaggactgtgcccgcgccgggctcctgctggcccctggccaccaagggccacagcgccccgtcaaggacgagccacaggacggggagaatccgaatccgccgaactggtcccgcacagtggtcagggacgtgcggctgatcagcgccaagaccggctatggagtggaagagttgatctctgcccttcagcgctcctggcgctaccgtggggacgtctacttagtgggcgccaccaacgccggcaaatccactctctttaacacgctcctggagtccgattactgcactgccaagggctccgaggccatcgacagagccaccatctccccttggccaggtactacattaaaccttctgaagtttcctatttgcaacccaactccttacagaatgtttaaaaggcatcaaagacttaaaaaagattcaactcaagctgaagaagatcttagtgagcaagaacaaaatcagcttaatgtcctcaaaaagcatggttatgtcgtaggaagagttggaaggacattcttgtattcagaagaacagaaggataacattccctttgagtttgatgctgattcacttgcctttgacatggaaaatgaccctgttatgggtacacacaaatccaccaaacaagtagaattgactgcacaagatgtgaaagatgcccactggttttatgacacccctggaattacaaaagaaaattgtattttaaatcttctaacagaaaaagaagtaaatattgttttgccaacacagtccattgttccaagaacttttgtgcttaaaccaggaatggttctgtttttgggtgctataggccgcatagatttcctgcagattccaatgggtggaaaagaacgaatggcaggatttcctcctcttgttgctgaagacattatgttaaaagaaggactgggggcatctgaagcagtggccgacatcaagttttcctctgcaggttgggtttcagtaacacctaattttaaggacagactgcatctccgaggctatacacctgaaggaacagttttgaccgtccggccccctctcttgccatatattgttaacatcaaaggacagcgcatcaagaaaagtgtggcctataaaaccaagaagcctccttcccttatgtacaacgtgaggaagaagaaaggaaagataaatgtatgagaccgaccttgttcactccagatattaactgtattgaacacaacaaaatacattgaatttgtattaaacatataacgcataaataaagctcccattcttaccctttttttcttttttcttttttttttttttctgagactgagccctgctctgttgcccagg

SEQ ID NO: 47759 - DNA, 2289 bp, Homo sapiens
ggcacgaggctcgggtcaaatgcgcgcctcggaccctagtgcgcgtgcgcgctggtggctccgcccctttggagctacttcctcatgctgcccgctcgcctaccgttcaggctgctgagccttttccttcgtggatccgctcccacggcagcgcgccatggcctccgggagccgctcctggagaggaggtgcgctgccgcctcctccttccagcactcatcgagtctgggacgcgagcttccttatgaccccgtggacacggagggctttggagaaggtggtgacatgcaggagcgttttctgttcccggagtacatcctggatccggagccgcaacccacccgcgaaaagcagctgcaggagctccagcaacagcaggaggaggaggagcgacagaggcagcagcggcgggaggagcggcgacagcaaaacctacgggccaggtcccgggagcacccggtcgtggggcacccggacccggcattgccgcccagcggcgtgaactgctcgggctgcggggcagagctgcactgccaggacgccggagtgcccggctacctgccccgagagaagttcctccgcacggcggaggcagacggcgggctggcacggaccgtgtgccagcgctgctggctgctgtcgcaccaccggcgcgctctacgcctgcaggtgagccgcgagcagtacctggagctggtgagcgccgcgttgcggcggcccggcccctccctggtgctctacatggtggacctgctggacctgcccgacgccctgctgcccgacttgcccgcgctggtgggccccaagcagctgatcgtgctgggaaacaaagtggacctcctgccccaggatgctcctggctaccggcagaggctgcgggagcgactgtgggaggactgtgcccgcgccgggctcctgctggcccctggccaccaagggccacagcgccccgtcaaggacgagccacaggacggggagaatccgaatccgccgaactggtcccgcacagtggtcagggacgtgcggctgatcagcgccaagaccggctatggagtggaagagttgatctctgcccttcagcgctcctggcgctaccgtggggacgtctacttagtgggcgccaccaacgccggcaaatccactctctttaacacgctcctggagtccgattactgcactgccaagggctccgaggccatcgacagagccaccatctccccttggccaggtactacattaaaccttctgaagtttcctatttgcaacccaactccttacagaatgtttaaaaggcatcaaagacttaaaaaagattcaactcaagctgaagaagatcttagtgagcaagaacaaaatcagcttaatgtcctcaaaaagcatggttatgtcgtaggaagagttggaaggacattcttgtattcagaagaacagaaggataacattccctttgagtttgatgctgattcacttgcctttgacatggaaaatgaccctgttatgggtacacacaaatccaccaaacaagtagaattgactgcacaagatgtgaaagatgcccactggttttatgacacccctggaattacaaaagaaaattgtattttaaatcttctaacagaaaaagaagtaaatattgttttgccaacacagtccattgttccaagaacttttgtgcttaaaccaggaatggttctgtttttgggtgctataggccgcatagatttcctgcagggaaatcagtcagcttggtttacagtcgtggcttccaacatcctccctgtgcatatcacctccttggacagggcagacgctctgtatcagaagcatgcaggtcatacgttactccagattccaatgggtggaaaagaacgaatggcaggatttcctcctcttgttgctgaagacattatgttaagttgggtttcagtaacacctaattttaaggacagactgcatctccgaggctatacacctgaaggaacagttttgaccgtccggccccctctcttgccatatattgttaacatcaaaggacagcgcatcaagaaaagtgtggcctataaaaccaagaagcctccttcccttatgtacaacgtgaggaagaagaaaggaaagataaatgtatgagaccgaccttgttcactccagatattaactgtattgaacacaacaaaatacattgaatttgtattaaacatataacgcataaataaagctcccattcttaccctttttttcttttttcttttttttttttttctgagactgagccctgctctgttgcccagg

SEQ ID NO: 47760 - DNA, 1917 bp, Homo sapiens
gactgcatccacgcccgctgactgcatccaacgccgctgactgcatccaacgccgcctgactgcatccaacgccgcctgactgcatccaacgccgcccgactgcatccaacgccgcctgactgatccaacgccgcctgactgcatccaacgccgcctgactgcatccaacgccgcctgactgcatccaacgccgcctgactgcatccaacgccgcctgactgccaacgccgcctgactgcatccaacgccgcgagcagtacctggagctggtgagcgccgcgttgcggcggcccggcccctccctggtgctctacatggtggacctgctggacctgcccgacgccctgctgcccgacttgcccgcgctggtgggccccaagcagctgatcgtgctgggaaacaaagtggacctcctgccccaggatgctcctggctaccggcagaggctgcgggagcgactgtgggaggactgtgcccgcgccgggctcctgctggcccctggccaccaagggccacagcgccccgtcaaggacgagccacaggacggggagaatccgaatccgccgaactggtcccgcacagtggtcagggacgtgcggctgatcagcgccaagaccggctatggagtggaagagttgatctctgcccttcagcgctcctggcgctaccgtggggacgtctacttagtgggcgccaccaacgccggcaaatccactctctttaacacgctcctggagtccgattactgcactgccaagggctccgaggccatcgacagagccaccatctccccttggccaggtactacattaaaccttctgaagtttcctatttgcaacccaactccttacagaatgtttaaaaggcatcaaagacttaaaaaagattcaactcaagctgaagaagatcttagtgagcaagaacaaaatcagcttaatgtcctcaaaaagcatggttatgtcgtaggaagagttggaaggacattcttgtattcagaagaacagaaggataacattccctttgagtttgatgctgattcacttgcctttgacatggaaaatgaccctgttatgggtacacacaaatccaccaaacaagtagaattgactgcacaagatgtgaaagatgcccactggttttatgacacccctggaattacaaaagaaaattgtattttaaatcttctaacagaaaaagaagtaaatattgttttgccaacacagtccattgttccaagaacttttgtgcttaaaccaggaatggttctgtttttgggtgctataggccgcatagatttcctgcagggaaatcagtcagcttggtttacagtcgtggcttccaacatcctccctgtgcatatcacctccttggacagggcagacgctctgtatcagaagcatgcaggtcatacgttactccagattccaatgggtggaaaagaacgaatggcaggatttcctcctcttgttgctgaagacattatgttaaaagaaggactgggggcatctgaagcagtggccgacatcaagttttcctctgcaggttgggtttcagtaacacctaattttaaggacagactgcatctccgaggctatacacctgaaggaacagttttgaccgtccggccccctctcttgccatatattgttaacatcaaaggacagcgcatcaagaaaagtgtggcctataaaaccaagaagcctccttcccttatgtacaacgtgaggaagaagaaaggaaagataaatgtatgagaccgaccttgttcactccagatattaactgtattgaacacaacaaaatacattgaatttgtattaaacatataacgcataaataaagctcccattcttaccctttttttcttttttcttttttttttttttctgagactgagccctgctctgttgcccagg

SEQ ID NO: 47761 - DNA, 1391 bp, Homo sapiens
caccgggctgtacccgagccgccgagccactgcctcccctccggatcctccccggaggctctgcggcccggaattccggggatgctgccccatgcagccctgagccccacagcaagtctgccatgggccgcggggcccgtgtcccctcggaggccccgggggcaggcgtcgagcgccgctggcttggagccgcgctggtcgccctgtgcctcctccccgcgctggtgctgctggcccggctgggggccccggcggtgccggcctggagcgcagcgcagggagacgtcgctgcgctgggcctctcggcggtcccccccacccgggtcccgggcccactggccccccgcagacgccgctacacgctgactccagccaggctgcgctgggaccacttcaacctcacctacaggatcctctccttcccgcggaacctgctgagcccgcgggagacgcggcgggccctagctgccgccttccgcatgtggagcgacgtgtcccccttcagcttccgcgaggtggcccccgagcagcccagcgacctccggataggtgggcgcccgcccccgccccggcccggccctgcgcgcccggcctctcagccccgtgctccccccaggcttctacccgatcaaccacacggactgcctggtctccgcgctgcaccactgcttcgacggccccacgggggagctggcccacgccttcttccccccgcacggcggcatccacttcgacgacagcgagtactgggtcctgggccccacgcgctacagctggaagaaaggcgtgtggctcacggacctggtgcacgtggcggcccacgagatcggccacgcgctgggcctgatgcactcacaacacggccgggcgctcatgcacctgaacgccacgctgcgcggctggaaggcgttgtcccaggacgagctgtgggggctgcaccggctctacggatgcctcgacaggctgttcgtgtgcgcgtcctgggcgcggaggggcttctgcgacgctcgccggcggctcatgaagaggctctgccccagcagctgcgacttctgctacgaattccccttccccacggtggccaccaccccaccgccccccaggaccaaaaccaggctggtgcccgagggcaggaacgtgaccttccgctgcggccagaagatcctccacaagaaagggaaagtgtactggtacaaggaccaggagcccctggagttctcctaccccggctacctggccctgggcgaggcgcacctgagcatcatcgccaacgccgtcaatgagggcacctacacctgcgtggtgcgccgccagcagcgcgtgctgaccacctactcctggcgagtccgtgtgcggggctgagcccggctgataaagcactttctctctga

SEQ ID NO: 47762 - DNA, 1399 bp, Homo sapiens
  misc_feature (955)..(955): n is a, c, g, or t
caccgggctgtacccgagccgccgagccactgcctcccctccggatcctccccggaggctctgcggcccggaattccggggatgctgccccatgcagccctgagccccacagcaagtctgccatgggccgcggggcccgtgtcccctcggaggccccgggggcaggcgtcgagcgccgctggcttggagccgcgctggtcgccctgtgcctcctccccgcgctggtgctgctggcccggctgggggccccggcggtgccggcctggagcgcagcgcagggagacgtcgctgcgctgggcctctcggcggtcccccccacccgggtcccgggcccactggccccccgcagacgccgctacacgctgactccagccaggctgcgctgggaccacttcaacctcacctacaggatcctctccttcccgcggaacctgctgagcccgcgggagacgcggcgggccctagctgccgccttccgcatgtggagcgacgtgtcccccttcagcttccgcgaggtggcccccgagcagcccagcgacctccggataggcttctacccgatcaaccacacggactgcctggtctccgcgctgcaccactgcttcgacggccccacgggggagctggcccacgccttcttccccccgcacggcggcatccacttcgacgacagcgagtactgggtcctgggccccacgcgctacagctggaagaaaggcgtgtggctcacggacctggtgcacgtggcggcccacgagatcggccacgcgctgggcctgatgcactcacaacacggccgggcgctcatgcacctgaacgccacgctgcgcggctggaaggcgttgtcccaggacgagctgtgggggctgcaccggctctacggtgagtccctttgtcgggcgggagggcggggaccgggcggtcctgagccaggcgtgctccccacgctcccganaggatgcctcgacaggctgttcgtgtgcgcgtcctgggcgcggaggggcttctgcgacgctcgccggcggctcatgaagaggctctgccccagcagctgcgacttctgctacgaattccccttccccacggtggccaccaccccaccgccccccaggaccaaaaccaggctggtgcccgagggcaggaacgtgaccttccgctgcggccagaagatcctccacaagaaagggaaagtgtactggtacaaggaccaggagcccctggagttctcctaccccggctacctggccctgggcgaggcgcacctgagcatcatcgccaacgccgtcaatgagggcacctacacctgcgtggtgcgccgccagcagcgcgtgctgaccacctactcctggcgagtccgtgtgcggggctgagcccggctgataaagcactttctctctga

SEQ ID NO: 47763 - DNA, 676 bp, Homo sapiens
cggggagctggcccacgggcggcggggctgggcccggggctcccaggcgctgacccccggggcccgcaggcgtgtggctcacggacctggtgcacgtggcggcccacgagatcggccacgcgctgggcctgatgcactcacaacacggccgggcgctcatgcacctgaacgccacgctgcgcggctggaaggcgttgtcccaggacgagctgtgggggctgcaccggctctacggatgcctcgacaggctgttcgtgtgcgcgtcctgggcgcggaggggcttctgcgacgctcgccggcggctcatgaagaggctctgccccagcagctgcgacttctgctacgaattccccttccccacggtggccaccaccccaccgccccccaggaccaaaaccaggctggtgcccgagggcaggaacgtgaccttccgctgcggccagaagatcctccacaagaaagggaaagtgtactggtacaaggaccaggagcccctggagttctcctaccccggctacctggccctgggcgaggcgcacctgagcatcatcgccaacgccgtcaatgagggcacctacacctgcgtggtgcgccgccagcagcgcgtgctgaccacctactcctggcgagtccgtgtgcggggctgagcccggctgataaagcactttctctctga

SEQ ID NO: 47764 - DNA, 414 bp, Homo sapiens
ccccccaggaccaaaaccaggctggtgcccgagggcaggaacgtgaccttccgctgcggccagaagatcctccacaagaaagggaaagtgtagtgagtgagcgccccgggcggtcctcggggtgggcagcccgcgggcggccttggggcaggggtgcggggcaggcagcgggggggggctgtgcctgcaggagacgccccgcccccctgcagctggtacaaggaccaggagcccctggagttctcctaccccggctacctggccctgggcgaggcgcacctgagcatcatcgccaacgccgtcaatgagggcacctacacctgcgtggtgcgccgccagcagcgcgtgctgaccacctactcctggcgagtccgtgtgcggggctgagcccggctgataaagcactttctctct

SEQ ID NO: 47765 - DNA, 1324 bp, Homo sapiens
caccgggctgtacccgagccgccgagccactgcctcccctccggatcctccccggaggctctgcggcccggaattccggggatgctgccccatgcagccctgagccccacagcaagtctgccatgggccgcggggcccgtgtcccctcggaggccccgggggcaggcgtcgagcgccgctggcttggagccgcgctggtcgccctgtgcctcctccccgcgctggtgctgctggcccggctgggggccccggcggtgccggcctggagcgcagcgcagggagacgtcgctgcgctgggcctctcggcggtcccccccacccgggtcccgggcccactggccccccgcagacgccgctacacgctgactccagccaggctgcgctgggaccacttcaacctcacctacaggatcctctccttcccgcggaacctgctgagcccgcgggagacgcggcgggccctagctgccgccttccgcatgtggagcgacgtgtcccccttcagcttccgcgaggtggcccccgagcagcccagcgacctccggataggcttctacccgatcaaccacacggactgcctggtctccgcgctgcaccactgcttcgacggccccacgggggagctggcccacgccttcttccccccgcacggcggcatccacttcgacgacagcgagtactgggtcctgggccccacgcgctacagctggaagaaaggcgtgtggctcacggacctggtgcacgtggcggcccacgagatcggccacgcgctgggcctgatgcactcacaacacggccgggcgctcatgcacctgaacgccacgctgcgcggctggaaggcgttgtcccaggacgagctgtgggggctgcaccggctctacggatgcctcgacaggctgttcgtgtgcgcgtcctgggcgcggaggggcttctgcgacgctcgccggcggctcatgaagaggctctgccccagcagctgcgacttctgctacgaattccccttccccacggtggccaccaccccaccgccccccaggaccaaaaccaggctggtgcccgagggcaggaacgtgaccttccgctgcggccagaagatcctccacaagaaagggaaagtgtactggtacaaggaccaggagcccctggagttctcctaccccggctacctggccctgggcgaggcgcacctgagcatcatcgccaacgccgtcaatgagggcacctacacctgcgtggtgcgccgccagcagcgcgtgctgaccacctactcctggcgagtccgtgtgcggggctgagcccggctgataaagcactttctctctga

SEQ ID NO: 47766 - DNA, 1447 bp, Homo sapiens
caccgggctgtacccgagccgccgagccactgcctcccctccggatcctccccggaggctctgcggcccggaattccggggatgctgccccatgcagccctgagccccacagcaagtctgccatgggccgcggggcccgtgtcccctcggaggccccgggggcaggcgtcgagcgccgctggcttggagccgcgctggtcgccctgtgcctcctccccgcgctggtgctgctggcccggctgggggccccggcggtgccggcctggagcgcagcgcagggagacgtcgctgcgctgggcctctcggcggtcccccccacccgggtcccgggcccactggccccccgcagacgccgctacacgctgactccagccaggctgcgctgggaccacttcaacctcacctacaggatcctctccttcccgcggaacctgctgagcccgcgggagacgcggcgggccctagctgccgccttccgcatgtggagcgacgtgtcccccttcagcttccgcgaggtggcccccgagcagcccagcgacctccggataggcttctacccgatcaaccacacggactgcctggtctccgcgctgcaccactgcttcgacggccccacgggggagctggcccacgccttcttccccccgcacggcggcatccacttcgacgacagcgagtactgggtcctgggccccacgcgctacagctggaagaaaggtgaccgtccaggctcctcctggaggcctctcctctgcagcacagtgggctgccgcggtcgggctttggggcagacggcaggagggaccttccggggtggtggctgccactggagtctagcaggcgtgtggctcacggacctggtgcacgtggcggcccacgagatcggccacgcgctgggcctgatgcactcacaacacggccgggcgctcatgcacctgaacgccacgctgcgcggctggaaggcgttgtcccaggacgagctgtgggggctgcaccggctctacggatgcctcgacaggctgttcgtgtgcgcgtcctgggcgcggaggggcttctgcgacgctcgccggcggctcatgaagaggctctgccccagcagctgcgacttctgctacgaattccccttccccacggtggccaccaccccaccgccccccaggaccaaaaccaggctggtgcccgagggcaggaacgtgaccttccgctgcggccagaagatcctccacaagaaagggaaagtgtactggtacaaggaccaggagcccctggagttctcctaccccggctacctggccctgggcgaggcgcacctgagcatcatcgccaacgccgtcaatgagggcacctacacctgcgtggtgcgccgccagcagcgcgtgctgaccacctactcctggcgagtccgtgtgcggggctgagcccggctgataaagcactttctctctga

SEQ ID NO: 47767 - DNA, 1207 bp, Homo sapiens
caccgggctgtacccgagccgccgagccactgcctcccctccggatcctccccggaggctctgcggcccggaattccggggatgctgccccatgcagccctgagccccacagcaagtctgccatgggccgcggggcccgtgtcccctcggaggccccgggggcaggcgtcgagcgccgctggcttggagccgcgctggtcgccctgtgcctcctccccgcgctggtgctgctggcccggctgggggccccggcggtgccggcctggagcgcagcgcagggagacgtcgctgcgctgggcctctcggcggtcccccccacccgggtcccgggcccactggccccccgcagacgccgctacacgctgactccagccaggctgcgctgggaccacttcaacctcacctacaggatcctctccttcccgcggaacctgctgagcccgcgggagacgcggcgggccctagctgccgccttccgcatgtggagcgacgtgtcccccttcagcttccgcgaggtggcccccgagcagcccagcgacctccggataggtgggcgcccgcccccgccccggcccggccctgcgcgcccggcctctcagccccgtgctccccccaggcttctacccgatcaaccccacgagatcggccacgcgctgggcctgatgcactcacaacacggccgggcgctcatgcacctgaacgccacgctgcgcggctggaaggcgttgtcccaggacgagctgtgggggctgcaccggctctacggatgcctcgacaggctgttcgtgtgcgcgtcctgggcgcggaggggcttctgcgacgctcgccggcggctcatgaagaggctctgccccagcagctgcgacttctgctacgaattccccttccccacggtggccaccaccccaccgccccccaggaccaaaaccaggctggtgcccgagggcaggaacgtgaccttccgctgcggccagaagatcctccacaagaaagggaaagtgtactggtacaaggaccaggagcccctggagttctcctaccccggctacctggccctgggcgaggcgcacctgagcatcatcgccaacgccgtcaatgagggcacctacacctgcgtggtgcgccgccagcagcgcgtgctgaccacctactcctggcgagtccgtgtgcggggctgagcccggctgataaagcactttctctctga

SEQ ID NO: 47768 - DNA, 543 bp, Homo sapiens
agccgtgatttgtactttcagcccaaatgccctggaaaaggctgtgtggagctgattcttctggagtgcccagcctatgaacttggaatattcaaaagaatcaggtgactctgatctcctgccaatctgaataggttacttaacagctgaaagttcttgatggtactgttacttctgaccagaagattcaagtaccaaacccaggtcgatccgactgcagaacgcttgccctgcatttctaccctgcacagctttccagatgggtttgtccactagcaggcaagaatggcccagctcagcaacagagaaggaagatttctcagccagccaaattaactcagtaaataaatactggccaatatttaccaggaaccctgagatttctacctacataagcacaaaatgtagttgaggttcctgggcactaggcatgtttagatatgagatatgccttcatgttctgtttgtttttttaaatgtctttttatgtgctgctgatctatattaaaatatagtaaaaaatatactaataaaataaaatgt

SEQ ID NO: 47769 - DNA, 819 bp, Homo sapiens
ttgaggagctcctccaggaggggctcaagcccgtcctggaggaatgtgataattaggttggggctggggaggcagcccagcgcgagtcctccccgggcaaataggctccgagggccccggggcctcctctcctcctctcaggcagcagggccctggagacaggcggaggcggggccagggccggtccctcaccccacatcgggatcggggccccccacttccccccaaggggccctgcccaccaccaccttcccggtgacccagatgaccacatttaataccaaatggggtggggggaggcgcccctccagtgccaggggcacgtgctgtgagcttcctgggagcccaggttgtgctcactgctctcccgtatcgtgagcaccacctctgctttccctgcgtagatctaggccaggggctgcttgtttttgtggagccgtgtgtgttcttctctgagcagctcctccccagaggaccccagcgcagtcccgggagatggcggaaagaaggcaccagggcacagtggacactcatcccgtgacagcgatggtgaccatgactgtgggagaaagaacaggacccgggatggagtggggctgtctgagtttccccagtgaactttgtgctttggcgttccacccctgttgttacttgttactgagtttcctagacctggggtgggtgttcccccaggaggaggggggtcccgacctgtgtcctgtggtggccatttgcagcttctgtgttgtgattcccttctcttcaacggtttcagtacatatctctcttcaataaatttcattcagtgttccaaaaggc

SEQ ID NO: 47770 - DNA, 937 bp, Homo sapiens
ctgtgtttgtgatttaacattgtagggccaactaaattcccaaactagcactgacatctggtgcttaccgaggttcataccagatgtcagtgctagtttgggacttagttagtgctgtgtttgtgatttaacattgtagggccaacgttttcctctatggttaccttgttttggtaataattgtttaaaaatatgtgtaacatttcatggagcaggttggatggcaggattttgtggttggaaatatggaaacttctgccgatttggaggtgtaggaggttgactattggatgtctttaggaagcatagcctttactttggctgttttggtaacccctgacccttctatcgcaatgggacttctatgctggtgggaattccacactttctgccctagacaattagggtctgccatgagtcccccactctgctgagggtgtgttctaaaaatgaactaatattattagtcattattgatattcaaatccaatttgtccaaatagatcattagcactctgagacctgggttccctcctagctcctgtgacatcttatcagagtgattaaatagcagatggctcagtaaatatttgttggtggcaaatacatacttggcaacctcccagtgactttaccctggacagtaaaataattgcttgaatgcataacccaactttgaggtgagcctgcaggagctgctgaggcacacctgtgtgttgggctctcaaggcagccagaggtgagtcggcagctgagatcacgctccagggattcctgcgtcctttaataagattctggggtgggcacagttctggggtggacatggtggctcacgcccataatcccagaactttggaaggctgaggtgggaggatcgcttgagcttaggagttcaagaccagtctgtacaacacagtgagagcttgtctctaccaaa

SEQ ID NO: 47771 - DNA, 1803 bp, Homo sapiens
agcgggcggttgccatgaagacccggtccgggagcagtcgactgccggagactcgggaggctgagctttcctcggcctgagccagccagaccccgggcaccgcgctcacccctcttcgccgccacgtccgcgaaggcctcacgcgcgaggccaggcgaggccccgaggcgcccaccacttcacgacaccggagcgaaccgggcgccagaggctgcgacccccctgccccgaatcctgccggtgggagtggctgcatttgaaccaaacggccttcgcgggcagcagccgtcgccccgcagtcccggggctcccaagggcctgtgaccgacgccgccctccgcgtcttcgtccccgaagccccgggaaccatccgccctcgggagaccatgctgcagatgcgaggaaagccgtttcctggaacatcggaattctaaccccagggtgaaggactcacgacaggcgaggggcagacatgctgaattccacgggcgaactggagttttcgaacgaagaagatcccgagatcatctcccaactcacttccctgcctctgtccggtgggaaaagctcagctggtgtgcccgaaaaaacgggctatccggactccgtttatgtcatggcagccaacatttttcagggtattcgaatcgaaaagtcggcacagaaagtcttaatcaagtatgggaatgaacccctgcggtccttgtccgagtctgaggatcagtcctttcagcgtttgtcttatgagctggctttcagtgccctgaaatatcaagatattttggaaactatattgatagacagctgtatcttcccaagtaccacaataccagatcatttgagcagtcttattattgtgatgctatatgatttccaagatagaaaatttcaaactcgtgtcctttctgataatgaagagcccatatcagaagttcaagaagtagagaaccttcttaacagttttaagataaaattggctgcagcattggcaagatgtcgaatcaagcatgatgccctttcaatttaccacatccttccagaaacagttaggaaacaggaactaagggcctccactttaccactttatgcttggataaatacttgtaaaatcagccctgaagaagtttataataatttgaagagaagaggctataataaagtcaaatctgtattgcatattgatgataaagtctttgctgtggatcaacattgctatgatgtcttaatttttccatctcatcttaaaaatgatcttataaatatagatcttttcaaagattacaaacttatatttcaggtaaactaatatttactttcattgtgattctcaacaatccaacctagccaaagaacttctccacttaaaaataaaacctaacactgtttatatttttatagattatcagggaggtttataaggcctaattgtcaccttgaataaaattaatacctctacaatcagtgcatctggttggcatctttgtctcatgtgaatttataaagaacatattcttctcccagattccatgaatgggaagatttgcattgctggcagctgtaaggttctacttttctcccctaaaggagaattcaagagaaagtacaatgagaccttttcttccttccctttctggggaagatgctagtgccatcttgcatatgaaaaaacaattgtaatagtttttcataatttctttaatatagtcttatagctttgatttgtaagaggtatataaaggctatcaatataggaagagaatgtgaggtataatgtagattcaacagaacgaaaataaaaggtat

SEQ ID NO: 47772 - DNA, 538 bp, Homo sapiens
cagaaggagccaacagagtgagatgaaggggacaacttcagatactcaggcagaagcataagtccccacctgctgacctgctgcctgctatcttaacacgaattcttcatctgaatggatgagcttttcacagtgtctatgtgaattcacgccaagtcatgtgacagtttgcataatgaagtgtcagcagatgtgatggaaacagaagtaaataaaatatttgcacgttgctgcttgctcccttttacctcagcctttaccagggagaacaaacccagctaacctgctagaggatgacagacacgtcaaccagagctggtgtcccagtcacccaagccaaggccattctacctaagcccacagctaattcacctccagaaatgtgagcaagcctagccaagatcagccaagccaagctcagagagacaatttagcacaaactatcaaaagctttaaaagatgtctttatctatagttagaattacacatttaagaatctaccttattgggaaaaatacagtcaaagattttatagaaa

SEQ ID NO: 47773 - DNA, 1340 bp, Homo sapiens
agcgggcggttgccatgaagacccggtccgggagcagtcgactgccggagactcgggaggctgagctttcctcggcctgagccagccagaccccgggcaccgcgctcacccctcttcgccgccacgtccgcgaaggcctcacgcgcgaggccaggcgaggccccgaggcgcccaccacttcacgacaccggagcgaaccgggcgccagaggctgcgacccccctgccccgaatcctgccggtgggagtggctgcatttgaaccaaacggccttcgcgggcagcagccgtcgccccgcagtcccggggctcccaagggcctgtgaccgacgccgccctccgcgtcttcgtccccgaagccccgggaaccatccgccctcgggagaccatgctgcagatgcgaggaaagccgtttcctggaacatcggaattctaaccccagggtgaaggactcacgacaggcgaggggcagacatgctgaattccacgggcgaactggagttttcgaacgaagaagatcccgagatcatctcccaactcacttccctgcctctgtccggtgggaaaagctcagctggtgtgcccgaaaaaacgggctatccggactccgtttatgtcatggcagccaacatttttcagggtattcgaatcgaaaagtcggcacagaaagtcttaatcaagtatgggaatgaacccctgcggtccttgtccgagtctgaggatcagtcctttcagcgtttgtcttatgagctggctttcagtgccctgaaatatcaagatattttggaaactatattgatagacagctgtatcttcccaagtaccacaataccagatcatttgagcagtcttattattgtgatgctatatgatttccaagatagaaaatttcaaactcgtgtcctttctgataatgaagagcccatatcagaagttcaagaagtagagaaccttcttaacagcataagtccccacctgctgacctgctgcctgctatcttaacacgaattcttcatctgaatggatgagcttttcacagagttccaaactaaggaatccaggagtggccaatccagagattcattccttatctttgacgaacatctgaactcctggctcatcctgtggaattcaggccatacaggagatcaaggtcatttgctttgggttaaatgaatgttgccaggtggaggttgctagagggagagtgctatgtgaaagtgctgtataaactgcttgcttttcacaaacagtagtgattctttatcctgtccagcctgccacaactggaccatcctgtatgtaagtccccttaataaatcctgtgtctcattcactggct

SEQ ID NO: 47774 - DNA, 1052 bp, Homo sapiens
agcgggcggttgccatgaagacccggtccgggagcagtcgactgccggagactcgggaggctgagctttcctcggcctgagccagccagaccccgggcaccgcgctcacccctcttcgccgccacgtccgcgaaggcctcacgcgcgaggccaggcgaggccccgaggcgcccaccacttcacgacaccggagcgaaccgggcgccagaggctgcgacccccctgccccgaatcctgccggtgggagtggctgcatttgaaccaaacggccttcgcgggcagcagccgtcgccccgcagtcccggggctcccaagggcctgtgaccgacgccgccctccgcgtcttcgtccccgaagccccgggaaccatccgccctcgggagaccatgctgcagatgcgaggaaagccgtttcctggaacatcggaattctaaccccagggtgaaggactcacgacaggcgaggggcagacatgctgaattccacgggcgaactggagttttcgaacgaagaagatcccgagatcatctcccaactcacttccctgcctctgtccggtgggaaaagctcagctggtgtgcccgaaaaaacgggctatccggactccgtttatgtcatggcagccaacatttttcagggtattcgaatcgaaaagtcggcacagaaagtcttaatcaagtatgggaatgaacccctgcggtccttgtccgagtctgaggatcagtcctttcagcgtttgtcttatgagctggctttcagtgccctgaaatatcaagatattttggaaactatattgatagacagctgtatcttcccaagtaccacaataccagatcatttgagcagtcttattattgtgatgctatatgatttccaagatagaaaatttcaaactcgtgtcctttctgataatgaagagcccatatcagaagttcaagaagtagagaaccttcttaacagcaagaaggccctcaccaaatgccagcaccttgattttggacttctcagcctccagaactgtgagaaaataaacttctgttctttataaatta

SEQ ID NO: 47775 - DNA, 434 bp, Homo sapiens
gtgacaggtgaccgcacacatgtgggtgccagcgagggtccgaggaggctggcgatgccttcgtccttggtcaggtcacgagcacctgtgaatccacagcagaacagctgttcacagcttcccctttcatcccggagtgagtttcaaaacctgcaccacgactgcctctgtgtattttctccgtcctctagaagatcctaggctccgtgcagcaatgggtgaaggccccttacacaaaaacaaagtcaggtcctgagttcttttgctgtttctttgctttctcctgcaaagtcactcgaaaggtgactggcggaggtgaggctgcgataattagcttgattgtggtgacccttccacaaagcacgtgtatgtcggcatattcactgggtcatgcacctcgaatacatatttttacttgtcaaatacatgataat

SEQ ID NO: 47776 - DNA, 204 bp, Homo sapiens
gtagaattaatggataaaaatgtatgactgtttttcaggcttttaatatgcattgccatatttctttccaaaaagggtgcagtcttcagacatacagactgtgcaggggtttccaacagtaggcaagctctctctcctctttgtctcaacttttctgacgttatagctaaaatttgatacatacctcgttgctttaatgtgaaa

SEQ ID NO: 47777 - DNA, 385 bp, Homo sapiens
cctctccatatctttgctaccacttgttattacatgtcttcttgattttagccattttagtggatgggcggtagtatctcactgtggtttcaatttgaatttgcctgttgtctcatccgtgaaagggccctagtgtggaacctcaggagaatggaaactccccctgctgtgtttaatcttatatccctagggcctagaatagtgcccagtgtacaataggctcccaataaatacttgttgattgattaaatattcaatacttccattatttaatccctagaattaagttagcttcttataggttagttataaggtgttctgaaaccatataagtgaacttttcatactatctcacattaaaatctgttgacctatcttaaaaaaa

SEQ ID NO: 47778 - DNA, 484 bp, Homo sapiens
gaagactctaagagaaaaaagacagatgtcttctggaggacaaggtattgggccagcagattacttttggactggagctacaacatgacttcttccctgggtctcccaacttctggccgacctggcagatttgtgacttgccagactccaaaattacataaggcaattccttaaaataaatctctctctctctctctctctctctccctctccccctccctccctctccctccctctcccgctccgtctccctctctctctctttctatctaatccatacctaatattctatttgttatgtttctctgtataaccctgattaacacagtttgtgaatatgccactgtaactgaatttttaattttttttttcttctccaaatgtatatatatgtatactcaatctttataatttcgggtgcttttcacccagtttttttgatagcattttggcctttctttttaatcaccataaatgtttttca

SEQ ID NO: 47779 - DNA, 725 bp, Homo sapiens
aaatgttttatagaaatagggtctcactgttttgccagggctggtctcgaactcctgggctcaagcagtcctcaccttgacctcccaaagtgctgggattataggcatgagcttactcatagttttaaaagtcaaattgtctttcatctgtttcctgtctgcacaaaatagccttctcttccattaatctgcatattcccttaggctttatttgtttttgagacagggtttcactctatcatccagggctggaatatagtgatgtgatcacagcttgcgcagccttcacctcttggggctcaaggggatcatcctacctccatttcctggagtaggctggggactattagtcacgaggccaccatggcctggctaattttttaaattttttggtagagatgaggggtctcactatggttgccccaggctgttctcaaactccctaggctcaaacagtcctcctgcctcagcctccccaaagtgctgggattacaggcatgaagatcttgcttgcattttaactcacaattcatgtagttatataacttcattttgaaatagtttcaaacttaaagaaaaattgtgagaaatagcacaaggaacttcttcctgtaaccaggggtgtccaatcttttggcttccccaggccacattggaaaaagattgtcatgggccacacgtaaaatacactaatgctaaggatagctgatgagctaaaaaaaaaa

SEQ ID NO: 47780 - DNA, 466 bp, Homo sapiens
tgtgctgttcccttaaatgtggtactaaaattatagatggcaatactaatgcctttgtcatagaagccttagaatcccagccaggcctgtgtgagtatgctcagacagttgcaaagtgatttcactcctctcaccttggggtcaacacctacccccactacacccctggtcagcaggaagaatttagaggggtcttcgcccttttcccatcttcattagctaacaccttaagattaaggtgttataaaatccaaagggagagattgaaaccaccattgcaaaattgtaactgagacagtgaaaagagatctgacctaaccaattccatcttgcttctaacctccaagctgttcttgttcattcctgggcataggctgaactaactttgggaagaacttaatttatagttcatagcttaaaacaaaggtgataacaggccttttccaaggcaaacccccttcatgcc

SEQ ID NO: 47781 - DNA, 396 bp, Homo sapiens
ttcctttgttaaaaggccaacaaccccctaagtgagatgttcttggaaagaccccttgacacttgaaaggtgagaaatccatttaaaccatgtgatgccttccactgctctactgctgggttctgcttgttttaatattagtgatagatgctctggctggtgtattcagtaattggaagtgaactatataatataaatgacatttcatggcatatgtgagggcacagtggatgacacttgatttcagtgttgcctgcctttaggtttaaagttagaaaccataatggaatttaattatcagcatatattcaaagattagttcaatgcgtttgtaatacccttagttgttaggtaactgtttgattattgggcatgatgctgagtgtgtgtgattta

SEQ ID NO: 47782 - DNA, 600 bp, Homo sapiens
ggacaaaaagtaagaccccatctctacaaaaaaatttttttaattagccaagcgtggtgatgtgtacctgtagtcccagctacttggtaggctgaggtgggaggaaggcctgagcctaggaggttgaactgcagtgagctgtgattgcaccaccacattccagcctgggcaacagagtgggacccttctcaaaaaaaaaaaaagaaagaaagaaagaaaagaaaagtactataactattaaagaaattcacttacttgtaagaacggctgaaataaaaaatagcccccaaatgctgctaaggatgaagaaaagacaaatcactcatacattgctggtggaaagtaaaatgggacagccactctgacagtttggcaatttctttaaaagctaaacatgtgactaccatacaacccagcaattgcacccctgggcatttatctcagacaaatgaagacttacattcacacaaaaatctgtacatgaatatttatagcagctttatttgtaataccaaaaactggaagcaatccagatatacttcaatgagtgaatagtttaaaaattgagtacatctatattgtggaatattactcaacaat

SEQ ID NO: 47783 - DNA, 1053 bp, Homo sapiens
tctaccctaatgagctcatcttaacctgattacaactgcaaagactatttccaaataaagtcacattcacaggtattgggagttaggacttatcctaatatcttttggatcttatgatatccagttcagcccacaattaaacccacaatgctcttcgtgagaaagaagcagcagccatgaagaaagcctagatatttttaagggtggagagcgctcttgacctttcctttgacagccttgagcttccctaaatactgttgtcctcactgactggcttgtcttaggagtagggtttttgatcttcaaaccttggagtgcagttcagtaaagtgagacaagcataccttctgtctctgaggtccaggagcactggaagagtggacagattaattgtgaatagagaatgccctgaaaatacaggaagaaccaccctcctgcagatgtagctctggtcccttgtgggagcccctggaccttcggtgaggcagatctggaaggctacagcaggggatgtaaagagccccttcctagacccgcttcctggcccattattctgcccttccaaatgtattccaagggctcctcattttgatcattgctcagtggcattgttgtagaggaagtaggagggtgcttggtggagtttgggaggcccatgaatttctgcacttggagaaatgttaatgttgagcttatatttctctccttgcagcacagaagaccattactaggtctgtgtgtagaagcccaagcagttagaggggctctgcgaggcttgtgggatttttctggccagaagatgggccatggtggaggaaggccatgttaaatggctgtgatccactgcctatagggaagagtacgcaacacacacccaggagggcttaggtagccggaactgtggcggctccatacccccaaagtgaattttaaacttgacttatttatgccgttctcatagcaacaggaaaactgttccgacctatagccacggaagactctgtaaaagaaactgtaggaggaaaaaaagataatgccaggaaaaaaaaaaat

SEQ ID NO: 47784 - DNA, 446 bp, Homo sapiens
  misc_feature (444)..(444): n is a, c, g, or t
ggaggaaatcttcatgaccttggattagataatacagcaccaaaagcacaaaaaaacaaaagaaaaaatagataacttgaacttcatcaaaactaaaaagcttcatcatcaagaagtgaaaagacagctcacacaatgggaaaaaatagccaaatccatgtaagcagaaagtagatttgtggtttccagagtccagcttgaagtggggatggggagtggctgctaataggtattgggcctctttttggaggagtgatgaaaatattttaaaattagataaagtgatgtttgcacactttgtatgttcacagagtactaaaacccattgaactatatacttaaaagagtaaattttatggtgtgtgaattgtgaagctaattttttatacttacatatctaattcagtaatgctagaaaaatgacatatacacatgcaaaaaaanaa

SEQ ID NO: 47785 - DNA, 628 bp, Homo sapiens
caagagatctctttttttttttttttttttgagacggagtcttgctgtgtcgcccaggctggagtgcgctggcgtgatctcggctcactgcatcctctgcctcccgggttcacaccattctcctgcctcagcctcccaagtagctgggactacaggcgcctgccaccatgcctggctaattttttttttttttttttttagtagagatggggtttcaccgtgttagccaggatggtctcgatatcctgacctcgtgatctgcccgcctcggcctcccaagaggtcacttttgactgcaacatgcaatttcctggagagatgaattagctgctcacaccgagatgattagcgtcacagggtgtctgaagcagattgaagcagacactccccacgctggaggcggctgtgaaattattccagcagtacagtctgtttgttccacaattaatgttacgcagttgggatttcatgctcatcttcacgtttgtttacatttctctcaactgcaagtggtgccatgtattttgtgtgtgtgtgtgtgtgtgtgtgtaaggtttgatacattttaactttttaaaatagatttgtgtatattttgtgtatgtaaataatagactagtatgtaaat

SEQ ID NO: 47786 - DNA, 286 bp, Homo sapiens
caggatagtcctcagcaagattccgtgtcattgtgttcacaagcacactagaattgtaacaagtctcagatttgggttaaggagagatgataactgtgtctgtaggatttgcccttcctctgtcttcacaccccattcactctgagacaaaggaggtacttccagggctgctggaccagcagggatgggacctcgcctctgccctgtcttggggtcagcctgcccagcgagtaccctctgctggctccttctggcatcttactgggtcctgccgtgcagggacaag

SEQ ID NO: 47787 - DNA, 747 bp, Homo sapiens
atttaaaaagaaagaggatttaaacgtacctatagaaacaaagatttatggttaaagaatgagatcagaagtctagaatgtttttaaattgtgatatattttacaacatccgttattactttgagacatttgtcctaatctacgtataaaactcaatctagggctaaagattctttataccatcttaggttcattcatcttaggctatttgaaccactttttaatttaatatgaaagacaccatgcagtgttttccgagactacatagatcattttatcacatacctaccaagcctgttggaaataggttttgataatttaagtagggacctatacaaaatatattacatttatcagatttttaaatacattcaattaagaatttaacatcaccttaaatttgaattcaatctaccgttatttcaaactcacaaatataactgcattatgaatacttacataatgtagtaagacaagatgtttgacaggttcgtgtgtaattttctattaatgtttttacattgccttgtttttatgtaaaataaaaaatatgggcaactggtttgttaacaacacaatttcttcttagcatttcaaaaatatatataaagttgttctttttcctatttcatgaactatgttttttttttaaaataacatggttaagttttatatatatttacgtttgtttcaggaatgtctacttgtgactttttatcaattaaaaataatatttggaagaaagag

SEQ ID NO: 47788 - DNA, 512 bp, Homo sapiens
aatttggggagagacatggagacaggggcttttaagtacaaccatgctctgccactcccttactactcaattaccctgggtttggtgattgcctattttactcaggtaaaatactggtcctgcagcagggaaaccaaacttggccctaaggtaagcatcacttggccatgctgtaagcagagctcagctctttggtatcctttctgccagctcacagtttaataacagatgccatgaggcatgtggcattttctcagcgaagtcggcttctttctcttttctacatgtatcacttattcatttgacaactatgttttgagtacccactatatgtcaggtgatgttcaagatgctgtagattgaacagtgaaaaagaaaataagattctggagagtacttgccctatctttctagagctccccagtttgggtctgggaatgtgggaagaggaaactccagcacacatctgcccaatgcctgactgggcccctctctctacagacacctttgct

SEQ ID NO: 47789 - DNA, 865 bp, Homo sapiens
aatcaaacaagtctccaggaaaatctggtccatgggctaccaatttgagaccattggtctggtagatacactttcattaatatacttactccatcactctttctatattttagaagttactagtagaaatgtatgcaggagtcactggagaccttattaaaatgcagcttctgattcagtgagctggggtggggcctgagagtctgcatttctcccaggctccctggtgctgccagtggtgctgctctgagtaacaagggggtggggaatgatatggagccgtccattattatcccatctgacaaatgagtcacagagcccttaggtaattgaggtgggatcagtctgattctgtaagctgtgttttcagccacaacatttactgcaaacttggagtaggtaattatgaagttcctttaacttgctgtggaggttgaatgagctctagagtaaggggtccgcaaccccggtaccggtccatggcctgttcggaaccaggccacgcagcaggagttgaaaggtgggtgagctagcgaagcttcatctgtatgtacagccactccccactgctcacattaccacctgagctctgccttctgtcagatcagtggtggcattaagatgctcgtaggaatgcaaaccctattgtgaactgcgcatgcaagggatctaggttgcatgctccttatgagaatctaatgcctgatgatctgtcactgtctcccgtcacgccttgatgggactgtctagttgctggaaaacaaactcagggctcccactgattctacattatggtgtgttgtacaattatttcattatatattacaaggtaataataatagaaataaaatccacagtaaatgca

SEQ ID NO: 47790 - DNA, 810 bp, Homo sapiens
tcccctttatgttgtcacagattatgtctttatacattgtgtgcccataatgtaaatttatatttagttcttatccatttgtcttttaagtcctgcaggaagtaaaaaaatggagttacaaagcaaacataatgaccctggcttttatatttgtctatatagttaactttattggaagtctttattttttcctccagatttgagtctagtttctttttatttcatcttgaaagacaccttttagtgttccctgtatagcaggcctagtagtaacaaactcagcatttgtttatctgggattatcttcatttctctttcattttgaaggacagttttaccagctagagaattctcagatgatagtgtttttctttcaggaatttatatatgtcatccatctgtcttcaggccttcaattgatttctgcggagatatgagctcctgatattaatgagggtctcttgtaaagtaaaaatgccacaaaactttcccaccatttgaagtcgcctttttcctgatttagcattcacttggttactgtaaacctttaattattttccagagttctaacaaggttggtttttatagttctttttttttttttggtgtttctgtgtggggacagttgggagctgtgtactccaccatttgattatgtcactcaacactgttaagtgaatggaccagttgtccattcgagaacaacaacaaaatgagatatgcaaagaaacaggaaaaatgtgacccatgcacaggactatcaataggcaacacaataataactgccattttagttggcagaaactgggt

SEQ ID NO: 47791 - DNA, 582 bp, Homo sapiens
gaacctgcgggtggcgggggaggctcaagggtcatctggccgaagcttcccccttcacaggtgggaaagcctagacatctttagtcctttgtttggagctttaagtctgagggtgtctgtgtgagcagagggacagataggatggctggagggaccccagggttgggattggcacagaccaggctgggaaggtgaactcagagctgagacaacacaaggaaatgccagcccagagccttgtgggaggcctggggtggtcccggtaaacggggccttgggtctgcaagccacgtatcatgactccaacagccagctttcctggcctgataacaaattgcctaggacctgccactggctctcgcctccctccacctcactctggcagctccctctgccccatgcatggctttgctttggccagagccctggaaccaaagccctttacctggaggggacattgagactattggcgcatcctcctgggaggcccagagagggtaagagccttgcctgaggccacacaggccactggaggtgtgcagagcctggagccccactcttctgagttttgtttttccactt

SEQ ID NO: 47792 - DNA, 441 bp, Homo sapiens
acccagaccctggtgtgtctgggccatgagaataccttcccaccccagctaagccaccgtgtaagtataaatcttatgcgtacccaacttgttgctccaaggctgctttccatggaaataaggcactggacaattccttggaagagcctcagaccaatttatgaggcacacaacccaagcccaagagatgtacactggctcagtttaccttaaatggaagatctcacccagtggcctcttctccttcctagtcaattgaaaaagagcttctctttccctctttaatttgtccttatcttctgaacagctcatgttaccaccataaataacttatggaacaggatgcttttaaaaaaaatgggcgtttaagtcttatcttggctgggcgtggtggctcacacctgtaatcccagcactttgggaggccaaggcaggcagatc

SEQ ID NO: 47793 - DNA, 351 bp, Homo sapiens
agcagtggaaggaggaagaaaaacagagcacaacaatcttagtgagttgatgagatgtagatcaagtttagagagtcaaacagctggaatttttagagtagactcagaatttcagagataaggatatatgtctttttgattcctttgagtctaaatgagagaggaaattacctgaggtcaaggttaagaactacgagaaaacagcagaccaaacaacgcacaatcattataaaaactgagattaggccgggtgtggtggtcccgtctgtaatcccagcaatttgaaaggttgaggcgggcagatcacgaggtcaagagatcgagaccatccgggtcaacatggtgaaactc

SEQ ID NO: 47794 - DNA, 644 bp, Homo sapiens
aatgatataataaattcactatttcatagcctagtggctaagagccttggttctgcaaccagacttccaggcacctaagtgccagtctcggctctaccccactaaccagctgtgtgaccttgggccccagtttcctaatgtgtaaagtggggttaaattatggtagatacttaaaacctttaaatggggtacaggtatgttacctgaaacagtgctttgctcatatcagcatccagcgaatgttagctaccattatgccttcagtaccatgtagttaactgttgctaattactttgaggcacatggcaagattctgaaattgccttctgaatggtgaaagagaattttgtgtggtttttatgggtactgtaagcctagaaagtcaatgaaaatttgggcttcacccttatcccaccactgattctggataattttggataagagtttatttctgttatccattttcagaaaagatgattgtgtagtctcttccttacataaatatcttttgaactggttataatgtgcttgtggagctttttttttttgagacggagttttactcttgtcacccaggagtctgtagaggatgccacggtaatcgtggtgaacacttcctttctgtctcaattcccagtagaagt

SEQ ID NO: 47795 - DNA, 411 bp, Homo sapiens
caaatagtgaaaagtcagtagacagcagaaacttggaatgtattagtaccaaaacgctaaacaaatattaggctattaaaacactaagaattagatgtgttgccttaaaaggtacttagttcctccagcctggtatgtctcagtggccacttgatgctgtagaagaggctcaggtgccaggtgcatgataggggtaggtgggctctaaggtgcccttcagctccattttgctacggttatatgattctttgagatactttgctaaaacataaaggcacaatatatttttgccaaggaggaagataatgttctgaccaagaaataatattcaggggaaaaaaaagaagtgccatgatttcacatatttcaagctttactaaggacaaatggttatatatatatatatatata

SEQ ID NO: 47796 - DNA, 293 bp, Homo sapiens
ttcatgtgaggaaaaaagaaccaaacaaattacaagatgacacaaagaagttaatcaatggattgataaatacactaagtacagttttaaccacacaaaacttatcaatatagggaaataataaatgaacagtaagaaaacctatttcaatatatgcaaaaataaatattttagttctcctagtaactgtggttgacagcaaaaatggtaacggagctgtggaagtggcctaagaataaaaattttagtagttataagtctttaagtaattataaagttataaagtaattaca

SEQ ID NO: 47797 - DNA, 489 bp, Homo sapiens
gaaaattacgaagcccctccctaaaaaactgttaacgaagctaaactcttgttcatccaagtggtttccagacagtcatgtctgggggcttgaaaatggggcttcttccagccctctgattcagtaaccctatgagaacccaactgggcttagcaacgtgtctgccttctctccttaactcaaatttaacaaaatttccaatgtatttgatattctttgccgtgtccttttctcattaattcagaatactagtatgttttaagaagtcagtgctcatgattttaaatgattagaacttaattctccaactgctgtttaagggagattattgtttgaagctcaacaagccagtttcattgggcacgtctccagttactagaagaaggacaccagcattctggttttttttatttccatcatgaatgtttggttgtcttcctacactatttctgtgttcctgtgagtgaccacagttatgaccaaatgcca

SEQ ID NO: 47798 - DNA, 287 bp, Homo sapiens
aggagatctcaattcaaacatgttcagccgccagcaaggttgtataaatgtgaaaatgggatgggatagagagaaagtgactctggtccttcaaatatagggcacatatggtatagagtgccgaggactgtggcaaacaggaagcctgtatccctgagtgcagcagatgcaacctcgttgctgctgcatgaggaatgcggatccagtgttaccaggaatcctcatttttcaagagaagccagaaagctggatttttatgtgaaatggcttgatttttaagaatctat

SEQ ID NO: 47799 - DNA, 806 bp, Homo sapiens
atagggagaattgcttaggacttgatgagccaagacttggaggcgaagaagtggttggagaaaccaccccaggcagaggaaccccaggggtcagccaatgcaaggctctaaattaggaagtactcagtgaggctgagaacaataaggcactaagttcttttaggttctcaggcctttgcacttatctctgcttcaaatgcctccttttcccttcctatctgggaaacattcactctttcttcagtgtagcctccaagttcacttgctcagtgaaggcccctctgattctcccagaaaggatgtgctaccccatcctccgtgctcacaagcctcggcccacagctcaggattagtttttattacagtgtggctttaggttttcatatctgacttccccaccagactatgaacaaatcaaaggcaaagattgcgtttcattgagctgtgcttccccgaacatcaggcatagtgcataagacacactcactccataaacctttgtatgtcaaatgagagatattatgtattaagcagtccaattcctcttttcactgtgcattcttcatgcaaatggcagctgtgtcttaggtgtttcccatatgtagcgacaaggtattatgtactataaggaataaatgggaaattaccaaaccccttctctaagcagaactgagggcagggatttcacatcaaacagaccatgaaataaatggagagggctaatttgtatttatttatgtatttatttatttttatttatttatttattgagagaaagtctcgctctgtcgcccaggctggagtgc

SEQ ID NO: 47800 - DNA, 370 bp, Homo sapiens
ggtctctgctgatgtccctctgcagctgtcctgccagtgaggcactgttgacccatcgtgcctgggcctaactgtcatgtagaaatagtttctggaagtcatctttaaactggtctggtgagtattctaagtgcgaccaacatccccttccttctcctgacctagttggccccttctgtgggttccagatagcctttttctgtgggttcatttgtattgctctagaacaggataaagatattgtctaactttaggctttgctaagttaaatatgaaagttaaattttctggccaggcgccttggctcatgcctgtaatcccagtactttaggaggctgaggtgggcggatcgcttgaggtcaggagtttt

SEQ ID NO: 47801 - DNA, 333 bp, Homo sapiens
ttcactcttacattcttcttctaatatacacatgaaaacatttgttttaccaaaaataagtaagaatgcttaaaaaacttgacaattaaaatctagaattgtctgtctgaatgtttcataagtggtctgttcgttagattgaaatttgtgaaaacaggcctctcactaactcatttgcaaatggtaacaatagggatctagtgagtattttgtaaatatttcttaatgagctatgtgatttatgattatgccttaactgatgttagtgttgggtgccagttatatttataaaaatcttggattttatattagcaaaatttttatatgaagtag

SEQ ID NO: 47802 - DNA, 427 bp, Homo sapiens
gccctggctcctgcacctgcctgtctgcatgttccccctcccacaggggatttgaacgtgcagcagccttgcaaatgagccacaccccgtcacaagtcctgtgaggaagtcagggaactctcctctgttagcccaagtggcgccatcaagtaaacccctgccattttgtacaccctgatcagggaggaaacttccataggggctcaggccatgaaaagcattttgccaagcagatcccaggccacactgcctgactgcaggaaatggctcccttattacatcctgccaggcagctagccacactgccccacctcccctgtccagacctataattgccccagtctgtacgcaggacgggggctcagcactcgctggtgttccccttccacaggtttctctgtccaataaacctatgttgctgtcgagc

SEQ ID NO: 47803 - DNA, 2086 bp, Homo sapiens
ggcggcggcggccaggggggagccggggcggccgttgcggggcgcgctctcgagaggcggcggcggcccagggtgtcccgtcggtctcggcgccgggaagaggcggtggcgctgcccgcggtggcgggggttggcgacggagcgcgttggtgccaggaccggggtccgaggcgcgctctccgcccacagtgagccgtcagactgctacagcattacctaccggtacctcgaagtgtccaccatcccagagggtgcctgccctgactggcacaactgcatccaacaatgacttggcgagtctttttgagtgtccagtctgctttgactatgtgttaccgcccattcttcaatgtcagagtggccatcttgtttgtagcaactgtcgcccaaagctcacatgttgtccaacttgccggggccctttgggatccattcgcaacttggctatggagaaagtggctaattcagtacttttcccctgtaaatatgcgtcttctggatgtgaaataactctgccacacacagaaaaagcagaccatgaagagctctgtgagtttaggccttattcctgtccgtgccctggtgcttcctgtaaatggcaaggctctctggatgctgtaatgccccatctgatgcatcagcataagtccattacaaccctacagggagaggatatagtttttcttgctacagacattaatcttcctggtgctgttgactgggtgatgatgcagtcctgttttggctttcacttcatgttagtcttagagaaacaggaaaaatacgatggtcaccagcagttcttcgcaatcgtacagctgataggaacacgcaagcaagctgaaaattttgcttaccgacttgagctaaatggtcataggcgacgattgacttgggaagcgactcctcgatctattcatgaaggaattgcaacagccattatgaatagcgactgtctagtctttgacaccagcattgcacagctttttgcagaaaatggcaatttaggcatcaatgtaactatttccatgtgttgaaatggcaatcaaacattttctggccagtgtttaaaacttcagtttcacagaaaataaggcacccatctgtctgccaacctaaaactctttcggtaggtggaagctagacacatgaaggtaaataaaaagaaaggctgttaaatacaggaaacagttgcatgtagtaacactaatatatttaaaaataagtcaacagtaaaccactgaaaaaatatatgtatatacacccaagatgggcatcttttgtattaagaaaggaagcattgtaaaataattctgagttttgtgtttgttgtagattgattgtattgttgaaaaagtttgtttttgcgtgggagtgtgtgcctgcgtgggtgtgtgcgtgtttgggtttttttcctttaactgacaagccatcttgagtggtcatgggccactgcttttccctttgtgagtcaatacatagtgctgctgtgtgctttttttgtgtgtatttgctaatttttattaattttagtttttcattaaataaatttgacttttctgtaattcaggtttttcctttttttgtaccattttaaagttagtatcttttgatatgcatatttgtttatggtaaaaaatttataacgtgttcaatattttcttttcccccattaatcagttcattagaaatattttaaaatcagctattttgtgaagccatgagttccagaaagtaaaggtgacatcggaaaaataatcaaaagctatttaaagcatctataaggtgctctctttctgtcttctacagatgagtcacacctttgagcttaatctttgaaaggttagagaataaattgatttttataaatactgcaaatcaggcttttgtttcctttttcagatatcttggacaaatcacatattttaaaatttgttcttgtatttattggttttgcagaagaaggcatcgtcatgcacagtatttgtaattaaaagcaaatcatttgtttaaaaaggcagtttgcaaaaaatgtttttggtcttttataattctcattaaaagaatatctggcaaattaaaaaaa

SEQ ID NO: 47804 - DNA, 1925 bp, Homo sapiens
  misc_feature (1188)..(1188): n is a, c, g, or t
agtaactcttgagctggctcagggagcgcacttccttctcagccagcgcgtcgccccctgcatccgtggcctccactggagctgggcaggaccctacccagtgaatctggagaaaacaaacttgggagacagacgaaagcttagggcacattggaggacagcgcagctgtggctcccatttttggagatgcagtcgaatttgagctcacagggaggtgtggttgcctcctggggatggaaaggcttcctttctccacctctgtaactggtgcttctgagaagtaaatggtatttggatcctgacctcagacgcgaatttgggtcttctgtgcttaggagcagaaagagcccaggaggggcctgttcctttacttcttgggggaaacgcaatgcgtggcctgacttctcatgacgggaaaggctactccaccttctctgtactcctggaggggagtcttgttcacatgtttaccagcggccaggacaaggaagagaaaaggtattgacattaagaggatggtttgctgaggctgtgaaacttgaacgctattagtcagtggaacctgcctggcttagggaatggctgcagcagaatcgagacgtttccgaggttctcagtcatgtttcatttgggctgctgttcttttttctgtttaaatcaaacttcaggttacgtcatgacttctgcagggctgtccttggttcctactgcagggcgcctgtgtggttgggattccttttctgtttcaagatggagctgggttccacccttggagctttgagaggctttagcagttgctgtcctgtaatacctccgttcccaagaaataccgttcacatttcgcttctttttcacactttgaataggagttaaaatgtgctttctgtagtgtttggaaaatggcaaagatatattgtaatgtgagcccgaactgttgttgataaatgtataactattgctaggtcaagaaattgtgaacaacagtgttttgcttggtccgtagctatattgtgttaaatataaactgagtttactgcccttggatgtgattctttggtttgatttagtaatttgaaaggcattggttgactagactgttttttgcccaaggaaccactttgtaattgttacgctgcttactgaagtaaactggaccatgcagtaggcatacagcatacagccagggngttttggcaatgctgagcccactgttttacaagtgacataaaatggatgtcatatgtacaaagaatctactgagagggaaactggattacaggagagctcccttatagtcctttgtcaggggacagaatacctgggtcacactgggcttcagattgagagttgattcatgttctgagtccatatgatgagacacattacgatggaattgtcacttttgttgcctctggaactttaaaatacccgtttagtgacgtggaattaatctttattttttccgtcaccctcagccctcatttaagctatcagttggtaaccacttgggtaatctaaacctaagttgcatttatttggtcacattggtaaccaacattgcttcttaaaagttccttgcaacagaatgactataattgagataaaacattaattttgaggctttaattttgtaatatggattagtggccgggcgcagtggctcatgcctgtaatcccagcactttgggaggccgaggcgggtggatcacgaggtcaggagttcgagaccagccatggtgaaaccccgtctctactaaaaatacaaaaattagtcgggcatggtggcgggcccctgtaatcccagctacttgggaggctgaggcaggagaattgcttgaacctgggaggcagaggttgcagtgagccgagatcgcgccattgcactccagcctgggcaacgagcaaaactccatctcaaaaaaaa

SEQ ID NO: 47805 - DNA, 443 bp, Homo sapiens
  misc_feature (2)..(2): n is a, c, g, or t
cnttgtttatggtaaaatattgaacacgtctaatcagttcattagaaatattttaaaatcagctattttgtgaagccatgagttccagaaagtaaaggtgacatcggaaaaataatcaaaagctatttaaagcatctataaggtgctctctttctgtcttctacagatgagtcacacctttgagcttaatctttgaaaggttagagaataaattgatttttataaatactgcaaatcaggcttttgtttcctttttcagatatcttggacaaatcacatattttaaaatttgttcttgtatttattggttttgcagaagaaggcatcgtcatgcacagtatttgtaattaaaagcaaatcatttgtttaaaaaggcagtttgcaaaaaatgtttttggtcttttataattctcattaaaagaatatctggcaaattaaaaaaa

SEQ ID NO: 47806 - DNA, 467 bp, Homo sapiens
  misc_feature (10)..(10): n is a, c, g, or t
  misc_feature (21)..(21): n is a, c, g, or t
  misc_feature (31)..(31): n is a, c, g, or t
cacccccccnaaaattttttncccccccccncttaacccccttctgcaccccattattttgaagaaaaagagtggcctgaccctccagatctttcttttctggaggacactgggcgaaaagtagttgccccagtgactgttcgagcagttgatggcttgctaagtaagaatgctaaacacaaaaggacaactcttgtttgatcccactcatatgaagggaaattcagaaagaaagtgaaatagtggttaccagggtctggggtgagggtggaatttggagctctttttcagtgggtacagagtttcagtttgtggtgataaaaaatgcatgtaagccgggtgtggtggctcacgcctgcaatgccagcatcttgggaggccaaggtggccggatccattttaggttgggagtttgtaaacccccctcggccaccatggtttaaacccttttctgtcccatacaaaac

SEQ ID NO: 47807 - DNA, 243 bp, Homo sapiens
tggccggacacgtagccggacacgaaaggaagcattgtaaaataattctgagttttgtgtttgttgtagattgattgtattgttgaaaaagtttgtttttgcgtgggagtgtgtgcctgcgtgggtgtgtgcgtgtccggccacgtggccggacacgtagtggccggacacgtacctagagatggctaaatctagactgaatttctgctacatctcaggtactcctattacgtgtccggccag

SEQ ID NO: 47808 - DNA, 139 bp, Homo sapiens
tcaagcttctaacgatgtacggggacatgcacagtatttgtaattaaaagcaaatcatttgtttaaaaaggcagtttgcaaaaaatgtttttggtcttttataattctcattaaaagaatatctggcaaattaaaaaaa

SEQ ID NO: 47809 - DNA, 2698 bp, Homo sapiens
gcttaccattaagaagagttaatggaaggtgatactctgattctttggcattggaactacattcaatccgcggtatcctcggattagttctaggacccccttctccataccaaaacctgaggatgctcaagtccctgatagaaaatggtgtcatatttgtatgtgcatattctcttgtataatttaagtgatctctggattacttaatacaatgtaaacaatatgtaaatagttgttatagactgtattttaaaaattttgtattctttataaatttttctgaatattttcaatccatggctggtgaagtcctcggatgcagaccgtgtggatacagagtgccgattttatacaggagttcacctgtaactccctgtacctatcaacagctgactccaaattagaaagaaatagagtaagggagcctcagggagagtcctagcaaaacggattcgattaaacttcagttccttgtatagtttctttagttgtttatggtccattttctattttagcatttattattctatgtagtctatccaaagacgattaagggagttccacatgttttccggaacattttgaaaagagagcttatccagtgtacagatcctaataaagtgcacattcagtgtaattttatttttttaatatcttttttaatcctatttttcttcctcttttgctcagtaaattttgtatgaaactttaaaaggacttatggcatgtaaacattatttataaagtaagtcatggttataattatttttctcctgcctccttatgtatttatttcagaaatgagccgtcagactgctacagcattacctaccggtacctcgaagtgtccaccatcccagagggtgcctgccctgactggcacaactgcatccaacaatgacttggcgagtctttttgagtgtccagtctgctttgactatgtgttaccgcccattcttcaatgtcagagtggccatcttgtttgtagcaactgtcgcccaaagctcacatgttgtccaacttgccggggccctttgggatccattcgcaacttggctatggagaaagtggctaattcagtacttttcccctgtaaatatgcgtcttctggatgtgaaataactctgccacacacagaaaaagcagaccatgaagagctctgtgagtttaggccttattcctgtccgtgccctggtgcttcctgtaaatggcaaggctctctggatgctgtaatgccccatctgatgcatcagcataagtccattacaaccctacagggagaggatatagtttttcttgctacagacattaatcttcctggtgctgttgactgggtgatgatgcagtcctgttttggctttcacttcatgttagtcttagagaaacaggaaaaatacgatggtcaccagcagttcttcgcaatcgtacagctgataggaacacgcaagcaagctgaaaattttgcttaccgacttgagctaaatggtcataggcgacgattgacttgggaagcgactcctcgatctattcatgaaggaattgcaacagccattatgaatagcgactgtctagtctttgacaccagcattgcacagctttttgcagaaaatggcaatttaggcatcaatgtaactatttccatgtgttgaaatggcaatcaaacattttctggccagtgtttaaaacttcagtttcacagaaaataaggcacccatctgtctgccaacctaaaactctttcggtaggtggaagctagacacatgaaggtaaataaaaagaaaggctgttaaatacaggaaacagttgcatgtagtaacactaatatatttaaaaataagtcaacagtaaaccactgaaaaaatatatgtatatacacccaagatgggcatcttttgtattaagaaaggaagcattgtaaaataattctgagttttgtgtttgttgtagattgattgtattgttgaaaaagtttgtttttgcgtgggagtgtgtgcctgcgtgggtgtgtgcgtgtttgggtttttttcctttaactgacaagccatcttgagtggtcatgggccactgcttttccctttgtgagtcaatacatagtgctgctgtgtgctttttttgtgtgtatttgctaatttttattaattttagtttttcattaaataaatttgacttttctgtaattcaggtttttcctttttttgtaccattttaaagttagtatcttttgatatgcatatttgtttatggtaaaaaatttataacgtgttcaatattttcttttcccccattaatcagttcattagaaatattttaaaatcagctattttgtgaagccatgagttccagaaagtaaaggtgacatcggaaaaataatcaaaagctatttaaagcatctataaggtgctctctttctgtcttctacagatgagtcacacctttgagcttaatctttgaaaggttagagaataaattgatttttataaatactgcaaatcaggcttttgtttcctttttcagatatcttggacaaatcacatattttaaaatttgttcttgtatttattggttttgcagaagaaggcatcgtcatgcacagtatttgtaattaaaagcaaatcatttgtttaaaaaggcagtttgcaaaaaatgtttttggtcttttataattctcattaaaagaatatctggcaaattaaaaaaa

SEQ ID NO: 47810 - DNA, 4090 bp, Homo sapiens
gcttaccattaagaagagttaatggaaggtgatactctgattctttggcattggaactacattcaatccgcggtatcctcggattagttctaggacccccttctccataccaaaacctgaggatgctcaagtccctgatagaaaatggtgtcatatttgtatgtgcatattctcttgtataatttaagtgatctctggattacttaatacaatgtaaacaatatgtaaatagttgttatagactgtattttaaaaattttgtattctttataaatttttctgaatattttcaatccatggctggtgaagtcctcggatgcagaccgtgtggatacagagtgccgattttatacaggagttcacctgtaactccctgtacctatcaacagctgactccaaattagaaagaaatagagtaagggagcctcagggagagtcctagcaaaacggattcgattaaacttcagttccttgtatagtttctttagttgtttatggtccattttctattttagcatttattattctatgtagtctatccaaagacgattaagggagttccacatgttttccggaacattttgaaaagagagcttatccagtgtacagatcctaataaagtgcacattcagtgtaattttatttttttaatatcttttttaatcctatttttcttcctcttttgctcagtaaattttgtatgaaactttaaaaggacttatggcatgtaaacattatttataaagtaagtcatggttataattatttttctcctgcctccttatgtatttatttcagaaatgagccgtcagactgctacagcattacctaccggtacctcgaagtgtccaccatcccagagggtgcctgccctgactggcacaactgcatccaacaatgacttggcgagtctttttgagtgtccagtctgctttgactatgtgttaccgcccattcttcaatgtcagagtggccatcttgtttgtagcaactgtcgcccaaagctcacatgttgtccaacttgccggggccctttgggatccattcgcaacttggctatggagaaagtggctaattcagtacttttcccctgtaaatatgcgtcttctggatgtgaaataactctgccacacacagaaaaagcagaccatgaagagctctgtgagtttaggccttattcctgtccgtgccctggtgcttcctgtaaatggcaaggctctctggatgctgtaatgccccatctgatgcatcagcataagtccattacaaccctacagggagaggatatagtttttcttgctacagacattaatcttcctggtgctgttgactgggtgatgatgcagtcctgttttggctttcacttcatgttagtcttagagaaacaggaaaaatacgatggtcaccagcagttcttcgcaatcgtacagctgataggaacacgcaagcaagctgaaaattttgcttaccgacttgagctaaatggtcataggcgacgattgacttgggaagcgactcctcgatctattcatgaaggaattgcaacagccattatgaatagcgactgtctagtctttgacaccagcattgcacagctttttgcagaaaatggcaatttaggcatcaatgtaactatttccatgtgttgaaatggcaatcaaacattttctggccagtgtttaaaacttcagtttcacagaaaataaggcacccatctgtctgccaacctaaaactctttcggtaggtggaagctagcatatttgcctgttgtctattcagacctttttgatatttccttcctctttcagcatttttgttttttaagtgcagttttcattgtggtatccaccaaatgtttgtaaaacaaacaaaaaaaatgagcattagtgttggaccataaatcatcaaattggataatgactaactgtagtctttttttttttttttttttttctgctggatacaattttcatggcaataggaactgaagtacttcaaataatgtgagcttaaacatgttacttcattgaaacaaccaaaactacttgatgtttacatctaaaatcctggttaaaataaattttagatttggaaagggaattggcaaaactaacattctttgtagcaaaatgtcccttagtaatagtcaagttgacctcatttcagtagttcataaaggaaaatccaaagccctcagcagtgaattacctggccacatagctgattttggtcactgtgaatgcagaccaatcacctagtactggaagctcacagtggtagacatcactatcacagtactttacggtcatggatttctcgtgaactatttcaggaacaatcacaaagatgacattcttcactgtatttgcatttgtaaccaccaagcaagtaaggatctctgccccagatgcatggtttgaggtaaggttcacagggaccactaaaggggcagagccaagtaaaaacatggatgtctccagtggacagtgtaggatttcttgataagcaaagcacctaaagcttttagttttaatacttgagaagttttaaaaacccatgcataaaacgtggaataccggtaaaatacacatatccctaagtctagtttaaactaaaatttctagagttaataattttcaataaaaaaatccagcttattttgatacaaggggtctttgggtaacatcttaaaaatcaatgctagaaaatgctcaacatcactagtcattagggacatagaatcaaaatacgtcacacccatttggagggctattataaaaaacccagaaaatgagtgctggcaaggatgtggagaaactggaacatttgtgcattgctggaaggaatgtcaaatggtgcagctgcggtggaaaagtttggcagttctcaaaaagttaaacagaattatcctgttgtcttagtcatttgtgttaaccgtaacagaatacctgagactgggtaatttaaaagtacgaatttatttctcatagttgtgaagactgagaagcccacgatcagcgtgctggcagactggtatcatctattgagggcccagtctcagcttctaggacggggcctgttgctgtgtcctcatatggtggaagggaatcgaagggcaaaaaggaggtaattggttcccttgagcccctttataaaggcactaaatccattaatgaggatggagctctcatgacataatcacctcctaaagcctcacctatcacgttggtggttgcttcaacatacgaatttggtggggggacattcagaccttagcatatgtgatctagtagttctgctcctggatatgtatccctaaaggacctaagaagggacttcaagagagatgtgtacacccatgttcatagcattactcataatacccaagagggggaaacaatcagcagatgagtggataaaccaaatgcggtctatggatatagtggtgtattatttggccataaaaatttctggtacttgctaccacatggctttttcccagggaaagtattagtttttgtttgacaaaacaccttgataggtcatggttctgcaaggcagagatgtgaaacaaagaaagctaactgttgcaaataataaaaagttggagttcctttgagctaaagctaaagtggcaaaggaggaagaggttcatccctacccttctgcaccccattattttgaagaaaaagagtggcctgaccctccagatctttcttttctggaggacactgggcgaaaagtagttgccccagtgactgttcgagcagttgatggcttgctaagtaagaatgctaaacacaaaaggacaactcttgtttgatcccactcatatgaagggaaattcagaaagaaagtgaaatagtggttaccagggtctggggtgagggtggaatttggagctctttttcagtgggtacagagtttcagtttgtggtgataaaaaatgcatgtaagccgggtgtggtggctcacgcctgcaatgccagcatcttgggaggccaaggtggccggatccattttaggttgggagtttgtaaacccccctcggccaccatggtttaaacccttttctgtcccatacaaaac

SEQ ID NO: 47811 - DNA, 3892 bp, Homo sapiens
gcttaccattaagaagagttaatggaaggtgatactctgattctttggcattggaactacattcaatccgcggtatcctcggattagttctaggacccccttctccataccaaaacctgaggatgctcaagtccctgatagaaaatggtgtcatatttgtatgtgcatattctcttgtataatttaagtgatctctggattacttaatacaatgtaaacaatatgtaaatagttgttatagactgtattttaaaaattttgtattctttataaatttttctgaatattttcaatccatggctggtgaagtcctcggatgcagaccgtgtggatacagagtgccgattttatacaggagttcacctgtaactccctgtacctatcaacagctgactccaaattagaaagaaatagagtaagggagcctcagggagagtcctagcaaaacggattcgattaaacttcagttccttgtatagtttctttagttgtttatggtccattttctattttagcatttattattctatgtagtctatccaaagacgattaagggagttccacatgttttccggaacattttgaaaagagagcttatccagtgtacagatcctaataaagtgcacattcagtgtaattttatttttttaatatcttttttaatcctatttttcttcctcttttgctcagtaaattttgtatgaaactttaaaaggacttatggcatgtaaacattatttataaagtaagtcatggttataattatttttctcctgcctccttatgtatttatttcagaaatgagccgtcagactgctacagcattacctaccggtacctcgaagtgtccaccatcccagagggtgcctgccctgactggcacaactgcatccaacaatgacttggcgagtctttttgagtgtccagtctgctttgactatgtgttaccgcccattcttcaatgtcagagtggccatcttgtttgtagcaactgtcgcccaaagctcacatgttgtccaacttgccggggccctttgggatccattcgcaacttggctatggagaaagtggctaattcagtacttttcccctgtaaatatgcgtcttctggatgtgaaataactctgccacacacagaaaaagcagaccatgaagagctctgtgagtttaggccttattcctgtccgtgccctggtgcttcctgtaaatggcaaggctctctggatgctgtaatgccccatctgatgcatcagcataagtccattacaaccctacagggagaggatatagtttttcttgctacagacattaatcttcctggtgctgttgactgggtgatgatgcagtcctgttttggctttcacttcatgttagtcttagagaaacaggaaaaatacgatggtcaccagcagttcttcgcaatcgtacagctgataggaacacgcaagcaagctgaaaattttgcttaccgacttgagctaaatggtcataggcgacgattgacttgggaagcgactcctcgatctattcatgaaggaattgcaacagccattatgaatagcgactgtctagtctttgacaccagcattgcacagctttttgcagaaaatggcaatttaggcatcaatgtaactatttccatgtgttgaaatggcaatcaaacattttctggccagtgtttaaaacttcagtttcacagaaaataaggcacccatctgtctgccaacctaaaactctttcggtaggtggaagctagctgctggatacaattttcatggcaataggaactgaagtacttcaaataatgtgagcttaaacatgttacttcattgaaacaaccaaaactacttgatgtttacatctaaaatcctggttaaaataaattttagatttggaaagggaattggcaaaactaacattctttgtagcaaaatgtcccttagtaatagtcaagttgacctcatttcagtagttcataaaggaaaatccaaagccctcagcagtgaattacctggccacatagctgattttggtcactgtgaatgcagaccaatcacctagtactggaagctcacagtggtagacatcactatcacagtactttacggtcatggatttctcgtgaactatttcaggaacaatcacaaagatgacattcttcactgtatttgcatttgtaaccaccaagcaagtaaggatctctgccccagatgcatggtttgaggtaaggttcacagggaccactaaaggggcagagccaagtaaaaacatggatgtctccagtggacagtgtaggatttcttgataagcaaagcacctaaagcttttagttttaatacttgagaagttttaaaaacccatgcataaaacgtggaataccggtaaaatacacatatccctaagtctagtttaaactaaaatttctagagttaataattttcaataaaaaaatccagcttattttgatacaaggggtctttgggtaacatcttaaaaatcaatgctagaaaatgctcaacatcactagtcattagggacatagaatcaaaatacgtcacacccatttggagggctattataaaaaacccagaaaatgagtgctggcaaggatgtggagaaactggaacatttgtgcattgctggaaggaatgtcaaatggtgcagctgcggtggaaaagtttggcagttctcaaaaagttaaacagaattatcctgttgtcttagtcatttgtgttaaccgtaacagaatacctgagactgggtaatttaaaagtacgaatttatttctcatagttgtgaagactgagaagcccacgatcagcgtgctggcagactggtatcatctattgagggcccagtctcagcttctaggacggggcctgttgctgtgtcctcatatggtggaagggaatcgaagggcaaaaaggaggtaattggttcccttgagcccctttataaaggcactaaatccattaatgaggatggagctctcatgacataatcacctcctaaagcctcacctatcacgttggtggttgcttcaacatacgaatttggtggggggacattcagaccttagcatatgtgatctagtagttctgctcctggatatgtatccctaaaggacctaagaagggacttcaagagagatgtgtacacccatgttcatagcattactcataatacccaagagggggaaacaatcagcagatgagtggataaaccaaatgcggtctatggatatagtggtgtattatttggccataaaaatttctggtacttgctaccacatggctttttcccagggaaagtattagtttttgtttgacaaaacaccttgataggtcatggttctgcaaggcagagatgtgaaacaaagaaagctaactgttgcaaataataaaaagttggagttcctttgagctaaagctaaagtggcaaaggaggaagaggttcatccctacccttctgcaccccattattttgaagaaaaagagtggcctgaccctccagatctttcttttctggaggacactgggcgaaaagtagttgccccagtgactgttcgagcagttgatggcttgctaagtaagaatgctaaacacaaaaggacaactcttgtttgatcccactcatatgaagggaaattcagaaagaaagtgaaatagtggttaccagggtctggggtgagggtggaatttggagctctttttcagtgggtacagagtttcagtttgtggtgataaaaaatgcatgtaagccgggtgtggtggctcacgcctgcaatgccagcatcttgggaggccaaggtggccggatccattttaggttgggagtttgtaaacccccctcggccaccatggtttaaacccttttctgtcccatacaaaac

SEQ ID NO: 47812 - DNA, 4035 bp, Homo sapiens
gcttaccattaagaagagttaatggaaggtgatactctgattctttggcattggaactacattcaatccgcggtatcctcggattagttctaggacccccttctccataccaaaacctgaggatgctcaagtccctgatagaaaatggtgtcatatttgtatgtgcatattctcttgtataatttaagtgatctctggattacttaatacaatgtaaacaatatgtaaatagttgttatagactgtattttaaaaattttgtattctttataaatttttctgaatattttcaatccatggctggtgaagtcctcggatgcagaccgtgtggatacagagtgccgattttatacaggagttcacctgtaactccctgtacctatcaacagctgactccaaattagaaagaaatagagtaagggagcctcagggagagtcctagcaaaacggattcgattaaacttcagttccttgtatagtttctttagttgtttatggtccattttctattttagcatttattattctatgtagtctatccaaagacgattaagggagttccacatgttttccggaacattttgaaaagagagcttatccagtgtacagatcctaataaagtgcacattcagtgtaattttatttttttaatatcttttttaatcctatttttcttcctcttttgctcagtaaattttgtatgaaactttaaaaggacttatggcatgtaaacattatttataaagtaagtcatggttataattatttttctcctgcctccttatgtatttatttcagaaatgagccgtcagactgctacagcattacctaccggtacctcgaagtgtccaccatcccagagggtgcctgccctgactggcacaactgcatccaacaatgacttggcgagtctttttgagtgtccagtctgctttgactatgtgttaccgcccattcttcaatgtcagagtggccatcttgtttgtagcaactgtcgcccaaagctcacatgttgtccaacttgccggggccctttgggatccattcgcaacttggctatggagaaagtggctaattcagtacttttcccctgtaaatatgcgtcttctggatgtgaaataactctgccacacacagaaaaagcagaccatgaagagctctgtgagtttaggccttattcctgtccgtgccctggtgcttcctgtaaatggcaaggctctctggatgctgtaatgccccatctgatgcatcagcataagtccattacaaccctacagggagaggatatagtttttcttgctacagacattaatcttcctggtgctgttgactgggtgatgatgcagtcctgttttggctttcacttcatgttagtcttagagaaacaggaaaaatacgatggtcaccagcagttcttcgcaatcgtacagctgataggaacacgcaagcaagctgaaaattttgcttaccgacttgagctaaatggtcataggcgacgattgacttgggaagcgactcctcgatctattcatgaaggaattgcaacagccattatgaatagcgactgtctagtctttgacaccagcattgcacagctttttgcagaaaatggcaatttaggcatcaatgtaactatttccatgtgttgaaatggcaatcaaacattttctggccagtgtttaaaacttcagtttcacagaaaataaggcacccatctgtctgccaacctaaaactctttcggtaggtggaagctagcatatttgcctgttgtctattcagacctttttgatatttccttcctctttcagcatttttgttttttaagtgcagttttcattgtggtatccaccaaatgtttgtaaaacaaacaaaaaaaatgagcattagtgttggaccataaatcatcaaattggataatgactaactgtagtctttttttttttttttttttttctgctggatacaattttcatggcaataggaactgaagtacttcaaataatgtgagcttaaacatgttacttcattgaaacaaccaaaactacttgatgtttacatctaaaatcctggttaaaataaattttagatttggaaagggaattggcaaaactaacattctttgtagcaaaatgtcccttagtaatagtcaagttgacctcatttcagtagttcataaaggaaaatccaaagccctcagcagtgaattacctggccacatagctgattttggtcactgtgaatgcagaccaatcacctagtactggaagctcacagtggtagacatcactatcacagtactttacggtcatggatttctcgtgaactatttcaggaacaatcacaaagatgacattcttcactgtatttgcatttgtaaccaccaagcaagtaaggatctctgccccagatgcatggtttgaggtaaggttcacagggaccactaaaggggcagagccaagtaaaaacatggatgtctccagtggacagtgtaggatttcttgataagcaaagcacctaaagcttttagttttaatacttgagaagttttaaaaacccatgcataaaacgtggaataccggtaaaatacacatatccctaagtctagtttaaactaaaatttctagagttaataattttcaataaaaaaatccagcttattttgatacaaggggtctttgggtaacatcttaaaaatcaatgctagaaaatgctcaacatcactagtcattagggacatagaatcaaaatacgtcacacccatttggagggctattataaaaaacccagaaaatgagtgctggcaaggatgtggagaaactggaacatttgtgcattgctggaaggaatgtcaaatggtgcagctgcggtggaaaagtttggcagttctcaaaaagttaaacagaattatcctgttgtcttagtcatttgtgttaaccgtaacagaatacctgagactgggtaatttaaaagtacgaatttatttctcatagttgtgaagactgagaagcccacgatcagcgtgctggcagactggtatcatctattgagggcccagtctcagcttctaggacggggcctgttgctgtgtcctcatatggtggaagggaatcgaagggcaaaaaggaggtaattggttcccttgagcccctttataaaggcactaaatccattaatgaggatggagctctcatgacataatcacctcctaaagcctcacctatcacgttggtggttgcttcaacatacgaatttggtggggggacattcagaccttagcatatgtgatctagtagttctgctcctggatatgtatccctaaaggacctaagaagggacttcaagagagatgtgtacacccatgttcatagcattactcataatacccaagagggggaaacaatcagcagatgagtggataaaccaaatgcggtctatggatatagtggtgtattatttggccataaaaatttctggtacttgctaccacatggctttttcccagggaaagtattagtttttgtttgacaaaacaccttgataggtcatggttctgcaaggcagagatgtgaaacaaagaaagctaactgttgcaaataataaaaagttggagttcctttgagctaaagctaaaaaaaagagtggcctgaccctccagatctttcttttctggaggacactgggcgaaaagtagttgccccagtgactgttcgagcagttgatggcttgctaagtaagaatgctaaacacaaaaggacaactcttgtttgatcccactcatatgaagggaaattcagaaagaaagtgaaatagtggttaccagggtctggggtgagggtggaatttggagctctttttcagtgggtacagagtttcagtttgtggtgataaaaaatgcatgtaagccgggtgtggtggctcacgcctgcaatgccagcatcttgggaggccaaggtggccggatccattttaggttgggagtttgtaaacccccctcggccaccatggtttaaacccttttctgtcccatacaaaac

SEQ ID NO: 47813 - DNA, 2011 bp, Homo sapiens
aatcctccaggaagaaggagagcgcttccaagtcatcgtcgcctagaccaattagctcaagtcggtaagccaaattttcagcttgctggcgtgttcctatcagctggacgattgcgaagaactgctggtgaccatcgtatttttccggtacctcgaagtgtccaccatcccagagggtgcctgccctgactggcacaactgcatccaacaatgacttggcgagtctttttgagtgtccagtctgctttgactatgtgttaccgcccattcttcaatgtcagagtggccatcttgtttgtagcaactgtcgcccaaagctcacatgttgtccaacttgccggggccctttgggatccattcgcaacttggctatggagaaagtggctaattcagtacttttcccctgtaaatatgcgtcttctggatgtgaaataactctgccacacacagaaaaagcagaccatgaagagctctgtgagtttaggccttattcctgtccgtgccctggtgcttcctgtaaatggcaaggctctctggatgctgtaatgccccatctgatgcatcagcataagtccattacaaccctacagggagaggatatagtttttcttgctacagacattaatcttcctggtgctgttgactgggtgatgatgcagtcctgttttggctttcacttcatgttagtcttagagaaacaggaaaaatacgatggtcaccagcagttcttcgcaatcgtacagctgataggaacacgcaagcaagctgaaaattttgcttaccgacttgagctaaatggtcataggcgacgattgacttgggaagcgactcctcgatctattcatgaaggaattgcaacagccattatgaatagcgactgtctagtctttgacaccagcattgcacagctttttgcagaaaatggcaatttaggcatcaatgtaactatttccatgtgttgaaatggcaatcaaacattttctggccagtgtttaaaacttcagtttcacagaaaataaggcacccatctgtctgccaacctaaaactctttcggtaggtggaagctagacacatgaaggtaaataaaaagaaaggctgttaaatacaggaaacagttgcatgtagtaacactaatatatttaaaaataagtcaacagtaaaccactgaaaaaatatatgtatatacacccaagatgggcatcttttgtattaagaaaggaagcattgtaaaataattctgagttttgtgtttgttgtagattgattgtattgttgaaaaagtttgtttttgcgtgggagtgtgtgcctgcgtgggtgtgtgcgtgtttgggtttttttcctttaactgacaagccatcttgagtggtcatgggccactgcttttccctttgtgagtcaatacatagtgctgctgtgtgctttttttgtgtgtatttgctaatttttattaattttagtttttcattaaataaatttgacttttctgtaattcaggtttttcctttttttgtaccattttaaagttagtatcttttgatatgcatatttgtttatggtaaaaaatttataacgtgttcaatattttcttttcccccattaatcagttcattagaaatattttaaaatcagctattttgtgaagccatgagttccagaaagtaaaggtgacatcggaaaaataatcaaaagctatttaaagcatctataaggtgctctctttctgtcttctacagatgagtcacacctttgagcttaatctttgaaaggttagagaataaattgatttttataaatactgcaaatcaggcttttgtttcctttttcagatatcttggacaaatcacatattttaaaatttgttcttgtatttattggttttgcagaagaaggcatcgtcatgcacagtatttgtaattaaaagcaaatcatttgtttaaaaaggcagtttgcaaaaaatgtttttggtcttttataattctcattaaaagaatatctggcaaattaaaaaaa

SEQ ID NO: 47814 - DNA, 2897 bp, Homo sapiens
gcttaccattaagaagagttaatggaaggtgatactctgattctttggcattggaactacattcaatccgcggtatcctcggattagttctaggacccccttctccataccaaaacctgaggatgctcaagtccctgatagaaaatggtgtcatatttgtatgtgcatattctcttgtataatttaagtgatctctggattacttaatacaatgtaaacaatatgtaaatagttgttatagactgtattttaaaaattttgtattctttataaatttttctgaatattttcaatccatggctggtgaagtcctcggatgcagaccgtgtggatacagagtgccgattttatacaggagttcacctgtaactccctgtacctatcaacagctgactccaaattagaaagaaatagagtaagggagcctcagggagagtcctagcaaaacggattcgattaaacttcagttccttgtatagtttctttagttgtttatggtccattttctattttagcatttattattctatgtagtctatccaaagacgattaagggagttccacatgttttccggaacattttgaaaagagagcttatccagtgtacagatcctaataaagtgcacattcagtgtaattttatttttttaatatcttttttaatcctatttttcttcctcttttgctcagtaaattttgtatgaaactttaaaaggacttatggcatgtaaacattatttataaagtaagtcatggttataattatttttctcctgcctccttatgtatttatttcagaaatgagccgtcagactgctacagcattacctaccggtacctcgaagtgtccaccatcccagagggtgcctgccctgactggcacaactgcatccaacaatgacttggcgagtctttttgagtgtccagtctgctttgactatgtgttaccgcccattcttcaatgtcagagtggccatcttgtttgtagcaactgtcgcccaaagctcacatgttgtccaacttgccggggccctttgggatccattcgcaacttggctatggagaaagtggctaattcagtacttttcccctgtaaatatgcgtcttctggatgtgaaataactctgccacacacagaaaaagcagaccatgaagagctctgtgagtttaggccttattcctgtccgtgccctggtgcttcctgtaaatggcaaggctctctggatgctgtaatgccccatctgatgcatcagcataagtccattacaaccctacagggagaggatatagtttttcttgctacagacattaatcttcctggtgctgttgactgggtgatgatgcagtcctgttttggctttcacttcatgttagtcttagagaaacaggaaaaatacgatggtcaccagcagttcttcgcaatcgtacagctgataggaacacgcaagcaagctgaaaattttgcttaccgacttgagctaaatggtcataggcgacgattgacttgggaagcgactcctcgatctattcatgaaggaattgcaacagccattatgaatagcgactgtctagtctttgacaccagcattgcacagctttttgcagaaaatggcaatttaggcatcaatgtaactatttccatgtgttgaaatggcaatcaaacattttctggccagtgtttaaaacttcagtttcacagaaaataaggcacccatctgtctgccaacctaaaactctttcggtaggtggaagctagacacatgaaggtaaataaaaagaaaggctgttaaatacaggaaacagttgcatgtagtaacactaatatatttaaaaataagtcaacagtaaaccactgaaaaaatatatgtatatacacccaagatgggcatcttttgtattaagaaaggaagcattgtaaaataattctgagttttgtgtttgttgtagattgattgtattgttgaaaaagtttgtttttgcgtgggagtgtgtgcctgcgtgggtgtgtgcgtgtttgggtttttttcctttaactgacaagccatcttgagtggtcatgggccactgcttttccctttgtgagtcaatacatagtgctgctgtgtgctttttttgtgtgtatttgctaatttttattaattttagtttttcattaaataaatttgacttttctgtaattcaggtttttcctttttttgtaccattttaaagttagtatcttttgatatgcatatttgtttatggtaaaaaatttataacgtgttcaatattttcttttcccccattaatcagttcattagaaatattttaaaatcagctattttgtgaagccatgagttccagaaagtaaaggtgacatcggaaaaataatcaaaagctatttaaagcatctataaggtgctctctttctgtcttctacagatgagtcacacctttgagcttaatctttgaaaggttagagaataaattgatttttataaatactgcaaatcaggcttttgtttcctttttcagatatcttggacaaatcacatattttaaaatttgttcttgtatttattggttttgcagaagaaggcatcgtcatgcacagtatttgtaattaaaagcaaatcatttgtttaaaaaggcagtttgcaaaaaatgtttttggtcttttataattctcattaaaagaatatctggcaaattaaaaaaatcttactgtgtctgctttagctctaagtttgataaaatccgaagttattttcctgtttcattccatactttaattatatagcagaaagctgtgtgttgtcatttttaagtgcggtagacttaactctaaatcacagcaaataactggggtatatgggcctctgggattaggtctttccccatgccctgcccctcttgcc

SEQ ID NO: 47815 - DNA, 1708 bp, Homo sapiens
gctggtttgctatccaaatcctggtctatgatattagtgctataggttgtgctcaatctcaattaacatatatatcgccctggtgagataatcgcatctgtcttggatcgtagatcctagcatcgtcggttactagacgtcaataaacgcggatctattcaaacagctgcattccagtcgagccttattcctgtccgtgccctggtgcttcctgtaaatggcaaggctctctggatgctgtaatgccccatctgatgcatcagcataagtccattacaaccctacagggagaggatatagtttttcttgctacagacattaatcttcctggtgctgttgactgggtgatgatgcagtcctgttttggctttcacttcatgttagtcttagagaaacaggaaaaatacgatggtcaccagcagttcttcgcaatcgtacagctgataggaacacgcaagcaagctgaaaattttgcttaccgacttgagctaaatggtcataggcgacgattgacttgggaagcgactcctcgatctattcatgaaggaattgcaacagccattatgaatagcgactgtctagtctttgacaccagcattgcacagctttttgcagaaaatggcaatttaggcatcaatgtaactatttccatgtgttgaaatggcaatcaaacattttctggccagtgtttaaaacttcagtttcacagaaaataaggcacccatctgtctgccaacctaaaactctttcggtaggtggaagctagacacatgaaggtaaataaaaagaaaggctgttaaatacaggaaacagttgcatgtagtaacactaatatatttaaaaataagtcaacagtaaaccactgaaaaaatatatgtatatacacccaagatgggcatcttttgtattaagaaaggaagcattgtaaaataattctgagttttgtgtttgttgtagattgattgtattgttgaaaaagtttgtttttgcgtgggagtgtgtgcctgcgtgggtgtgtgcgtgtttgggtttttttcctttaactgacaagccatcttgagtggtcatgggccactgcttttccctttgtgagtcaatacatagtgctgctgtgtgctttttttgtgtgtatttgctaatttttattaattttagtttttcattaaataaatttgacttttctgtaattcaggtttttcctttttttgtaccattttaaagttagtatcttttgatatgcatatttgtttatggtaaaaaatttataacgtgttcaatattttcttttcccccattaatcagttcattagaaatattttaaaatcagctattttgtgaagccatgagttccagaaagtaaaggtgacatcggaaaaataatcaaaagctatttaaagcatctataaggtgctctctttctgtcttctacagatgagtcacacctttgagcttaatctttgaaaggttagagaataaattgatttttataaatactgcaaatcaggcttttgtttcctttttcagatatcttggacaaatcacatattttaaaatttgttcttgtatttattggttttgcagaagaaggcatcgtcatgcacagtatttgtaattaaaagcaaatcatttgtttaaaaaggcagtttgcaaaaaatgtttttggtcttttataattctcattaaaagaatatctggcaaattaaaaaaa

SEQ ID NO: 47816 - DNA, 3268 bp, Homo sapiens
gcttaccattaagaagagttaatggaaggtgatactctgattctttggcattggaactacattcaatccgcggtatcctcggattagttctaggacccccttctccataccaaaacctgaggatgctcaagtccctgatagaaaatggtgtcatatttgtatgtgcatattctcttgtataatttaagtgatctctggattacttaatacaatgtaaacaatatgtaaatagttgttatagactgtattttaaaaattttgtattctttataaatttttctgaatattttcaatccatggctggtgaagtcctcggatgcagaccgtgtggatacagagtgccgattttatacaggagttcacctgtaactccctgtacctatcaacagctgactccaaattagaaagaaatagagtaagggagcctcagggagagtcctagcaaaacggattcgattaaacttcagttccttgtatagtttctttagttgtttatggtccattttctattttagcatttattattctatgtagtctatccaaagacgattaagggagttccacatgttttccggaacattttgaaaagagagcttatccagtgtacagatcctaataaagtgcacattcagtgtaattttatttttttaatatcttttttaatcctatttttcttcctcttttgctcagtaaattttgtatgaaactttaaaaggacttatggcatgtaaacattatttataaagtaagtcatggttataattatttttctcctgcctccttatgtatttatttcagaaatgggtgatgatgcagtcctgttttggctttcacttcatgttagtcgacttgagctaaatggtcataggcgacgattgacttgggaagcgactcctcgatctattcatgaaggaattgcaacagccattatgaatagcgactgtctagtctttgacaccagcattgcacagctttttgcagaaaatggcaatttaggcatcaatgtaactatttccatgtgttgaaatggcaatcaaacattttctggccagtgtttaaaacttcagtttcacagaaaataaggcacccatctgtctgccaacctaaaactctttcggtaggtggaagctagctgctggatacaattttcatggcaataggaactgaagtacttcaaataatgtgagcttaaacatgttacttcattgaaacaaccaaaactacttgatgtttacatctaaaatcctggttaaaataaattttagatttggaaagggaattggcaaaactaacattctttgtagcaaaatgtcccttagtaatagtcaagttgacctcatttcagtagttcataaaggaaaatccaaagccctcagcagtgaattacctggccacatagctgattttggtcactgtgaatgcagaccaatcacctagtactggaagctcacagtggtagacatcactatcacagtactttacggtcatggatttctcgtgaactatttcaggaacaatcacaaagatgacattcttcactgtatttgcatttgtaaccaccaagcaagtaaggatctctgccccagatgcatggtttgaggtaaggttcacagggaccactaaaggggcagagccaagtaaaaacatggatgtctccagtggacagtgtaggatttcttgataagcaaagcacctaaagcttttagttttaatacttgagaagttttaaaaacccatgcataaaacgtggaataccggtaaaatacacatatccctaagtctagtttaaactaaaatttctagagttaataattttcaataaaaaaatccagcttattttgatacaaggggtctttgggtaacatcttaaaaatcaatgctagaaaatgctcaacatcactagtcattagggacatagaatcaaaatacgtcacacccatttggagggctattataaaaaacccagaaaatgagtgctggcaaggatgtggagaaactggaacatttgtgcattgctggaaggaatgtcaaatggtgcagctgcggtggaaaagtttggcagttctcaaaaagttaaacagaattatcctgttgtcttagtcatttgtgttaaccgtaacagaatacctgagactgggtaatttaaaagtacgaatttatttctcatagttgtgaagactgagaagcccacgatcagcgtgctggcagactggtatcatctattgagggcccagtctcagcttctaggacggggcctgttgctgtgtcctcatatggtggaagggaatcgaagggcaaaaaggaggtaattggttcccttgagcccctttataaaggcactaaatccattaatgaggatggagctctcatgacataatcacctcctaaagcctcacctatcacgttggtggttgcttcaacatacgaatttggtggggggacattcagaccttagcatatgtgatctagtagttctgctcctggatatgtatccctaaaggacctaagaagggacttcaagagagatgtgtacacccatgttcatagcattactcataatacccaagagggggaaacaatcagcagatgagtggataaaccaaatgcggtctatggatatagtggtgtattatttggccataaaaatttctggtacttgctaccacatggctttttcccagggaaagtattagtttttgtttgacaaaacaccttgataggtcatggttctgcaaggcagagatgtgaaacaaagaaagctaactgttgcaaataataaaaagttggagttcctttgagctaaagctaaagtggcaaaggaggaagaggttcatccctacccttctgcaccccattattttgaagaaaaagagtggcctgaccctccagatctttcttttctggaggacactgggcgaaaagtagttgccccagtgactgttcgagcagttgatggcttgctaagtaagaatgctaaacacaaaaggacaactcttgtttgatcccactcatatgaagggaaattcagaaagaaagtgaaatagtggttaccagggtctggggtgagggtggaatttggagctctttttcagtgggtacagagtttcagtttgtggtgataaaaaatgcatgtaagccgggtgtggtggctcacgcctgcaatgccagcatcttgggaggccaaggtggccggatccattttaggttgggagtttgtaaacccccctcggccaccatggtttaaacccttttctgtcccatacaaaac

SEQ ID NO: 47817 - DNA, 2645 bp, Homo sapiens
tacactttattatcatagatgtaattttcttaggcctttctgaattctgaaaataataacaggtttacagatataaataatggagcaaaaggacacctggttttggggtcacattttgacaggcttgcactgtcatgtcaggatgaggatttagcctcaagagtttgtattgcctagaaatgtgctgacagtgtcattaagtacaaactacagtatttccaaagaaatgaattttcatgacaaagcttttcctaaaattgttttagaagtccttttgctgtaacttttaaaacatctcaatgaccactcaccatatttgcctgttgtctattcagacctttttgatatttccttcctctttcagcatttttgttttttaagtgcagttttcattgtggtatccaccaaatgtttgtaaaacaaacaaaaaaaatgagcattagtgttggaccataaatcatcaaattggataatgactaactgtagtctttttttttttttttttttttctgctggatacaattttcatggcaataggaactgaagtacttcaaataatgtgagcttaaacatgttacttcattgaaacaaccaaaactacttgatgtttacatctaaaatcctggttaaaataaattttagatttggaaagggaattggcaaaactaacattctttgtagcaaaatgtcccttagtaatagtcaagttgacctcatttcagtagttcataaaggaaaatccaaagccctcagcagtgaattacctggccacatagctgattttggtcactgtgaatgcagaccaatcacctagtactggaagctcacagtggtagacatcactatcacagtactttacggtcatggatttctcgtgaactatttcaggaacaatcacaaagatgacattcttcactgtatttgcatttgtaaccaccaagcaagtaaggatctctgccccagatgcatggtttgaggtaaggttcacagggaccactaaaggggcagagccaagtaaaaacatggatgtctccagtggacagtgtaggatttcttgataagcaaagcacctaaagcttttagttttaatacttgagaagttttaaaaacccatgcataaaacgtggaataccggtaaaatacacatatccctaagtctagtttaaactaaaatttctagagttaataattttcaataaaaaaatccagcttattttgatacaaggggtctttgggtaacatcttaaaaatcaatgctagaaaatgctcaacatcactagtcattagggacatagaatcaaaatacgtcacacccatttggagggctattataaaaaacccagaaaatgagtgctggcaaggatgtggagaaactggaacatttgtgcattgctggaaggaatgtcaaatggtgcagctgcggtggaaaagtttggcagttctcaaaaagttaaacagaattatcctgttgtcttagtcatttgtgttaaccgtaacagaatacctgagactgggtaatttaaaagtacgaatttatttctcatagttgtgaagactgagaagcccacgatcagcgtgctggcagactggtatcatctattgagggcccagtctcagcttctaggacggggcctgttgctgtgtcctcatatggtggaagggaatcgaagggcaaaaaggaggtaattggttcccttgagcccctttataaaggcactaaatccattaatgaggatggagctctcatgacataatcacctcctaaagcctcacctatcacgttggtggttgcttcaacatacgaatttggtggggggacattcagaccttagcatatgtgatctagtagttctgctcctggatatgtatccctaaaggacctaagaagggacttcaagagagatgtgtacacccatgttcatagcattactcataatacccaagagggggaaacaatcagcagatgagtggataaaccaaatgcggtctatggatatagtggtgtattatttggccataaaaatttctggtacttgctaccacatggctttttcccagggaaagtattagtttttgtttgacaaaacaccttgataggtcatggttctgcaaggcagagatgtgaaacaaagaaagctaactgttgcaaataataaaaagttggagttcctttgagctaaagctaaagtggcaaaggaggaagaggttcatccctacccttctgcaccccattattttgaagaaaaagagtggcctgaccctccagatctttcttttctggaggacactgggcgaaaagtagttgccccagtgactgttcgagcagttgatggcttgctaagtaagaatgctaaacacaaaaggacaactcttgtttgatcccactcatatgaagggaaattcagaaagaaagtgaaatagtggttaccagggtctggggtgagggtggaatttggagctctttttcagtgggtacagagtttcagtttgtggtgataaaaaatgcatgtaagccgggtgtggtggctcacgcctgcaatgccagcatcttgggaggccaaggtggccggatccattttaggttgggagtttgtaaacccccctcggccaccatggtttaaacccttttctgtcccatacaaaac

SEQ ID NO: 47818 - DNA, 2451 bp, Homo sapiens
gcttaccattaagaagagttaatggaaggtgatactctgattctttggcattggaactacattcaatccgcggtatcctcggattagttctaggacccccttctccataccaaaacctgaggatgctcaagtccctgatagaaaatggtgtcatatttgtatgtgcatattctcttgtataatttaagtgatctctggattacttaatacaatgtaaacaatatgtaaatagttgttatagactgtattttaaaaattttgtattctttataaatttttctgaatattttcaatccatggctggtgaagtcctcggatgcagaccgtgtggatacagagtgccgattttatacaggagttcacctgtaactccctgtacctatcaacagctgactccaaattagaaagaaatagagtaagggagcctcagggagagtcctagcaaaacggattcgattaaacttcagttccttgtatagtttctttagttgtttatggtccattttctattttagcatttattattctatgtagtctatccaaagacgattaagggagttccacatgttttccggaacattttgaaaagagagcttatccagtgtacagatcctaataaagtgcacattcagtgtaattttatttttttaatatcttttttaatcctatttttcttcctcttttgctcagtaaattttgtatgaaactttaaaaggacttatggcatgtaaacattatttataaagtaagtcatggttataattatttttctcctgcctccttatgtatttatttcagaaatgagccgtcagactgctacagcattacctaccggtacctcgaagtgtccaccatcccagagggtgcctgccctgactggcacaactgcatccaacaatgacttggcgagtctttttgagtgtccagtctgctttgactatgtgttaccgcccattcttcaatgtcagagtggccatcttgtttgtagcaactgtcgcccaaagctcacatgttgtccaacttgccggggccctttgggatccattcgcaacttggctatggagaaagtggctaattcagtacttttcccctgtaaatatgcgtcttctggatgtgaaataactctgccacacacagaaaaagcagaccatgaagagctctgtgagtttaggccttattcctgtccgtgccctggtgcttcctgtaaatggcaaggctctctggatgctgtaatgccccatctgatgcatcagcataagtccattacaaccctacagggagaggatatagtttttcttgctacagacattaatcttcctggtgctgttgactgggtgatgatgcagtcctgttttggctttcacttcatgttagtcttagagaaacaggaaaaatacgatggtcaccagcagttcttcgcaatcgtacagctgataggaacacgcaagcaagctgaaaattttgcttaccgacttgagctaaatggtcataggcgacgattgacttgggaagcgactcctcgatctattcatgaaggaattgcaacagccattatgaatagcgactgtctagtctttgacaccagcattgcacagctttttgcagaaaatggcaatttaggcatcaatgtaactatttccatgtgttgaaatggcaatcaaacattttctggccagtgtttaaaacttcagtttcacagaaaataaggcacccatctgtctgccaacctaaaactctttcggtaggtggaagctagcatatttgcctgttgtctattcagacctttttgatatttccttcctctttcagcatttttgttttttaagtgcagttttcattgtggtatccaccaaatgtttgtaaaacaaacaaaaaaaatgagcattagtgttggaccataaatcatcaaattggataatgactaactgtagtctttttttttttttttttttttctgctggatacaattttcatggcaataggaactgaagtacttcaaataatgtgagcttaaacatgttacttcattgaaacaaccaaaactacttgatgtttacatctaaaatcctggttaaaataaattttagatttggaaagggaattggcaaaactaacattctttgtagcaaaatgtcccttagtaatagtcaagttgacctcatttcagtagttcataaaggaaaatccaaagccctcagcagtgaattacctggccacatagctgattttggtcactgtgaatgcagaccaatcacctagtactggaagctcacagtggtagacatcactatcacagtactttacggtcatggatttctcgtgaactgcggtcccagccacccgggaggctgaggcacgagaattgcccgaactggggaggcagaggccgcagcgagccgagaccacgccacgcagtgcagcccgggtaacagagcaagactccatctcaaa

SEQ ID NO: 47819 - DNA, 1950 bp, Homo sapiens
gcttaccattaagaagagttaatggaaggtgatactctgattctttggcattggaactacattcaatccgcggtatcctcggattagttctaggacccccttctccataccaaaacctgaggatgctcaagtccctgatagaaaatggtgtcatatttgtatgtgcatattctcttgtataatttaagtgatctctggattacttaatacaatgtaaacaatatgtaaatagttgttatagactgtattttaaaaattttgtattctttataaatttttctgaatattttcaatccatggctggtgaagtcctcggatgcagaccgtgtggatacagagtgccgattttatacaggagttcacctgtaactccctgtacctatcaacagctgactccaaattagaaagaaatagagtaagggagcctcagggagagtcctagcaaaacggattcgattaaacttcagttccttgtatagtttctttagttgtttatggtccattttctattttagcatttattattctatgtagtctatccaaagacgattaagggagttccacatgttttccggaacattttgaaaagagagcttatccagtgtacagatcctaataaagtgcacattcagtgtaattttatttttttaatatcttttttaatcctatttttcttcctcttttgctcagtaaattttgtatgaaactttaaaaggacttatggcatgtaaacattatttataaagtaagtcatggttataattatttttctcctgcctccttatgtatttatttcagaaatgagccgtcagactgctacagcattacctaccggtacctcgaagtgtccaccatcccagagggtgcctgccctgactggcacaactgcatccaacaatgacttggcgagtctttttgagtgtccagtctgctttgactatgtgttaccgcccattcttcaatgtcagagtggccatcttgtttgtagcaactgtcgcccaaagctcacatgttgtccaacttgccggggccctttgggatccattcgcaacttggctatggagaaagtggctaattcagtacttttcccctgtaaatatgcgtcttctggatgtgaaataactctgccacacacagaaaaagcagaccatgaagagctctgtgagtttaggccttattcctgtccgtgccctggtgcttcctgtaaatggcaaggctctctggatgctgtaatgccccatctgatgcatcagcataagtccattacaaccctacagggagaggatatagtttttcttgctacagacattaatcttcctggtgctgttgactgggtgatgatgcagtcctgttttggctttcacttcatgttagtcttagagaaacaggaaaaatacgatggtcaccagcagttcttcgcaatcgtacagctgataggaacacgcaagcaagctgaaaattttgcttaccgacttgagctaaatggtcataggcgacgattgacttgggaagcgactcctcgatctattcatgaaggaattgcaacagccattatgaatagcgactgtctagtctttgacaccagcattgcacagctttttgcagaaaatggcaatttaggcatcaatgtaactatttccatgtgttgaaatggcaatcaaacattttctggccagtgtttaaaacttcagtttcacagaaaataaggcacccatctgtctgccaacctaaaactctttcggtaggtggaagctagacacatgaaggtaaataaaaagaaaggctgttaaatacaggaaacagttgcatgtagtaacactaatatatttaaaaataagtcaacagtaaaccactgaaaattttttttttcccccagaattggctctttgtttagaaggagcctgtaaataatccgagttgggttgtgtacaatggtggttgtcacacgtc

SEQ ID NO: 47820 - DNA, 1086 bp, Homo sapiens
ggtcgaccccgtcctagaagctgagactgggccctcaatagatgataccagtctgccagcacgctgacggggcctgttgctgtgtcctcatatggtggaagggaatcgaagggcaaaaaggaggtaattggttcccttgagcccctttataaaggcactaaatccattaatgaggatggagctctcatgacataatcacctcctaaagcctcacctatcacgttggtggttgcttcaacatacgaatttggtggggggacattcagaccttagcatatgtgatctagtagttctgctcctggatatgtatccctaaaggacctaagaagggacttcaagagagatgtgtacacccatgttcatagcattactcataatacccaagagggggaaacaatcagcagatgagtggataaaccaaatgcggtctatggatatagtggtgtattatttggccataaaaatttctggtacttgctaccacatggctttttcccagggaaagtattagtttttgtttgacaaaacaccttgataggtcatggttctgcaaggcagagatgtgaaacaaagaaagctaactgttgcaaataataaaaagttggagttcctttgagctaaagctaaagtggcaaaggaggaagaggttcatccctacccttctgcaccccattattttgaagaaaaagagtggcctgaccctccagatctttcttttctggaggacactgggcgaaaagtagttgccccagtgactgttcgagcagttgatggcttgctaagtaagaatgctaaacacaaaaggacaactcttgtttgatcccactcatatgaagggaaattcagaaagaaagtgaaatagtggttaccagggtctggggtgagggtggaatttggagctctttttcagtgggtacagagtttcagtttgtggtgataaaaaatgcatgtaagccgggtgtggtggctcacgcctgcaatgccagcatcttgggaggccaaggtggccggatccattttaggttgggagtttgtaaacccccctcggccaccatggtttaaacccttttctgtcccatacaaaac

SEQ ID NO: 47821 - DNA, 2396 bp, Homo sapiens
agtaactcttgagctggctcagggagcgcacttccttctcagccagcgcgtcgccccctgcatccgtggcctccactggagctgggcaggaccctacccagtgaatctggagaaaacaaacttgggagacagacgaaagcttagggcacattggaggacagcgcagctgtggctcccatttttggagatgcagtcgaatttgagctcacagggaggtgtggttgcctcctggggatggaaaggcttcctttctccacctctgtaactggtgcttctgagaagtaaatggtatttggatcctgacctcagacgcgaatttgggtcttctgtgcttaggagcagaaagagcccaggaggggcctgttcctttacttcttgggggaaacgcaatgcgtggcctgacttctcatgacgggaaaggctactccaccttctctgtactcctggaggggagtcttgttcacatgtttaccagcggccaggacaaggaagagaaaagtgagccgtcagactgctacagcattacctaccggtacctcgaagtgtccaccatcccagagggtgcctgccctgactggcacaactgcatccaacaatgacttggcgagtctttttgagtgtccagtctgctttgactatgtgttaccgcccattcttcaatgtcagagtggccatcttgtttgtagcaactgtcgcccaaagctcacatgttgtccaacttgccggggccctttgggatccattcgcaacttggctatggagaaagtggctaattcagtacttttcccctgtaaatatgcgtcttctggatgtgaaataactctgccacacacagaaaaagcagaccatgaagagctctgtgagtttaggccttattcctgtccgtgccctggtgcttcctgtaaatggcaaggctctctggatgctgtaatgccccatctgatgcatcagcataagtccattacaaccctacagggagaggatatagtttttcttgctacagacattaatcttcctggtgctgttgactgggtgatgatgcagtcctgttttggctttcacttcatgttagtcttagagaaacaggaaaaatacgatggtcaccagcagttcttcgcaatcgtacagctgataggaacacgcaagcaagctgaaaattttgcttaccgacttgagctaaatggtcataggcgacgattgacttgggaagcgactcctcgatctattcatgaaggaattgcaacagccattatgaatagcgactgtctagtctttgacaccagcattgcacagctttttgcagaaaatggcaatttaggcatcaatgtaactatttccatgtgttgaaatggcaatcaaacattttctggccagtgtttaaaacttcagtttcacagaaaataaggcacccatctgtctgccaacctaaaactctttcggtaggtggaagctagacacatgaaggtaaataaaaagaaaggctgttaaatacaggaaacagttgcatgtagtaacactaatatatttaaaaataagtcaacagtaaaccactgaaaaaatatatgtatatacacccaagatgggcatcttttgtattaagaaaggaagcattgtaaaataattctgagttttgtgtttgttgtagattgattgtattgttgaaaaagtttgtttttgcgtgggagtgtgtgcctgcgtgggtgtgtgcgtgtttgggtttttttcctttaactgacaagccatcttgagtggtcatgggccactgcttttccctttgtgagtcaatacatagtgctgctgtgtgctttttttgtgtgtatttgctaatttttattaattttagtttttcattaaataaatttgacttttctgtaattcaggtttttcctttttttgtaccattttaaagttagtatcttttgatatgcatatttgtttatggtaaaaaatttataacgtgttcaatattttcttttcccccattaatcagttcattagaaatattttaaaatcagctattttgtgaagccatgagttccagaaagtaaaggtgacatcggaaaaataatcaaaagctatttaaagcatctataaggtgctctctttctgtcttctacagatgagtcacacctttgagcttaatctttgaaaggttagagaataaattgatttttataaatactgcaaatcaggcttttgtttcctttttcagatatcttggacaaatcacatattttaaaatttgttcttgtatttattggttttgcagaagaaggcatcgtcatgcacagtatttgtaattaaaagcaaatcatttgtttaaaaaggcagtttgcaaaaaatgtttttggtcttttataattctcattaaaagaatatctggcaaattaaaaaaa

SEQ ID NO: 47822 - DNA, 1918 bp, Homo sapiens
  misc_feature (7)..(7): n is a, c, g, or t
  misc_feature (21)..(21): n is a, c, g, or t
cgacagngacgcccaggcccntgagccgtcagactgctacagcattacctaccggtacctcgaagtgtccaccatcccagagggtgcctgccctgactggcacaactgcatccaacaatgacttggcgagtctttttgagtgtccagtctgctttgactatgtgttaccgcccattcttcaatgtcagagtggccatcttgtttgtagcaactgtcgcccaaagctcacatgttgtccaacttgccggggccctttgggatccattcgcaacttggctatggagaaagtggctaattcagtacttttcccctgtaaatatgcgtcttctggatgtgaaataactctgccacacacagaaaaagcagaccatgaagagctctgtgagtttaggccttattcctgtccgtgccctggtgcttcctgtaaatggcaaggctctctggatgctgtaatgccccatctgatgcatcagcataagtccattacaaccctacagggagaggatatagtttttcttgctacagacattaatcttcctggtgctgttgactgggtgatgatgcagtcctgttttggctttcacttcatgttagtcttagagaaacaggaaaaatacgatggtcaccagcagttcttcgcaatcgtacagctgataggaacacgcaagcaagctgaaaattttgcttaccgacttgagctaaatggtcataggcgacgattgacttgggaagcgactcctcgatctattcatgaaggaattgcaacagccattatgaatagcgactgtctagtctttgacaccagcattgcacagctttttgcagaaaatggcaatttaggcatcaatgtaactatttccatgtgttgaaatggcaatcaaacattttctggccagtgtttaaaacttcagtttcacagaaaataaggcacccatctgtctgccaacctaaaactctttcggtaggtggaagctagacacatgaaggtaaataaaaagaaaggctgttaaatacaggaaacagttgcatgtagtaacactaatatatttaaaaataagtcaacagtaaaccactgaaaaaatatatgtatatacacccaagatgggcatcttttgtattaagaaaggaagcattgtaaaataattctgagttttgtgtttgttgtagattgattgtattgttgaaaaagtttgtttttgcgtgggagtgtgtgcctgcgtgggtgtgtgcgtgtttgggtttttttcctttaactgacaagccatcttgagtggtcatgggccactgcttttccctttgtgagtcaatacatagtgctgctgtgtgctttttttgtgtgtatttgctaatttttattaattttagtttttcattaaataaatttgacttttctgtaattcaggtttttcctttttttgtaccattttaaagttagtatcttttgatatgcatatttgtttatggtaaaaaatttataacgtgttcaatattttcttttcccccattaatcagttcattagaaatattttaaaatcagctattttgtgaagccatgagttccagaaagtaaaggtgacatcggaaaaataatcaaaagctatttaaagcatctataaggtgctctctttctgtcttctacagatgagtcacacctttgagcttaatctttgaaaggttagagaataaattgatttttataaatactgcaaatcaggcttttgtttcctttttcagatatcttggacaaatcacatattttaaaatttgttcttgtatttattggttttgcagaagaaggcatcgtcatgcacagtatttgtaattaaaagcaaatcatttgtttaaaaaggcagtttgcaaaaaatgtttttggtcttttataattctcattaaaagaatatctggcaaattaaaaaaa

SEQ ID NO: 47823 - DNA, 4036 bp, Homo sapiens
gcttaccattaagaagagttaatggaaggtgatactctgattctttggcattggaactacattcaatccgcggtatcctcggattagttctaggacccccttctccataccaaaacctgaggatgctcaagtccctgatagaaaatggtgtcatatttgtatgtgcatattctcttgtataatttaagtgatctctggattacttaatacaatgtaaacaatatgtaaatagttgttatagactgtattttaaaaattttgtattctttataaatttttctgaatattttcaatccatggctggtgaagtcctcggatgcagaccgtgtggatacagagtgccgattttatacaggagttcacctgtaactccctgtacctatcaacagctgactccaaattagaaagaaatagagtaagggagcctcagggagagtcctagcaaaacggattcgattaaacttcagttccttgtatagtttctttagttgtttatggtccattttctattttagcatttattattctatgtagtctatccaaagacgattaagggagttccacatgttttccggaacattttgaaaagagagcttatccagtgtacagatcctaataaagtgcacattcagtgtaattttatttttttaatatcttttttaatcctatttttcttcctcttttgctcagtaaattttgtatgaaactttaaaaggacttatggcatgtaaacattatttataaagtaagtcatggttataattatttttctcctgcctccttatgtatttatttcagaaatgagccgtcagactgctacagcattacctaccggtacctcgaagtgtccaccatcccagagggtgcctgccctgactggcacaactgcatccaacaatgacttggcgagtctttttgagtgtccagtctgctttgactatgtgttaccgcccattcttcaatgtcagagtggccatcttgtttgtagcaactgtcgcccaaagctcacatgttgtccaacttgccggggccctttgggatccattcgcaacttggctatggagaaagtggctaattcagtacttttcccctgtaaatatgcgtcttctggatgtgaaataactctgccacacacagaaaaagcagaccatgaagagctctgtgagtttaggccttattcctgtccgtgccctggtgcttcctgtaaatggcaaggctctctggatgctgtaatgccccatctgatgcatcagcataagtccattacaaccctacagggagaggatatagtttttcttgctacagacattaatcttcctggtgctgttgactgggtgatgatgcagtcctgttttggctttcacttcatgttagtcttagagaaacaggaaaaatacgatggtcaccagcagttcttcgcaatcgtacagctgataggaacacgcaagcaagctgaaaattttgcttaccgacttgagctaaatggtcataggcgacgattgacttgggaagcgactcctcgatctattcatgaaggaattgcaacagccattatgaatagcgactgtctagtctttgacaccagcattgcacagctttttgcagaaaatggcaatttaggcatcaatgtaactatttccatgtgttgaaatggcaatcaaacattttctggccagtgtttaaaacttcagtttcacagaaaataaggcacccatctgtctgccaacctaaaactctttcggtaggtggaagctagcatatttgcctgttgtctattcagacctttttgatatttccttcctctttcagcatttttgttttttaagtgcagttttcattgtggtatccaccaaatgtttgtaaaacaaacaaaaaaaatgagcattagtgttggaccataaatcatcaaattggataatgactaactgtagtctttttttttttttttttttttctgctggatacaattttcatggcaataggaactgaagtacttcaaataatgtgagcttaaacatgttacttcattgaaacaaccaaaactacttgatgtttacatctaaaatcctggttaaaataaattttagatttggaaagggaattggcaaaactaacattctttgtagcaaaatgtcccttagtaatagtcaagttgacctcatttcagtagttcataaaggaaaatccaaagccctcagcagtgaattacctggccacatagctgattttggtcactgtgaatgcagaccaatcacctagtactggaagctcacagtggtagacatcactatcacagtactttacggtcatggatttctcgtgaactatttcaggaacaatcacaaagatgacattcttcactgtatttgcatttgtaaccaccaagcaagtaaggatctctgccccagatgcatggtttgaggtaaggttcacagggaccactaaaggggcagagccaagtaaaaacatggatgtctccagtggacagtgtaggatttcttgataagcaaagcacctaaagcttttagttttaatacttgagaagttttaaaaacccatgcataaaacgtggaataccggtaaaatacacatatccctaagtctagtttaaactaaaatttctagagttaataattttcaataaaaaaatccagcttattttgatacaaggggtctttgggtaacatcttaaaaatcaatgctagaaaatgctcaacatcactagtcattagggacatagaatcaaaatacgtcacacccatttggagggctattataaaaaacccagaaaatgagtgctggcaaggatgtggagaaactggaacatttgtgcattgctggaaggaatgtcaaatggtgcagctgcggtggaaaagtttggcagttctcaaaaagttaaacagaattatcctgttgtcttagtcatttgtgttaaccgtaacagaatacctgagactgggtaatttaaaagtacgaatttatttctcatagttgtgaagactgagaagcccacgatcagcgtgctggcagactggtatcatctattgagggcccagtctcagcttctaggacggggcctgttgctgtgtcctcatatggtggaagggaatcgaagggcaaaaaggaggtaattggttcccttgagcccctttataaaggcactaaatccattaatgaggatggagctctcatgacataatcacctcctaaagcctcacctatcacgttggtggttgcttcaacatacgaatttggtggggggacattcagaccttagcatatgtgatctagtagttctgctcctggatatgtatccctaaaggacctaagaagggacttcaagagagatgtgtacacccatgttcatagcattactcataatacccaagagggggaaacaatcagcagatgagtggataaaccaaatgcggtctatggatatatcccagggaaagtattagtttttgtttgacaaaacaccttgataggtcatggttctgcaaggcagagatgtgaaacaaagaaagctaactgttgcaaataataaaaagttggagttcctttgagctaaagctaaagtggcaaaggaggaagaggttcatccctacccttctgcaccccattattttgaagaaaaagagtggcctgaccctccagatctttcttttctggaggacactgggcgaaaagtagttgccccagtgactgttcgagcagttgatggcttgctaagtaagaatgctaaacacaaaaggacaactcttgtttgatcccactcatatgaagggaaattcagaaagaaagtgaaatagtggttaccagggtctggggtgagggtggaatttggagctctttttcagtgggtacagagtttcagtttgtggtgataaaaaatgcatgtaagccgggtgtggtggctcacgcctgcaatgccagcatcttgggaggccaaggtggccggatccattttaggttgggagtttgtaaacccccctcggccaccatggtttaaacccttttctgtcccatacaaaac

SEQ ID NO: 47824 - DNA, 3067 bp, Homo sapiens
gcttaccattaagaagagttaatggaaggtgatactctgattctttggcattggaactacattcaatccgcggtatcctcggattagttctaggacccccttctccataccaaaacctgaggatgctcaagtccctgatagaaaatggtgtcatatttgtatgtgcatattctcttgtataatttaagtgatctctggattacttaatacaatgtaaacaatatgtaaatagttgttatagactgtattttaaaaattttgtattctttataaatttttctgaatattttcaatccatggctggtgaagtcctcggatgcagaccgtgtggatacagagtgccgattttatacaggagttcacctgtaactccctgtacctatcaacagctgactccaaattagaaagaaatagagtaagggagcctcagggagagtcctagcaaaacggattcgattaaacttcagttccttgtatagtttctttagttgtttatggtccattttctattttagcatttattattctatgtagtctatccaaagacgattaagggagttccacatgttttccggaacattttgaaaagagagcttatccagtgtacagatcctaataaagtgcacattcagtgtaattttatttttttaatatcttttttaatcctatttttcttcctcttttgctcagtaaattttgtatgaaactttaaaaggacttatggcatgtaaacattatttataaagtaagtcatggttataattatttttctcctgcctccttatgtatttatttcagaaatgagccgtcagactgctacagcattacctaccggtacctcgaagtgtccaccatcccagagggtgcctgccctgactggcacaactgcatccaacaatgacttggcgagtctttttgagtgtccagtctgctttgactatgtgttaccgcccattcttcaatgtcagagtggccatcttgtttgtagcaactgtcgcccaaagctcacatgttgtccaacttgccggggccctttgggatccattcgcaacttggctatggagaaagtggctaattcagtacttttcccctgtaaatatgcgtcttctggatgtgaaataactctgccacacacagaaaaagcagaccatgaagagctctgtgagtttaggccttattcctgtccgtgccctggtgcttcctgtaaatggcaaggctctctggatgctgtaatgccccatctgatgcatcagcataagtccattacaaccctacagggagaggatatagtttttcttgctacagacattaatcttcctggtgctgttgactgggtgatgatgcagtcctgttttggctttcacttcatgttagtcttagagaaacaggaaaaatacgatggtcaccagcagttcttcgcaatcgtacagctgataggaacacgcaagcaagctgaaaattttgcttaccgacttgagctaaatggtcataggcgacgattgacttgggaagcgactcctcgatctattcatgaaggaattgcaacagccattatgaatagcgactgtctagtctttgacaccagcattgcacagctttttgcagaaaatggcaatttaggcatcaatgtaactatttccatgtgttgaaatggcaatcaaacattttctggccagtgtttaaaacttcagtttcacagaaaataaggcacccatctgtctgccaacctaaaactctttcggtaggtggaagctagacacatgaaggtaaataaaaagaaaggctgttaaatacaggaaacagttgcatgtagtaacactaatatatttaaaaataagtcaacagtaaaccactgaaaaaatatatgtatatacacccaagatgggcatcttttgtattaagaaaggaagcattgtaaaataattctgagttttgtgtttgttgtagattgattgtattgttgaaaaagtttgtttttgcgtgggagtgtgtgcctgcgtgggtgtgtgcgtgtttgggtttttttcctttaactgacaagccatcttgagtggtcatgggccactgcttttccctttgtgagtcaatacatagtgctgctgtgtgctttttttgtgtgtatttgctaatttttattaattttagtttttcattaaataaatttgacttttctgtaattcaggtttttcctttttttgtaccattttaaagttagtatcttttgatatgcatatttgtttatggtaaaaaatttataacgtgttcaatattttcttttcccccattaatcagttcattagaaatattttaaaatcagctattttgtgaagccatgagttccagaaagtaaaggtgacatcggaaaaataatcaaaagctatttaaagcatctataaggtgctctctttctgtcttctacagatgagtcacacctttgagcttaatctttgaaaggttagagaataaattgatttttataaatactgcaaatcaggcttttgtttcctttttcagatatcttggacaaatcacatattttaaaatttgttcttgtatttattggttttgcagaagaaggcatcgtcatgcacagtatttgtaattaaaagcaaatcatttgtttaaaaaggcagtttgcaaaaaatgtttttggtcttttataattctcattaaaagaatatctggcaaattaaaaaaaaaaaaaaaaaaaaaaaaaaaaaccttgttgtggcgccggccttggcgccctatcagaaaaggcttttcataaaccattctcgtgtgggcgcgccggggcgcccatgtagggtagcgggacccgtggcgcacaagcgcggtgtctcccaagggaagaccccgggcgaccagagactcaagtgggctcgggttttcctctcgccccatataaaaaaaaaggccccggggggggaaaccccgagacggtgctcctggaacaaattccccagaatggggagtcccaggagggcactaacagcggcgctcctatcaccaggggggtccccaagcgaaagcccgagataacaatatagcgcggcctccgtgggct

SEQ ID NO: 47825 - DNA, 3227 bp, Homo sapiens
gcttaccattaagaagagttaatggaaggtgatactctgattctttggcattggaactacattcaatccgcggtatcctcggattagttctaggacccccttctccataccaaaacctgaggatgctcaagtccctgatagaaaatggtgtcatatttgtatgtgcatattctcttgtataatttaagtgatctctggattacttaatacaatgtaaacaatatgtaaatagttgttatagactgtattttaaaaattttgtattctttataaatttttctgaatattttcaatccatggctggtgaagtcctcggatgcagaccgtgtggatacagagtgccgattttatacaggagttcacctgtaactccctgtacctatcaacagctgactccaaattagaaagaaatagagtaagggagcctcagggagagtcctagcaaaacggattcgattaaacttcagttccttgtatagtttctttagttgtttatggtccattttctattttagcatttattattctatgtagtctatccaaagacgattaagggagttccacatgttttccggaacattttgaaaagagagcttatccagtgtacagatcctaataaagtgcacattcagtgtaattttatttttttaatatcttttttaatcctatttttcttcctcttttgctcagtaaattttgtatgaaactttaaaaggacttatggcatgtaaacattatttataaagtaagtcatggttataattatttttctcctgcctccttatgtatttatttcagaaatgagccgtcagactgctacagcattacctaccggtacctcgaagtgtccaccatcccagagggtgcctgccctgactggcacaactgcatccaacaatgacttggcgagtctttttgagtgtccagtctgctttgactatgtgttaccgcccattcttcaatgtcagagtggccatcttgtttgtagcaactgtcgcccaaagctcacatgttgtccaacttgccggggccctttgggatccattcgcaacttggctatggagaaagtggctaattcagtacttttcccctgtaaatatgcgtcttctggatgtgaaataactctgccacacacagaaaaagcagaccatgaagagctctgtgagtttaggccttattcctgtccgtgccctggtgcttcctgtaaatggcaaggctctctggatgctgtaatgccccatctgatgcatcagcataagtccattacaaccctacagggagaggatatagtttttcttgctacagacattaatcttcctggtgctgttgactgggtgatgatgcagtcctgttttggctttcacttcatgttagtcttagagaaacaggaaaaatacgatggtcaccagcagttcttcgcaatcgtacagctgataggaacacgcaagcaagctgaaaattttgcttaccgacttgagctaaatggtcataggcgacgattgacttgggaagcgactcctcgatctattcatgaaggaattgcaacagccattatgaatagcgactgtctagtctttgacaccagcattgcacagctttttgcagaaaatggcaatttaggcatcaatgtaactatttccatgtgttgaaatggcaatcaaacattttctggccagtgtttaaaacttcagtttcacagaaaataaggcacccatctgtctgccaacctaaaactctttcggtaggtggaagctagcatatttgcctgttgtctattcagacctttttgatatttccttcctctttcagcatttttgttttttaagtgcagttttcattgtggtatccaccaaatgtttgtaaaacaaacaaaaaaaatgagcattagtgttggaccataaatcatcaaattggataatgactaactgtagtctttttttttttttttttttttctgctggatacaattttcatggcaataggaactgaagtacttcaaataatgtgagcttaaacatgttacttcattgaaacaaccaaaactacttgatgtttacatctaaaatcctggttaaaataaattttagatttggaaagggaattggcaaaactaacattctttgtagcaaaatgtcccttagtaatagtcaagttgacctcatttcagtagttcataaaggaaaatccaaagccctcagcagtgaattacctggccacatagctgattttggtcactgtgaatgcagaccaatcacctagtactggaagctcacagtggtagacatcactatcacagtactttacggtcatggatttctcgtgaactatttcaggaacaatcacaaagatgacattcttcactgtatttgcatttgtaaccaccaagcaagtaaggatctctgccccagatgcatggtttgaggtaaggttcacagggaccactaaaggggcagagccaagtaaaaacatggatgtctccagtggacagtgtaggatttcttgataagcaaagcacctaaagcttttagttttaatacttgagaagttttaaaaacccatgcataaaacgtggaataccggtaaaatacacatatccctaagtctagtttaaactaaaatttctagagttaataattttcaataaaaaaatccagcttattttgatacaaggggtctttgggtaacatcttaaaaatcaatgctagaaaatgctcaacatcactagtcattagggacatagaatcaaaatacgtcacacccatttggagggctattataaaaaacccagaaaatgagtgctggcaaggatgtggagaaactggaacatttgtgcattgctggaaggaatgtcaaatggtgcagctgcggtggaaaagtttggcagttctcaaaaagttaaacagaattatcctgttgtcttagtcatttgtgttaaccgtaacagaatacctgagactgggtaatttaaaagtacgaatttatttctcatagttgtgaagactgagaagcccacgatcagcgtgctggcagactggtatcatctattgagggcccagtctcagcttctaggacggggcctgttgctgtgtcctcatatggtggaagggaatcgaagggcaaaaaggaggtaattggttcccttgagcccctttataaaggcactaaatccattaatgaggatggagctctttatcgggttctttctccatgggaacgaatgttcaggg

SEQ ID NO: 47826 - DNA, 2518 bp, Homo sapiens
  misc_feature (2100)..(2101): n is a, c, g, or t
gcttaccattaagaagagttaatggaaggtgatactctgattctttggcattggaactacattcaatccgcggtatcctcggattagttctaggacccccttctccataccaaaacctgaggatgctcaagtccctgatagaaaatggtgtcatatttgtatgtgcatattctcttgtataatttaagtgatctctggattacttaatacaatgtaaacaatatgtaaatagttgttatagactgtattttaaaaattttgtattctttataaatttttctgaatattttcaatccatggctggtgaagtcctcggatgcagaccgtgtggatacagagtgccgattttatacaggagttcacctgtaactccctgtacctatcaacagctgactccaaattagaaagaaatagagtaagggagcctcagggagagtcctagcaaaacggattcgattaaacttcagttccttgtatagtttctttagttgtttatggtccattttctattttagcatttattattctatgtagtctatccaaagacgattaagggagttccacatgttttccggaacattttgaaaagagagcttatccagtgtacagatcctaataaagtgcacattcagtgtaattttatttttttaatatcttttttaatcctatttttcttcctcttttgctcagtaaattttgtatgaaactttaaaaggacttatggcatgtaaacattatttataaagtaagtcatggttataattatttttctcctgcctccttatgtatttatttcagaaatgagccgtcagactgctacagcattacctaccggtacctcgaagtgtccaccatcccagagggtgcctgccctgactggcacaactgcatccaacaatgacttggcgagtctttttgagtgtccagtctgctttgactatgtgttaccgcccattcttcaatgtcagagtggccatcttgtttgtagcaactgtcgcccaaagctcacatgttgtccaacttgccggggccctttgggatccattcgcaacttggctatggagaaagtggctaattcagtacttttcccctgtaaatatgcgtcttctggatgtgaaataactctgccacacacagaaaaagcagaccatgaagagctctgtgagtttaggccttattcctgtccgtgccctggtgcttcctgtaaatggcaaggctctctggatgctgtaatgccccatctgatgcatcagcataagtccattacaaccctacagggagaggatatagtttttcttgctacagacattaatcttcctggtgctgttgactgggtgatgatgcagtcctgttttggctttcacttcatgttagtcttagagaaacaggaaaaatacgatggtcaccagcagttcttcgcaatcgtacagctgataggaacacgcaagcaagctgaaaattttgcttaccgacttgagctaaatggtcataggcgacgattgacttgggaagcgactcctcgatctattcatgaaggaattgcaacagccattatgaatagcgactgtctagtctttgacaccagcattgcacagctttttgcagaaaatggcaatttaggcatcaatgtaactatttccatgtgttgaaatggcaatcaaacattttctggccagtgtttaaaacttcagtttcacagaaaataaggcacccatctgtctgccaacctaaaactctttcggtaggtggaagctagcatatttgcctgttgtctattcagacctttttgatatttccttcctctttcagcatttttgttttttaagtgcagttttcattgtggtatccaccaaatgtttgtaaaacaaacaaaaaaaatgagcattagtgttggaccataaatcatcaaattggataatgactaactgtagtctttttttttttttttttttttctgctggatacaattttcatggcaataggaactgaagtacttcaaataatgtgagcttaaacatgttacttcattgaaacaaccaaaactacttgatgtttacatctaaaatcctggttaaaataaattccaaaatgcttacccannaacgatgaaaaggtcaaacactttccctttggaacttgctgtaataaaagcatttttaacaaacctacaaattttttttgtattttaaaagggcgaatactaatttttatgagcgaactcatattcttattcatatacttttaatgacacgattaccaatacatgcattattttctttaactttatttttacaaaaagcccacaatgtgtatgcagccattaaaaattttacaggaaattacacaggtttgtaggccaatttaaactccaacttctttaaatagccacttttttgactggttttatgaaggcttggtgtgctcaaaatcatgattagcccgaattgcgaacataccctgtttaaaacaaacattttttaaaatttgttccattaaaagcatcccgaaagtttacaaa

SEQ ID NO: 47827 - DNA, 442 bp, Homo sapiens
agggggctatggttgcggatcctgctgacaatgaggacaattatataacatatactgacagcaaagaatattatgaactactttatgctaataattagaggtagtaaggagccaggagcacaccatctctcctctcccttctttgaggcaccttgggtttggggtgtggaggaatacatagtcttcaccagagagggttgtaggaaaatgcagtattttcgagaaagaactacatttcaattaaagcctggaagtggagagtattcttagtaactcagaggtggagaacattctgattaaaagataaagagtttgtaaagagagagtttgtaaactggaatgagacttccacagggcacagttggaaagggtcaggagatatgtcactatggccatcagtgaggacttaatgagggtaagagactaggaggccacaggagga

SEQ ID NO: 47828 - DNA, 293 bp, Homo sapiens
tctcgatctcctgaccttgtgatccgtccgcgtcagtctcccaaagtgctgggattacaggcgtgagccaccacgcctggccacgagtggattttaaaaacatcgtgattactgaaaataagatcagagtgaaatatataacaagatgctatttatggaaatttaaaatgtttgggccgggcgtggtgactcacacctgtaatcccagcactttgggaggctgaggtgggcagatcacttgaggtcgggtgttgaagaccagcctggccaacatggtgaaaccgtctctactt

SEQ ID NO: 47829 - DNA, 577 bp, Homo sapiens
ggttggaaagcagaattatgcataaatttcctcttacagttcgatgcccattagttttatataacatttatttgacacgtactgacttctatctgagaagaacaaaccaaaacactcaggcctaaataattaaaaacggtcctaaaaactagcaaaccagataagaaaagatgttaatgcccattccctaacttatgtcttagaccaaaattaattctagatggttttaaaatgacagtgtaaaagtaaagtattaaaagattgtgtggtcaaatattcaatttaagagcaaggaaattcttataaatataacaatagaggcagaactcatgtaagaataaattgattaggtggtattaaatattaagttcttatgtatgtcaaaagatatcattttgaaattcatccatcttattgggtattgcaggagttcattcctttttgtttataaatactcttccgtcatatgaatagtattcatttgtatactggtttgttgatggacatttgggttgttcccagtttatggctattacaaataaagcttctatgaacatttatgtacaaatctttgtat

SEQ ID NO: 47830 - DNA, 618 bp, Homo sapiens
ggtgaggctggaaagaatgaatggggctgggctgtgaaggcttagggagttctcagccttgtgggctgagcctatgatgtggaaagcttacaggagggcagtgtgagcccctgactgcatggggcaagctgtccggtaaaagtataatgccagctactcatggaatttaaaacttttctagtagccacattaaaacagaaaagaaaacaggtgaaatcgattttaataatagattttatttaacccagtatattcaaaacattatttcaacatataatcagcataaataacttttaatgagctatttggcattctttcttttggtactaagccttcaaaatcttgtgtgtattttataccacagcacagctgattttggaccacagccatattgcagatgttcaacacatggccggtggctgctgcattggctgcacagggttagcaggtctggggtgatgagagttgaaagtgatcttccttgtcttagaccttcccctgagagcctgaaccaggcttctcgcatcaaacctttgaacaaacctgcccaacagctaattggtacctcagggaaaagagaaaacctgggggattttgtcatgcatgggttatatggtg

SEQ ID NO: 47831 - DNA, 119 bp, Homo sapiens
atgaggcaactgaggcacagggacccgcctgaggccatccaggggacgtgtcttactcgagtgggtctctgcactgccaggcctcccctgctggcggctgcaccgagccagctctgcag

SEQ ID NO: 47832 - DNA, 693 bp, Homo sapiens
gaaatctggatgcatctttcaattattgacaccttacagtccaaaaagattgaaattttgactcgtgaaaaattttccatgtcaacttctgttaagatcatgaaatttcagcacgaaagcattttagattttatgaaatatggtaaaaagaaatccacatttttatttatttatttatttatttatttattgaaacacagtttcattctgttgtccaggctggagtgcagtggcacagtctcagctcagtgcagcttgcacctcccgggttcaaggcattctagggcctcagctttctgagtacctggaattacaggcacgagccactaggcctggttaactttagtatttttagtagagatggggtttcgccacgttggccaggctggtctcgaactcctgacctcaggtgatgtgcctgcctcagcctcccaaagtgctggtattataggggtgagccactgggcctgaccagaaatccacatttaaaaacatcttagtaaaactacaaaatcagcaaaaataaaaaatctaaatcaatgagatacaagaaaggctgctttcaaaagagtgaaagtataggtataataatattctagagcacagctcaacagcaacagtgaaagtgatagtaagatgatacctcagtcttttgaaagaaaataaaccttacctagaatactatgttcatgg

SEQ ID NO: 47833 - DNA, 473 bp, Homo sapiens
ggagagtgtcgcatggtctagctgctgagtgaccgctgatcaacagctggcttcaccttgcatcctgactcctgggagatcttcctctcccatctctcttcccttctttctctgtaggcgcagctgtcaggatcaactgaacccctggggatggctgtctttagagaggagctatgtggccttgagaaaagctgggtagatggacggcctgtccttggaaatgggctctctgcaaggacaaagcctaggagactgttcctcagggtgcagagcacaggcttgcctgtttatttaggtgtgaacttggagtcaggacaggagtttaatgaacaggagaaggaattttgttgagtttgtggccttatgctgattctttttgggatgttgagtagcatgaatagagaaatctttgatgagaagaaaaaaaaacagttttagtgaagtaaataaatgcgggttcattttcatttgta

SEQ ID NO: 47834 - DNA, 1136 bp, Homo sapiens
caattcggccagaaaaagaaataaaaatcttctaaattaggaacatgcaaaatgatttctatttgcaggtgacatgattctgtatacagaaaatatcatataactcacagaaaaaaatactgcagctaattaacaaattcagcaaagttatagggaacaagatcaacacccaaaaatcagttgtttccatataccagcaaagaaatttttaaaaaagaaaaaaaaaatagttcagtttgcaacatttagaagagtaaaacacctaggaatatatttaaccaaaaaattgaaagatttatccactgaaaactaaaaaacattgctgagagaaattaaagaaaatctaataaatggaaagacatcccatattcatggattggaaaactttaagatagcaatattccccaaaacaatctacagattcaagtggtctgtttgcagaaataaaaagccaaccttcaaattgatacggaactgtaaggggcctcaaaaagccaaaacaatattgaaaaacaaaagcaaagctgagaggacttacactttccaaattcaaaagttactacaaagctacagtaatcaacaagcatagtgctggcaaaaagacagacatataaaccaatggaatagaattgagagcccataaataaatccaaatatctatggcaaattaatttttgacaggagtaccacgaccattcaatggagaaagaagagtaccttcaacaaatcatactagaacatttgtataatgacatgtaaaaaaaaatgaagtgggactccatataaaataattaactcatatataataattaactcatggatcaaggacctcaatgtaaggggtaagattgcaaaattcttagaagcaaacatagaagtagatctgcatttcctcagatttgacaatggattgttagatttgacaccaaaagcactagtaacaaaatttaaaaatagattagattctgcaaaaatgtaaagcttttttgcattaaaaaacattttcagccaggtgcagtggctcatgcctgtaatcccagaactttgggaggccacagcataaggcttgcttgagcccaggaatttgagaccagcatgggcaatatagtgagaccttgtctctagaaaaaaaaaaa

SEQ ID NO: 47835 - DNA, 182 bp, Homo sapiens
cttttaagatgagaagtttgatactgctgcatcaactcatggtctgccttgaaagtattgctttacacagatatgtatacccacagagttttacagagcaaacttaaactggttcctagcaaaggaaatggtgtttttgttgttgtttctaggctgctatttatgattaaacatttgggaaa

SEQ ID NO: 47836 - DNA, 559 bp, Homo sapiens
ttcaataaaatagtcaaaagttgttgttttctaatctaccaagttcttcctaaagttcaaatgaaaattcagtttaagaatagccagaaaactttctgagaaaataggcaataaggcaggcagagggacaaatacacctgccagtcaatacaggatgaacagtgttagcccactgacttgatctaatattatctgaaagcaaaagtattttccttaacttgtatagtcatataaggtaaaaaatcaatttcctttggctttaaaatatttagtcattaaaaataacctgtgtatttccatgactactttatttaatccaaatacactttcattgacctagaataccaggttaaataagttgtgaagggttcaatttagtgatgaatttttgcctaactgccttatcagttggcctacactattaaaaaaatcactattttcaagaatctgttaaagctgtaatttttttagtggctagctgtattagagacattgactctgtttacttcctttcgattctagacataggatgcccctggaataattgctatgagagatt

SEQ ID NO: 47837 - DNA, 847 bp, Homo sapiens
catcctctttctaaatgggctggggaaggcagtccttaggagagacagttacatgcaagggagtggcgaaggggggtgtcccacagccttcttgaaagagggcacagcagtttgtttaaaatagctgtttttcagggaagaaggaagagttaagaggaagaaagtagagcatgttttgggactgagcttgcatgagaagacgggtgccctaaggtgctttcctgtggggtagtagctgggagtgacttggggagaggtgtggtgcactcaattggtttggaggtttcctgcagacaggctgagattccacatggagtcagggacatagagaagagcagcagccagctcaactgcaggctgaatctttgttcaggggtctggtgggatgtcggcaagctctgaggaagggatgagcctgcagactggctacggtagggaaaggaagcacttcaggaagaatgtgttgaggagggggtggtgagggagaagactcactttctcagagaatacttctctcttgatggaaatcacatgtgtatgtggtggagtggtggcctcaatcttcatctagtcaaattagagcttgggcttaatcttggaaagaaggaagatcaaatatttctcctttcagctattcaagacataattaagagaagtaatttatgtctgataacccttttacttttgcaaaaagcacctaccgtgttgtttgtgtgagatactagtattgttcatgtgagaaaaatataatgtgaaacaaatacctggagctgtacttccctgctggagtcccacatgtctttataagacacaggtcatggtaataaaagcactttgatttaattca

SEQ ID NO: 47838 - DNA, 301 bp, Homo sapiens
catcctctttctaaatgggctggggaaggcagtccttaggagagacagttacatgcaagggagtggcgaaggggggtgtcccacagccttcttgaaagagggcacagcagtttgtttaaaatagctgtttttcagggaagaaggaagagttaagaggaagaaagtagagcatgttttgggactgagcttgcatgagaagacgggtgccctaaggtgctttcctgtggggtagtagctgggagtgacttgggacaagaggaggggtggtcgtggggtacctgagcttcgaatttcgttaatt

SEQ ID NO: 47839 - DNA, 289 bp, Homo sapiens
ttttttctgcataaatagtattcttcctgattccagtgtacaaaaaacatcatgtgtcagtgatagtcagacatggtaagggaagatttctcagaatttattaccaaagtcttctcttgccagctcaggcagttttcttacaccctcagcgttaggtgcctcaataaagaagggttaggatgactttggagtagaaataagtatatgtatagagtgaggaatctgagataaggcataataagagggacctgaaagcccaggattggaaagaggacctagattataataa

SEQ ID NO: 47840 - DNA, 443 bp, Homo sapiens
cctctgtatatgtctgtgtcctagtactaacttcttcttcttactaggagagcagtcatattggactagggcttacactaagaacttcctttgactttgattactttcttaaagtcagaatctccacatacactcacattgttaggtactagggtctaacttcaacatatgaattttgtggggacatagttccacccataacaccaactaatttgaagactgttgcagtactcttcatttcatacccaagaactattaaaaaaagcacctcccactttcatgctaacagcacccaattcttctatgtaccaattattcctgggctttctggttccttccaagacctaggatatgaataatctaggccaactattatcatatcacttccctttccactctagtcatggacaagtgatatagccctggcctatgagatatacagg

SEQ ID NO: 47841 - DNA, 1132 bp, Homo sapiens
gctaattgtgtgatactgctaaaaagcatagagtttcaagctaattcagtccttccattttacaggagaggaaattgagactcaaattgacctgcccaaggtcatttaactggttaatatcaaaacagagacccaggacttctgactcctagtcctttggtcttctccagtaagttgcttaatttttgcttgaaaatcctacatttccttcttgtggattaaaaacaagaacaacaacaacaaaaatcctacagttctttttgcgcaacctataattttgatcattttgtaactttttgtttgtgatacattagataaatatttaatccagtgttattgagtacctattatgtgcaaggtatttttatgtgcattatctcatgataacctagagagaggtattatttctatttagcgcataaggaaacagaaatgcagatggatttgaccatctagaaagtggaattagctggtatttgaactttggttttctgacctcaaattttgggccctttctgctatgcctgcctcttgccttgctattctcagaaagagtttaagtacagaaagactcagtttttcctatggtgaaagcaagggtcatgttgggcatatggaatcaaacatatatgagtcatgtcttacaaattacatgtgttcctgtgactagattttctgctttgggctcaaaatagctacttgagggatgcttcttattcctgcctgctctaggaaattttaaagggtagcagtgatacagttagaccaatagagggtactgtatcgctatatcgctaactgtgctagacccaaatttagctcttttgggccttttctctttgctgctttgtggatctggaggtcaagaggtgatatcattttaggttttaaggcagtttactctaaggagaaattggcctttgtctttggcagcccccctctccgcccatgttgtcttgattagggtctgatttgtcatcttgcaggctgttttgcttttaaagtttaaagcgtttagatctgtcgtcaaaattgccctaaacctgaatgaggaaaaattcagaattttaaaaatgctcaatagtcagggtagtttcatttttcaaggttaacattttgctttcacatgttc

SEQ ID NO: 47842 - DNA, 2785 bp, Homo sapiens
gacgctccttacccagatactcagctaaagaagcagcaagcaggaagaggaggctttctaaggcggtcgctccgggaaatccgggccctaggattgtccactcatcccagtatcagcgagatacggggagatagagttagcgacaacgtgagccagagctggagcacgtttggtgagagaccagaaagcaatggaggccggagaggggaaggagcgcgttccgaaacaaaggcaagtcctgatattctttgttttgctgggcatagctcaggctagttgccagcctaggcactattcagtggccgaggaaacggagagtggctcctttgtggccaatttgttaaaagacctggggctggagataggagaacttgctgtgaggggggccagggtcgtttccaaaggaaaaaaaatgcatttgcagttcgataggcagaccggggatttgttgttaaatgagaaattggaccgggaggagctgtgcggccccacagagccctgtgtcctacctttccaggtgttactagaaaatcccttgcagttttttcaggcggagctacggattagggacgtaaatgatcattccccagttttcctagacaaagaaatacttttgaaaattccagaaagtatcactcctggaactactttcttaatagaacgtgcccaggacttggatgtaggaaccaacagtctccaaaattacacaatcagtcccaatttccactttcatcttaatttacaagacagtctcgatggcataatattaccacagctggtgctgaacagagccctggatcgcgaggagcagcctgagatcaggttaaccctcacagcgctagatggcgggagtccacccaggtccggcacggccctggtacggattgaagttgtggacatcaatgacaacgtcccagagtttgcaaagctgctctatgaggtgcagatcccggaggacagccccgttggatcccaggttgccatcgtctctgccagggatttagacattggaactaatggagaaatatcttatgcattttcccaagcatctgaagacattcgcaaaacgtttcgattaagtgcaaaatcgggagaactgcttttaagacagaaactggatttcgaatccatccagacatacacagtaaatattcaggcgacagatggtgggggcctatctggaacttgtgtggtatttgtccaagtgatggatttgaatgacaatcctccggaactaactatgtcgacacttatcaatcagatcccagaaaacttgcaggacaccctcattgctgtattcagcgtttcagatcctgactccggagacaacggaaggatggtgtgctccatccaagatgatcttccttttttcttgaaaccttctgttgagaacttttacactctggtgataagcacggccctggaccgggagaccagatccgaatacaacatcaccatcaccgtcaccgacttcgggacacccaggctgaaaaccgagcacaacataaccgtgctggtctccgacgtcaatgacaacgcccccgccttcacccaaacctcctacaccctgttcgtccgcgagaacaacagccccgccctgcacatcggcagcgtcagcgccacagacagagactcgggcaccaacgcccaggtcacctactcgctgctgccgccccaggacccgcacctgcccctcgcctccctggtctccatcaacgcggacaacggccacctgttcgctctccagtcgctggactacgaggccctgcaggcgttcgagttccgcgtgggcgccgcagaccgcggctccccggcgttgagcagcgaggcgctggtgcgcgtgctggtgctggacgccaacgacaactcgcccttcgtgctgtacccgctgcagaacggctccgcgccctgcaccgagctggtgccccgggcggccgagccgggctacctggtgaccaaggtggtggcggtggacggcgactcgggccagaacgcctggctgtcgtaccagctgctcaaggccacggagcccgggctgttcggcgtgtgggcgcacaatggcgaggtgcgcaccgccaggctgctgagggagcgcgacgctgccaagcagaggctggtggtgctggtcaaggacaatggcgagcctccgcgctcggccaccgccacgctgcacgtgctcctggtggacggcttctcccagccctacctgctgctcccggaggcggcaccggcccaggcccaggccgacttgctcaccgtctacctggtggtggcgttggcctcggtgtcttcgctcttcctcttctcggtgctcctgttcgtggcggtgcggctgtgcaggaggagcagggcggcctcggtgggtcgctgctcggtgcccgagggcccctttccagggcagatggtggacgtgagcggcaccgggaccctgtcccagagctaccagtacgaggtgtgtctgactggaggctccgggacaaatgagttcaagttcctgaagccaattatccccaacttcgttgctcagggtgcagagagggttagcgaggcaaatcccagtttcaggaagagctttgaattcacttaagtgttaataaggatctactgaggctagtctcgtttaatttgtggaaagtccttttttactgctttgcccattggaggtgtctccttttattagaaagtaaccatcttattccaattctatgcatgttactggtatttataaatgtatgagtttttttgcggtataataaatgtaaattttctttgtattctaaaaaaa

SEQ ID NO: 47843 - DNA, 1835 bp, Homo sapiens
gacgctccttacccagatactcagctaaagaagcagcaagcaggaagaggaggctttctaaggcggtcgctccgggaaatccgggccctaggattgtccactcatcccagtatcagcgagatacggggagatagagttagcgacaacgtgagccagagctggagcacgtttggtgagagaccagaaagcaatggaggccggagaggggaaggagcgcgttccgaaacaaaggcaagtcctgatattctttgttttgctgggcatagctcaggctagttgccagcctaggcactattcagtggccgaggaaacggagagtggctcctttgtggccaatttgttaaaagacctggggctggagataggagaacttgctgtgaggggggccagggtcgtttccaaaggaaaaaaaatgcatttgcagttcgataggcagaccggggatttgttgttaaatgagaaattggaccgggaggagctgtgcggccccacagagccctgtgtcctacctttccaggtgttactagaaaatcccttgcagttttttcaggcggagctacggattagggacgtaaatgatcattccccagttttcctagacaaagaaatacttttgaaaattccagaaagtatcactcctggaactactttcttaatagaacgtgcccaggacttggatgtaggaaccaacagtctccaaaattacacaatcagtcccaatttccactttcatcttaatttacaagacagtctcgatggcataatattaccacagctggtgctgaacagagccctggatcgcgaggagcagcctgagatcaggttaaccctcacagcgctagatggcgggagtccacccaggtccggcacggccctggtacggattgaagttgtggacatcaatgacaacgtcccagagtttgcaaagctgctctatgaggtgcagatcccggaggacagccccgttggatcccaggttgccatcgtctctgccagggatttagacattggaactaatggagaaatatcttatgcattttcccaagcatctgaagacattcgcaaaacgtttcgattaagtgcaaaatcgggagaactgcttttaagacagaaactggatttcgaatccatccagacatacacagtaaatattcaggcgacagatggtgggggcctatctggaacttgtgtggtatttgtccaagtgatggatttgaatgacaatcctccggaactaactatgtcgacacttatcaatcagatcccagaaaacttgcaggacaccctcattgctgtattcagcgtttcagatcctgactccggagacaacggaaggatggtgtgctccatccaagatgatcttccttttttcttgaaaccttctgttgagaacttttacactctggtgataagcacggccctggaccgggagaccagatccgaatacaacatcaccatcaccgtcaccgaccgggaccctgtcccagagctaccagtacgaggtgtgtctgactggaggctccgggacaaatgagttcaagttcctgaagccaattatccccaacttcgttgctcagggtgcagagagggttagcgaggcaaatcccagtttcaggaagagctttgaattcacttaagtgttaataaggatctactgaggctagtctcgtttaatttgtggaaagtccttttttactgctttgcccattggaggtgtctccttttattagaaagtaaccatcttattccaattctatgcatgttactggtatttataaatgtatgagtttttttgcggtataataaatgtaaattttctttgtattctaaaaaaa

SEQ ID NO: 47844 - DNA, 1977 bp, Homo sapiens
gacgctccttacccagatactcagctaaagaagcagcaagcaggaagaggaggctttctaaggcggtcgctccgggaaatccgggccctaggattgtccactcatcccagtatcagcgagatacggggagatagagttagcgacaacgtgagccagagctggagcacgtttggtgagagaccagaaagcaatggaggccggagaggggaaggagcgcgttccgaaacaaaggcaagtcctgatattctttgttttgctgggcatagctcaggctagttgccagcctaggcactattcagtggccgaggaaacggagagtggctcctttgtggccaatttgttaaaagacctggggctggagataggagaacttgctgtgaggggggccagggtcgtttccaaaggaaaaaaaatgcatttgcagttcgataggcagaccggggatttgttgttaaatgagaaattggaccgggaggagctgtgcggccccacagagccctgtgtcctacctttccaggtgttactagaaaatcccttgcagttttttcaggcggagctacggattagggacgtaaatgatcattccccagttttcctagacaaagaaatacttttgaaaattccagaaagtatcactcctggaactactttcttaatagaacgtgcccaggacttggatgtaggaaccaacagtctccaaaattacacaatcagtcccaatttccactttcatcttaatttacaagacagtctcgatggcataatattaccacagctggtgctgaacagagccctggatcgcgaggagcagcctgagatcaggttaaccctcacagcgctagatggcgggagtccacccaggtccggcacggccctggtacggattgaagttgtggacatcaatgacaacgtcccagagtttgcaaagctgctctatgaggtgcagatcccggaggacagccccgttggatcccaggttgccatcgtctctgccagggatttagacattggaactaatggagaaatatcttatgcattttcccaagcatctgaagacattcgcaaaacgtttcgattaagtgcaaaatcgggagaactgcttttaagacagaaactggatttcgaatccatccagacatacacagtaaatattcaggcgacagatggtgggggcctatctggaacttgtgtggtatttgtccaagtgatggatttgaatgacaatcctccggaactaactatgtcgacacttatcaatcagatcccagaaaacttgcaggacaccctcattgctgtattcagcgtttcagatcctgactccggagacaacggaaggatggtgtgctccatccaagatgatcttccttttttcttgaaaccttctgttgagaacttttacactctggtgataagcacggccctggaccgggagaccagatccgaatacaacatcaccatcaccgtcaccgaccctcggtgtcttcgctcttcctcttctcggtgctcctgttcgtggcggtgcggctgtgcaggaggagcagggcggcctcggtgggtcgctgctcggtgcccgagggcccctttccagggcagatggtggacgtgagcggcaccgggaccctgtcccagagctaccagtacgaggtgtgtctgactggaggctccgggacaaatgagttcaagttcctgaagccaattatccccaacttcgttgctcagggtgcagagagggttagcgaggcaaatcccagtttcaggaagagctttgaattcacttaagtgttaataaggatctactgaggctagtctcgtttaatttgtggaaagtccttttttactgctttgcccattggaggtgtctccttttattagaaagtaaccatcttattccaattctatgcatgttactggtatttataaatgtatgagtttttttgcggtataataaatgtaaattttctttgtattctaaaaaaa

SEQ ID NO: 47845 - DNA, 349 bp, Homo sapiens
caagaagatggcttgatgctttagccaaacaaaaggcaaaagtagagccaactttgattaaattcaaacaccttgtggcatttagaggcatgctcatattggcaggagaaggaaactgtagcaaatagataaggtttaaagcaatacactatctttgtttgtccaaggaccacgtagctcttccaataggaagatcatttgtttatgaggcacaacaagaaattctgcagtagttggagttgtaaggcacctgaggttccccacagcctagaagctatcagctcatcaacgaaaaggtccacctggttgatctggagtcttcagttcctgccactgggaaggatacttc

SEQ ID NO: 47846 - DNA, 1584 bp, Homo sapiens
  misc_feature (648)..(648): n is a, c, g, or t
  misc_feature (653)..(653): n is a, c, g, or t
  misc_feature (705)..(705): n is a, c, g, or t
  misc_feature (787)..(787): n is a, c, g, or t
  misc_feature (915)..(915): n is a, c, g, or t
aacgcgctccttgtcattgtcacactgtggtggcctgggtttgtcctccttgcatgtgccagcagtgattgatgactcacaggggcaattccattgtcccagagcctggagctcctgttgctccggggtcctctttggtgttgaagagaagcactcatcccttcgtcagaagacacacacacacacacacacacacacacacacacacacatacgcacactccatgtaggcttagtaagcccagccagtcagtgcccagtcagccgtcccccttccttgtggctgaaccgcaggaggtgggggtgcatctgctctgcaccactcagccagagatgcaggagcctctgcccagctcagaatagatgatgttttcttattagtggctttatttaaaagccatcccagtcatttcacattttttttttaaagttttgattgacatctatttggtcaacctgtgctccctatggactaaaatagctgactggggcattgtctgggcttattaaacctgcatgttgtgtgtgtgtgtgtgtgtgtgtgtgtgtctgtgtacacgcacgtgtgcacacgcaggacaagcatagcatggaatttgatggagtggatgtggagggaattgaagtggtctccgtgcagaaggggganggtangaaccaagtgaagtgccttgtacaggcgtcctgctgccgctagagggcgaantgagtctagaatccacatgcccgcgtcctgcctgcgagttttcccctaaagcagctgtgctggctcccggacagcagcttcnagttgacctcttagaagcccgaccctaatttccgatgggctcagggtcataaattagatttctgttctaggaaactaatttcataccaccacaatactttaaaaagtgatcacaaaatgaaatacacntatacgttttacaaataattacatgaaaacctaacacttaaggctaaattcctttggtgggtgtaggggatggggattgcttggagaagacataatgaggcttgcagtctgatgaggtttgaactgcaggtaccctctttctttcctgtgactttccctttagcaagcacagccattcctccttgccacaagggccttcaaactgtgatggaaatgagggtcatctgtcttggaaatatgcaccgctgagtggatctgcctgcccatttccggagccctgtgcctggcgactgctgggggatgggcagttgcagtggtgactctggaggggcagctcagttcataggatgtaatcatggttggatggactccagagggtcataggatcctttgaaattataagcaagtatttgattgtgagtttatctgggtagagtgtccaaagcattcactggagtctcaagggaatccatggtccccaagagacactattgtacgttcaggttcctttctagtaatacttttttctaaaaagtgtctgtaggtcagttcttctaaggacttctagagatagtagtgatagtggtacaacaaagtgaaggtacttaactgtacacttaaaaatggctaagatagtacattttatgttatgtgtattttactacgact

SEQ ID NO: 47847 - DNA, 851 bp, Homo sapiens
ctgctggcctctatccccagcggcctacatcaaggcctacctgctagagaatggcatctgcattgccaagaagaagaccaaagtcgctcgcaagtcgctggacccactgtataaccaggtgctgctgtttcctgagagtccccagggcaaagtcctccaggtgatcgtgtgggggaactacgggcggatggagcggaagcagttcatgggtgtggctcgcgtgctgctggaggagctggacttgaccaccctggccgtgggctggtacaagctcttccccacctcctccatggtggacccagccacaggccccctgctccggcaggcatcccagttgtccctcgagagcaccgtggggccctgcggagaacgatcttagtgctggaatggggaggggctccccaagatggcctggagaccacccagccctgacctgggaccccaggcccaggggcacattgaacaggaggacggggctctcccccacagtggggaagcagaacggggagacctgcccccccttgggcccctcctcaccccttctttgcctcctacccccgagacctcccctctcccaacgggattggctacacttttgacttggccggttcttgacctggtggatgtggctgcagtccagagaaaggaaagattgaggtggcagagcagaccactctcccttcccaaactgtccaacttctccccctttttgcctcctcggaagctcgctgcccagagccatgtccagaacccagccggccatctccatggtgccaattaccagcaagtgtctttcctgcggcaccgggttcaggcagctactcctgccccagagatgaaggggcagcttt

SEQ ID NO: 47848 - DNA, 532 bp, Homo sapiens
gattatgttagttttctattgccattgaaacaaattgcccacaaatgtagtagcttaaaacaacacacatttattgtctgtagattagaagtccagcaagattctcactgggctaaaatcaaagtgtctggaggcactaggggagaatcttccctttcagctttgagaggcacccccatttcttggcttgtggctccttctccaagctttccatggtcacagccccctgtctgaccactgccttttctgcttttaaggaacagtgtgattagattgagttaatccagataattcacaataatctctccattttaaggtcctaactaatgacatctgcaaagtctactttgccatagaagataacatatttataggttctacagactagaatgtggatgttctgccatacagtgctgtacccgcagagcccctagttgttctaattaaaggaaattaatcctgcgaattctcatcacagaactcctagatttttccatgtttttttatttgcaatacatatgccaaaaaaaaa

SEQ ID NO: 47849 - DNA, 248 bp, Homo sapiens
gacagactaagatggaaatcaggaagaacagaagtagaaccatattattgctacattatggaggaagagtggaaggatgatgaatgatgtaaggttctacaataagatcaagaactgagaaaagattattagatctggcaactggaagtcatcaagctccagcaagtagttttggtaaagtggagaagacagaaactgtagcagaggataaagggtaaataaagtcagaagatgtggaaaaagaaaag

SEQ ID NO: 47850 - DNA, 400 bp, Homo sapiens
agtcatctaacccttctctcagacagccattcaaggctgcctatgtctttctcaggaggagatagaatggttaagctgtcattatcttctagtgccactgaaaggacaatagtttcaatgccatattgcctgacatttaaactgatataccttgggatattgagaaacagaagggactaggggaaggagagagccagtttttaaattgttactatataaggaagattctagggattttttcccactctgaattttaacttgcattccatgtaacaaaaaatagaccatgtaaaatgaatatcatcattttatgtctattcttttatatcactgtgaaaggaagcaacagaaatttaccaaagaaccaaaggattgtgaatgacttttcagaatatgagtg

SEQ ID NO: 47851 - DNA, 468 bp, Homo sapiens
tccttaacctcttccagtgcatatgctaaaagaatcaacagttcgtttcttgcattaaattgctttaaaataagctataactattaaatcagtattcgttgaataaaatgattgcaatgaattgagaatatttgaacaaagactagatgttaaatcatattaaatgattagaattaattttgttaggtttgacatgtgattaaattacaaagcaaaacctcatctggtagagacatttactaagatatacataagtgaaatgatatgatgtctgaatttgctttaaaatactcaagcaaaagatgggggggtgatgaatagttgaaattaaatcgggaaaaatgttagttgttgaagctggatgatgggttcatgggggtttattatgctattctttctacttttatgtgtatttgaaatattccataataaaaagttaaataaatacttgttccaagaaacaaaaat

SEQ ID NO: 47852 - DNA, 668 bp, Homo sapiens
ttctcagtatggcatccccagggagccaccacgactcattagaactggaagatgccatgatccttggtttatctaacccatcacaagatctgagtcaaaggccgtacacacatggaagagagttatatctatgtctgtggtgggcatggtggctcacgcctataatcccagcactttgggaggccgaggcgggcagatgacttgagacccaggagttcgaaaccagcctggccaacatggtaaaaccctgcctctactaaaaaatacaacaattagctggggctggtggcacacacctgtaatcctgactactcagatgtctgaggcacgagaatcacgggatgaatcacgggatggctgaatatgggaagtggagggttgcagtgagccgagatcacgccaccgcactccggtctgggctacagagcgagactctgtctcaaaaaaaaaaaaaaaactacatctataaaaactagttttatgtaattaaaaaaaataagttcaacagggatcaaagaaggaagagagaaatttcaactgaaatgagcaaagtcccctctggaaaatgtgtataaaaaggtaggggctgtcaggaaagtcctaaggctgaatttccaagtcacataccccaaaggcaggtagtgtagtttatcctctcatgtctatga

SEQ ID NO: 47853 - DNA, 416 bp, Homo sapiens
atggcttctgcttatagtgaattactggacgttatttacatacaaaaggatacatttaagcgctttaaatagtttaatacccttggcaggtaactagtacttatattggtttcttatggctaccctaacaaattagcacaaattgggggcttaaaataacaaactgattctcttactggagttctggaggcaggaagtctgaaatcagtttcactgagcagaaatcaaccacccagatgattgcttcctgggactccaggggagagtgtttcctttttctcctagttcccggagccacctggactccagccatgactgccatcactgcaacctcttgctttcattctcacacctcttacttcctccttcaccttcttgcctccctcttaaaaagacccttgtgattacctttagaa

SEQ ID NO: 47854 - DNA, 337 bp, Homo sapiens
tcttaatggagtcacaggaaaaaccacagacctaccaagttgaactcaaacagcaccttgctatggcttcttttctcccaagatgtagttcattaggaataagtttctgaatgtgtatagctgagggtacttgggttttaaagcaatggagtcaagcaaaggcaatagtgagaggtttttagccctccacaaggaaaactacaagatgctgtcaaaagaaataacggacaacacaaacaaatggaaacacatcccatgttcatggatgggtagaatcaatattgtgaaaatgaccataactgccaaaagtagtctagaaattcaatgcaattctcat

SEQ ID NO: 47855 - DNA, 643 bp, Homo sapiens
attgctgctgagtccctacctccctgctcccctggcaggccccaccacactgctccacactacacgtttcctctctttctgggggtcatcgacaggccaccaaggctctgctgactcaaaacaatcagctgatcttcagcagctttggggaacctcagacaggtcttactctcccaccatggagctgaatggctggggtttacatagcacttacacacacacacacacactcataccccaaatggagtcaaacaaataatgactcaaattccaattctaccacttactggccctcttatcttagagaagtttcttaatttctccaagcctttgtctcatcctggtaaaagggatccttaaatgcctggcatgatccaggcatacagtaaaagctaattatattgtccatttttagcaggatccatacactatttctaactacgtatacattattaagggcaaagcaaataaacctgttcatcattcattgttcatccaattaaaatgctttgactggcagggcacggtggctcaggcctgtaatcccagcactttgggaggccaaggtgagcggatcatgagtcaggagatcaagaccatcctggctaatacggtgaaaccccgtctctactaaaaataccaa

SEQ ID NO: 47856 - DNA, 967 bp, Homo sapiens
tggaatgtctgtttacctatattctcaacacaatattatcaatcttaatcttcagtccaataggtaaaacattgttagaattggttataccgtgtcttaattattcagtgaagttaaatgtcagttactgtttgtttatatttgtgaattggctgttacagtgttggatcttgtgcaattaggttgggcttttcttatgattcataaggactttttgtatattacaaatactagtcttggcctcccaaagtgctgggattacaggcctgagccactgcgcctggtcttgcccactcacttgaacctctactactttgtagtattaaacccagatccactgatttaagcaaggcttcaaaacaattttactgccacagcctatataaactatagatttatataatactctctgttccattttagttgatttttcccccaatgacagaaattgttcttttttctactcacaggactgttattgaattagaaatttgaatttacatgtggtggatgaacatcactcttgttacctgcttcatgtacttttttgagtgcttactacctgtgatgattattctgtttctgatctccagtacttagcaaaactggagtttttccgcaaagctgcagatgagggaatgatttaccttaacagcccttcaggattttaacctaggattaagtaggtttgcatgtttgtgattcctttcattcagggcccggcttctgaaggtaggatgcggggaagagctttaaggatctaaatttcctcccagcctgagcaacatagtgagatcccatctcaataaaaaataaaaaaattagccagatgtggtgacacgtacttgtagtcccagctactcgggaggctgaggtgagataatcatttgagcccaggagtttgaggctgcagtgagccatgattgcaccactgcactctaaccttggcaacaagagctagaccctg

SEQ ID NO: 47857 - DNA, 192 bp, Homo sapiens
ccttttttttttttgagccaaggtctcactctatcacagctctatcacagtggcatgatctcactctatctcactctatctcactctatcacagtggcatgatcacagctcactgcagcctcgaactcccagactcaagtgatcttctgcctcagcctctgaacagctgggactacaggcacatgccaccat

SEQ ID NO: 47858 - DNA, 654 bp, Homo sapiens
ggctataccatctaggtttgtgtaagcacactatgatgtttgcatgacaaaatcgcctaatgacacatttctcagaatgtagttggaggaaaaaaattgaaaggagagtattacttcatgacacaggaaaatcatttgaaatacaaattccagtgtccataaataaagttcactagaatgtggccatgctcattcatttacatgtaatctgtggtagtttttgtgctactgtggcagaattgaatacttgcagtggaacttgaatgggctacaaggtgtatttagtacctggcccttcacagaaaaagtttgctgacctgattgaatgtgcttgtgtgtatcacaggaagctcaccaggactcttggtatgtagcctctagctcccaaaggcatctgagccccactggcaggactcagttacctgtctctgtctaagcatgactccacccattagcgtccagacaacgaagaaaacttctattttaaagagcttgactaaccccctccttattatctaagttagagtagctgtgccaccccttaagtagcttttccttcttcctttcaaataggggttggaagagtagcaggtgagaacaacctctttcttcctcaattgtagagactcaatagtctaggctataaattaaaaa

SEQ ID NO: 47859 - DNA, 161 bp, Homo sapiens
tatttttaagctaaatctcacattgcaagggaagtccactttatgttttcagtggaagaaatgaaaaaaacaagcagtattctcagcagcactgatatagctacgagaacctatgtcagagagatgctttaaaacaggagtcagcaaatttctcttctaaa

SEQ ID NO: 47860 - DNA, 579 bp, Homo sapiens
caatgaaactgtttgcacattatggcaagaagggcgctgttttcgacaggtgtgcaggtttcggcacatggagattgataaaaaacgcagtgaaattccttgttattgggaaaatcagccaacaggatgtcaaaaattaaactgcgctttccatcacaatagaggacgatatgttgatggccttttcctacctccgagcaaaactgtgttgcccactgtgcctgagtcaccagaagaggaagtgaaggctagccaactttcagttcagcagaacaaattgtctgtccagtccaatccttcccctcagctgcggagcgttatgaaagtagaaagttccgaaaatgttcctagccccacgcatccaccagttgtaattaatgctgcagatgatgatgaagatgatgatgatcagttttctgaggaaggtgatgaaaccaaaacacctaccctgcaaccaactcctgaagttcacaatggattacgagtgacttctgtccggaaacctgcagtcaatataaagcaaggtgaatgtttgaattttggaataaaaactcttgaggaaattaagtcaaaaaaaaa

SEQ ID NO: 47861 - DNA, 254 bp, Homo sapiens
agtgatccacctgccttggcctcccaaatgctgggattacaggtgtgagccaccatgcgcctggtctgtgtttttctgttttgttttcttaccttacatagttattgttgatgtacctccagaaagatgtagaacttttttttcttttttttttgagacagggtctcactctgtcacccaggatgagcgcagtggcacaatcacagctcactgcagcctcaaacttccaggctcaagcgatccttccacctcag

SEQ ID NO: 47862 - DNA, 423 bp, Homo sapiens
gtgggttttagggtggagcctaaaatcttgcatttccaacaagctcctggtgatgctatgatgctagtccgtagaccagctaagtagcaaggagccagggacattcagattacactatgtatgtggttttgcaccctgattttttttttccttttaacctcttaaaactttttgcttaacattttacataaatgttttccctatgatattaattattctttagactcatagtttttaataaatgtgctatttagttacttggatgtgtagtgatatatttgataactaccttttgtttgaaatctaaaatgcttcctgtttttacctgtcgtaaatcatgatgtcatgagcatccctatttataaatctttgttggcttctctgcaccaaaacttgcaagcaggacagagcattccattaggg

SEQ ID NO: 47863 - DNA, 395 bp, Homo sapiens
ttgtatttactaaatacaaagatatcctcccacacaaccatagtaaaacatcaaaatcagggtagtttactatgggattaacactgaccccatattaccatctaattcatagactttatttagattttttcagttgttccaataatatgctttgttgcatctaaaccaggatcatgtgtttgttcagttgttttatcttattttttccttttcttttctttttaaaatagagatggggtcttgctgtgttgccccagggtggtcttgaactgtcggcctcaagcattcctcctgcctcatcctcccaaaatggtgggattacaggcatgaactactgtgcctgggcaacaagagcaaaactgtctcaaaaaaagaacaaaagaaattcctgccaa

SEQ ID NO: 47864 - DNA, 517 bp, Homo sapiens
aaaccttgcatcttacatgtgaaaatagccacagaactggaaaggatggtctgaagaggggactttcaatatttcccagcagattctcagacagactcaccttggcccattattggatcaaagtcaatataatattaggttaacttgacttatccagctggtgagatgcatcctgcagtcttgagtgcagaggcttctttgttttgtttggggttttgttttgaagtgttttgcattaccagaacaagagttcccaaaactcgggaagttgaaaggtctctttaatgggcacggatgaaaataaactgacatggcaacaaattatatttggcaaatagacatcggaaagcagatattcaggcttcctgggcagggcatagtcctggcacttttcctgaatgtgaataatcaagcacagggcagatcctggaggagcacacttgctccctattgcttgatgaagcaaggccttctcttttacctgctgttgggctgagcaaacaaagcccaggtgagc

SEQ ID NO: 47865 - DNA, 318 bp, Homo sapiens
ggaaatgtgaaacgatgacacatcatcactctccactagagccctccagtttctgagaaagatggaaactctctcattggaaaaggcagaaaaataaacatgctaacaatgaaaattcttaagatttttttaaaaagagaaactgagaggaaaaatcatatctaagttcttctagaaagatcacaatttcacaaaacctattgtttggaacaaaaacctgggtttaagtttattttatttagctgagcacatttagtagaattatttcaagtgtctgccttagtacagacttttcagaagtgggataaatgtacagtt

SEQ ID NO: 47866 - DNA, 1276 bp, Homo sapiens
agggaactggattttagtacattatgggtgtatgagatgattggagccttaatgaatcattacatgctatcattgaggcgctcctcactgtatggttttcagatacagagaacctagtgtatgcatgagaaagtaaatctcctcccttcctttgctggaaggaggagagcagttgccacccaccagtgccctggttggtcatagtgccttcccctttagatggactcaggacaatggcagagcaaaagacagtggaagcccacaagctccctgcagatctgcagcacccctgggactttatattcaccttgtccccttccttgcttgtatgttgactgaccctgatatttagcaattttcatgggctaaatgatatacaaggctaatatgggccaggcagttttaaccacaatctggacacatttccttatgtggaagtggattttggaaaatcattttctgtttttgttgttcccttctcattaagccaacatgtatattcataattacaccctttatgtcaattgacacactttcctaccttgatatggactgtgaaaggaaaataaatcttgggacccccaaatcgctaagctaaagggaaaggtcaagctgggaactgcttagggccaacctgcctcccattctactcaaagtcacccctctgctcactgagatagatgcatatctggttgcctcctttggaaaggctaatcagaaactcaaaagaatgtgcctgttcttctctcacttatctgtgacctggaagcctcttccctgcttggagttttcctgactttgcttcaagctgccctgcctttccaaacccaaccaacaaatgtacttcttacgtttcttgattgatatttcctgtcttcgtaaaatgtgtaaaactgagctgtgccccaactaccgtgggcacatgtcatcaggacttcctgaggctgagtcacgggcacatgtcctcaacctaggcaaaataaactttctgaattaactgagacctgtctcaaattttctgggtttacaggacctgcatgatatgaaagctatttcatgatttctcagattgtttctgaaaagtatcattgtaactcttcatcctctttgcaataggcttatttggttcagttctatatgaaggttttcaggttgaaagttctgccagtaacaaaatgacttggctgtgttgttcacttgaaaacgacaatgttgttgcctagccttcctgtcgaagattgaattttggcttgttgagagcttgctctctgttcta

SEQ ID NO: 47867 - DNA, 562 bp, Homo sapiens
gtgacctgacttaggtgttaacaggttcctctgaggtgtgtggggaacagactgaggggtttcaggggacatctgttctcaccacaaattgccccccaaccagccccagacatgaacagtctcccgggagctccctctagccttctcgtatatcccagccctgcctcatgtcacaatttgtaatgatgtgtttggctgggtgacattttatggccatctgtctccctatcccctataatgtggtttgccgaaagcaaagcccaggactgtctcggccatctgtgtctccaggatcacccctcactgggcatggagtatgtgtccagttaacgcttgctgagtgaatgaatgaatactccatcctctgcctggagaattacgcactttagcatatccaaggctctgacaagtcctgcataaaagagcattattgttttctttctttctttccttctttccctcttcttttctttctgactataggatattgattatcaatctggcaatagtcaagattggcagtctggtgtattagtcaaaggttttcagcctacaaaagaca

SEQ ID NO: 47868 - DNA, 1330 bp, Homo sapiens
tgagtgagaatatgtggtgtttggttttttattcttgcgatagtttactgagaatgatgatttccaatttcatccatgtccctacaatattctttatacaatctgattcaaatattaatctcatccagaaatacagacataccgagaataatgtttggccaaaagtctgagatccccgtggcccagtcaacttgacacataaagttaaccatcacacagtcgtcttacaaaatatacactagaaggcagatatactgtaatatgctccccctatagttcactgaaatacagcagatatttgttgcccatagcagagaaatgcaatctgctaatcaaatacaaaactttgtttttctcaatctgaatttatcagtgtttgagggagtcttatttaactgaaagcttccaagaatttaaaatgaggcggattgctcattctgacacttggattcatgtttagttttctctgtccactgcatgcttgcataggcagcaagaggtctcaccatcactcttcatactgcatgatgatctgctgataaggcctcacatttcatccccattttcccagtgtcaatagcccctcaatctcccaaccttaagagatgtgaaaaagaattatactttatagatgcctctgtggacagcaaggaagaaaggggtatacccagctgggagatcttggtgctgccttagaaacacctgatgtggcttcatgaggtgacttctgttttggaggtggagtggaagacagcagcagtggaaaatgatgatgggtagagatatgtagggccaatgagttggagacattttagagtatgccataactgagaaactttggatatagagggaaactaaccaatttttaaaggaagatttccaattaaaatcagtgtgaacccccaaaccattaccattttgtctaaataaacttcactggtttctgtttaagcaaacattattgagttttgaggatttgaactctagtttctactactgccaaattatgcaaagactagactacataggctcctagtatttattaggattatacattggtgagcatatcatgtgaggatcacataaaggtgtcgttagtaagaatggaaacttttaagtaagcaagtgagatttgggagtaaatcctggcccatcgtctgtcataaatgttgtcttaaataagcttcattaagttgcaagatgtataaacctattcagactagcaaaaagtattctatttcaaggacccgtggataatttcacaggattgaggaatatggcaatcaaccagctctcataagggcataaccagctacttgttagaaaacca

SEQ ID NO: 47869 - DNA, 262 bp, Homo sapiens
ttccacctgcccatgatcaggtccaaggagcggggccggcggctccctgcacctcctcgcaggttgagcagctgttggcaaaggccaacgtaggggcagatgcctggggtcccgaccatgatcaggaagggcagctccgggccaaggctgctcacaggccgggaggtggggagtagggcgaggtcaagcaccagaggaaggggctggcaggggtgaccaggaagaggaggagcagggacgtggagagccagcgcataggagc

SEQ ID NO: 47870 - DNA, 509 bp, Homo sapiens
  misc_feature (79)..(79): n is a, c, g, or t
  misc_feature (116)..(116): n is a, c, g, or t
catctgactgcccataatagctattctcataacgctcaattaaccactacgcatcatacagccaaatatcgtgcctatngtcatactagtctttgccgccagcgaagcaacggtgngcctagccctactagtctcaatctccaacacatatggcctagactacgtacataacctaaacctactccaatgctaaaactactcgtcccaacaattatattactaccactgacatggcttcaaaaaacacataatttgaactcaacacaaccacccacagcgttccacaacagggtcgggctcagagtaggagctcagtaaatacttgtggaatgaatgaatgagctcattttacctcaatcacaactccaggggtagacatggtgatttcactccattctatggttgaagctcagaagcttacggaacttgcccaaggtcacatagttagtaagtggctgagtgacgcatcaacccaaagcctgtcttactctggggtcctggatcttaac

SEQ ID NO: 47871 - DNA, 380 bp, Homo sapiens
cccagcactcccaggccctcactctgcttcctttattttttccatttcgccagccatcttccaacacatgggaccacatccttatttattgagtgtcttgttgcaggtctctaagactgtgcctgccttgttcactgatgtatctctagcgcctacaacagggtcgggctcagagtaggagctcagtaaatacttgtggaatgaatgaatgagctcattttacctcaatcacaactccaggggtagacatggtgatttcactccattctatggttgaagctcagaagcttacggaacttgcccaaggtcacatagttagtaagtggctgagtgacgcatcaacccaaagcctgtcttactctggggtcctggatcttaac

SEQ ID NO: 47872 - DNA, 355 bp, Homo sapiens
aatcatttacattattaaaataaagaaaaaagcaatatcaagaattttcaggctgggcatggtggctcacacctgtaatcccagtactttgggaggctgagacgggaggatcacttgagcccaggaattggagaccagcctgggcaacatagtgcaaccccatttctacaaaataaaataaaaaaagaatttatacatatcttccaacatgcttgtcttccacaaacttcaaagtaccctgattattagaattagaactcagttcccatcacactttcctacaaatcacagtcaatattatttcttctttataaaatgaagctctaaagtacaagctatttgtctgataacagag

SEQ ID NO: 47873 - DNA, 544 bp, Homo sapiens
ctctgctcatttttcaaaccacactagggtacagagctcgtgcttcgggatggaaacctatggttatctgcagagggagtcatgctttcaaggacctcataaaacaacatggcagacatcacaatgttaccgggggtccttgctcccagagctcccaacatggtggcgggttgcttccaagatggcagcaagcctctcgttctctgacctggggttcttggccccacggattccaaggaatggaatcttgggccatgcggtgaatgttatagctctattggaagacgtgggtcatggaagagaaccgtagaacccagcgactagtgttcatctcaattaggacgaacccaggcacttgccgtgcaggaacaacggcaagccttcagcccgatcgggagcagcagtgggcgcctcgctggatcaggagcacagcagacaccctgccagatccggaggggtggaagtcagcggcgggtctgcgactgcggcaaacagcagtggtggacaacgagcgaaagcttagcttgagcggtaacaaacacgg

SEQ ID NO: 47874 - DNA, 494 bp, Homo sapiens
caaagttctggctatgaattgttaacttggaagaaatactaactgccaccacttattaagtgcctactgtgtgccaggctctgaactaggtgcttcatatacattatcctaaattatctcaacatatgaggtaggtgttttaatttttattttatagaacttggtgtgtttgactgttaagctatggggctagagagagggtttgatcccaggtccctctgtgcttttgctgctgagccacacaacctctcatttcaaaaacactttcaaaatgctaacatattctaattcactctaggccaccaaaaactttaatactaatatctgatttgtaaatgacttaatgtatccttgaccctatcagctgaatttaatgaaatattcctctctgctgtgaaattttaccagtatagtatttggtctagtgacagagcgagactccgtctacacacacacacacacacacatacacacacacacacacaaaaaaaaaa

SEQ ID NO: 47875 - DNA, 3768 bp, Homo sapiens
ctctgctcatttttcaaaccacactagggtacagagctcgtgcttcgggatggaaacctatggttatctgcagagggagtcatgctttcaaggacctcatgaactctattttaagaacctctcaaaacgaaacaagcaaatcatggagaagaatggaaataaccgaaagctgcgggtttgtgttgctacttgtaaccgtgcagattattctaaacttgccccgatcatgtttggcattaaaaccgaacctgagttctttgaacttgatgttgtggtacttggctctcacctgatagatgactatggaaatacatatcgaatgattgaacaagatgactttgacattaacaccaggctacacacaattgtgaggggagaagatgaggcagccatggtggagtcagtaggcctggccctagtgaagctgccagatgtccttaatcgcctgaagcctgatatcatgattgttcatggagacaggtttgatgccctggctctggccacatctgctgccttgatgaacatccgaatccttcacattgaaggtggggaagtcagtgggaccattgatgactctatcagacatgccataacaaaactggctcattatcatgtgtgctgcacccgcagtgcagagcagcacctgatatccatgtgtgaggaccatgatcgcatccttttggcaggctgcccttcctatgacaaacttctctcagccaagaacaaagactacatgagcatcattcgcatgtggctaggtgatgatgtaaaatctaaagattacattgttgcactacagcaccctgtgaccactgacattaagcattccataaaaatgtttgaattaacattggatgcacttatctcatttaacaagcggaccctagtcctgtttccaaatattgacgcagggagcaaagagatggttcgagtgatgcggaagaagggcattgagcatcatcccaactttcgtgcagttaaacacgtcccatttgaccagtttatacagttggttgcccatgctggctgtatgattgggaacagcagctgtggggttcgagaagttggagcttttggaacacctgtgatcaacctgggaacacgtcagattggaagagaaacaggggagaatgttcttcatgtccgggatgctgacacccaagacaaaatattgcaagcactgcaccttcagtttggtaaacagtacccttgttcaaagatatatggggatggaaatgctgttccaaggattttgaagtttctcaaatctatcgatcttcaagagccactgcaaaagaaattctgctttcctcctgtgaaggagaatatctctcaagatattgaccatattcttgaaactctaagtgccttggccgttgatcttggcgggacgaacctccgagttgcaatagtcagcatgaagggtgaaatagttaagaagtatactcagttcaatcctaaaacctatgaagagaggattaatttaatcctacagatgtgtgtggaagctgcagcagaagctgtaaaactgaactgcagaattttgggagtaggcatttccacaggtggccgtgtaaatcctcgggaaggaattgtgctgcattcaaccaaactgatccaagagtggaactctgtggaccttaggacccccctttctgacactttgcatctccctgtgtgggtagacaatgatggcaactgtgctgccctggcggaaaggaaatttggccaaggaaagggactggaaaactttgttacacttatcacaggcacaggaatcggtggtggaattatccatcagcatgaattgatccacggaagctccttctgtgctgcagaactgggccaccttgttgtgtctctggatgggcctgattgttcctgtggaagccatgggtgcattgaagcatacgcctctggaatggccttgcagagggaggcaaaaaagctccatgatgaggacctgctcttggtggaagggatgtcagtgccaaaagatgaggctgtgggtgcgctccatctcatccaagctgcgaaacttggcaatgcgaaggcccagagcatcctaagaacagctggaacagctttgggtcttggggttgtgaacatcctccataccatgaatccctcccttgtgatcctctccggagtcctggccagtcactatatccacattgtcaaagacgtcattcgccagcaggccttgtcctccgtgcaggacgtggatgtggtggtttcggatttggttgaccccgccctgctgggtgctgccagcatggttctggactacacaacacgcaggatctactagacctccaggaacagacatggaccttctctccagagctcctgagtggaatcaagttcttgtctttaggatgaccgtttcttaacaatcaaatctggtattgaactgcaggtgactttggcagagaaatgttttcacttttggtctcctcttccagagtcacctttccccactcctatttttgtagatgctattctttctgatgtcttcttactaggggtcattttagctcaaaccctgtaagttacagtcacaattttctgtgccaaagcagctacaataatagagaggaagccttcttagaactctgcttactaatgtattaataccactgagaccttcaggccttgcctgggatatcacttcatcctgaagtttgcattaataatccttccaggccgggcacagtggctcacgcctgtaatcccagcactttgggaggccgaggcgggcggatcacgaggtcaggagatcgagaccgccctggctaacatggtgaaacatggtgaaaccccgtctctactaaaaatacaaaaaattagctgggtgtggtggcgggtcccagctactcgggaggctgaggcaggagaatggcatgaaccccaggctggagtgcagtggctcaatgcaacctctgccccccaggttcaggtgattctcctgcctcagcctcttgagtggctgggattgcgggcacatgcaccacgcccggctgatttttttttgtatttttagtggacagggtttcaccatgttggccaggctggtcttgaactcctgacctcaggtgatccgcccgcctctgcctcccaaagtgctgggattacaggtgtaagccatcacacctggccctagtgacaggtttttatgggtacttttagatgatctaagaaatcatgtgcatatatctttcagatttttattttgggaaaatgaaggtttctacaacatattgtttcagtgttcaaataaactgaaggactcaacattacatttgaactatatccttcctagtgggttagtgtgaaaaagagtttggctgattcctaaaactctgccagccctgcagtaatctccagggcctggttattgttcagacattccatggtgattcctgggaaggaagcttggctgctcagtttctgagtctggggtgagataatgttctgggaagggacatctgttctttggtgtaatctctcatggtgaaatctgctctgtacatcagacaattgcattgctaccaagtttcataccaaatatttgaaaggatggtattgaatctaaaaccaaatattagtttttattaaactcatgggaaggctaatatattccaacgtaaattattacatatggttaagtaattgcatgttaatttattttaatgtaaatatttttgttactgttctgagccaaattctaaagaaaaaataaatacatttccttgttgaaaaaaaaaa

SEQ ID NO: 47876 - DNA, 3757 bp, Homo sapiens
ctctgctcatttttcaaaccacactagggtacagagctcgtgcttcgggatggaaacctatggttatctgcagagggagtcatgctttcaaggacctcatgaactctattttaagaacctctcaaaacgaaacaagcaaatcatggagaagaatggaaataaccgaaagctgcgggtttgtgttgctacttgtaaccgtgcagattattctaaacttgccccgatcatgtttggcattaaaaccgaacctgagttctttgaacttgatgttgtggtacttggctctcacctgatagatgactatggaaatacatatcgaatgattgaacaagatgactttgacattaacaccaggctacacacaattgtgaggggagaagatgaggcagccatggtggagtcagtaggcctggccctagtgaagctgccagatgtccttaatcgcctgaagcctgatatcatgattgttcatggagacaggtttgatgccctggctctggccacatctgctgccttgatgaacatccgaatccttcacattgaaggtggggaagtcagtgggaccattgatgactctatcagacatgccataacaaaactggctcattatcatgtgtgctgcacccgcagtgcagagcagcacctgatatccatgtgtgaggaccatgatcgcatccttttggcaggctgcccttcctatgacaaacttctctcagccaagaacaaagactacatgagcatcattcgcatgtggctaggtgatgatgtaaaatctaaagattacattgttgcactacagcaccctgtgaccactgacattaagcattccataaaaatgtttgaattaacattggatgcacttatctcatttaacaagcggaccctagtcctgtttccaaatattgacgcagggagcaaagagatggttcgagtgatgcggaagaagggcattgagcatcatcccaactttcgtgcagttaaacacgtcccatttgaccagtttatacagttggttgcccatgctggctgtatgattgggaacagcagctgtggggttcgagaagttggagcttttggaacacctgtgatcaacctgggaacacgtcagattggaagagaaacaggggagaatgttcttcatgtccgggatgctgacacccaagacaaaatattgcaagcactgcaccttcagtttggtaaacagtacccttgttcaaagatatatggggatggaaatgctgttccaaggattttgaagtttctcaaatctatcgatcttcaagagccactgcaaaagaaattctgctttcctcctgtgaaggagaatatctctcaagatattgaccatattcttgaaactctaagtgccttggccgttgatcttggcgggacgaacctccgagttgcaatagtcagcatgaagggtgaaatagttaagaagtatactcagttcaatcctaaaacctatgaagagaggattaatttaatcctacagatgtgtgtggaagctgcagcagaagctgtaaaactgaactgcagaattttgggagtaggcatttccacaggtggccgtgtaaatcctcgggaaggaattgtgctgcattcaaccaaactgatccaagagtggaactctgtggaccttaggacccccctttctgacactttgcatctccctgtgtgggtagacaatgatggcaactgtgctgccctggcggaaaggaaatttggccaaggaaagggactggaaaactttgttacacttatcacaggcacaggaatcggtggtggaattatccatcagcatgaattgatccacggaagctccttctgtgctgcagaactgggccaccttgttgtgtctctggatgggcctgattgttcctgtggaagccatgggtgcattgaagcatacgcctctggaatggccttgcagagggaggcaaaaaagctccatgatgaggacctgctcttggtggaagggatgtcagtgccaaaagatgaggctgtgggtgcgctccatctcatccaagctgcgaaacttggcaatgcgaaggcccagagcatcctaagaacagctggaacagctttgggtcttggggttgtgaacatcctccataccatgaatccctcccttgtgatcctctccggagtcctggccagtcactatatccacattgtcaaagacgtcattcgccagcaggccttgtcctccgtgcaggacgtggatgtggtggtttcggatttggttgaccccgccctgctgggtgctgccagcatggttctggactacacaacacgcaggatctactagacctccaggaacagacatggaccttctctccagagctcctgagtggaatcaagttcttgtctttaggatgaccgtttcttaacaatcaaatctggtattgaactgcaggtgactttggcagagaaatgttttcacttttggtctcctcttccagagtcacctttccccactcctatttttgtagatgctattctttctgatgtcttcttactaggggtcattttagctcaaaccctgtaagttacagtcacaattttctgtgccaaagcagctacaataatagagaggaagccttcttagaactctgcttactaatgtattaataccactgagaccttcaggccttgcctgggatatcacttcatcctgaagtttgcattaataatccttccaggccgggcacagtggctcacgcctgtaatcccagcactttgggaggccgaggcgggcggatcacgaggtcaggagatcgagaccgccctggctaacatggtgaaacatggtgaaaccccgtctctactaaaaatacaaaaaattagctgggtgtggtggcgggtcccagctactcgggaggctgaggcaggagaatggcatgaaccagggaggcggagctggcagtgaactgagaccgcaccactgcactccagcctgggtgacagagcaagactccatctcaaaaataataataataaataataataataataataataataataataataccttccagctgggcgcagtggctcacgcctgtaatcccaacatttcaggtgatccgcccgcctctgcctcccaaagtgctgggattacaggtgtaagccatcacacctggccctagtgacaggtttttatgggtacttttagatgatctaagaaatcatgtgcatatatctttcagatttttattttgggaaaatgaaggtttctacaacatattgtttcagtgttcaaataaactgaaggactcaacattacatttgaactatatccttcctagtgggttagtgtgaaaaagagtttggctgattcctaaaactctgccagccctgcagtaatctccagggcctggttattgttcagacattccatggtgattcctgggaaggaagcttggctgctcagtttctgagtctggggtgagataatgttctgggaagggacatctgttctttggtgtaatctctcatggtgaaatctgctctgtacatcagacaattgcattgctaccaagtttcataccaaatatttgaaaggatggtattgaatctaaaaccaaatattagtttttattaaactcatgggaaggctaatatattccaacgtaaattattacatatggttaagtaattgcatgttaatttattttaatgtaaatatttttgttactgttctgagccaaattctaaagaaaaaataaatacatttccttgttgaaaaaaaaaa

SEQ ID NO: 47877 - DNA, 3575 bp, Homo sapiens
acccgcgcgcccgagcgcggaaaccgaggggcaggctcgcgctctgcctgcttcgtggcgcttggttcgtccctcgcccgaggagcgcggtggcggcgtgggagggagcctctgacggcgtctgaaatacatatcgaatgattgaacaagatgactttgacattaacaccaggctacacacaattgtgaggggagaagatgaggcagccatggtggagtcagtaggcctggccctagtgaagctgccagatgtccttaatcgcctgaagcctgatatcatgattgttcatggagacaggtttgatgccctggctctggccacatctgctgccttgatgaacatccgaatccttcacattgaaggtggggaagtcagtgggaccattgatgactctatcagacatgccataacaaaactggctcattatcatgtgtgctgcacccgcagtgcagagcagcacctgatatccatgtgtgaggaccatgatcgcatccttttggcaggctgcccttcctatgacaaacttctctcagccaagaacaaagactacatgagcatcattcgcatgtggctaggtgatgatgtaaaatctaaagattacattgttgcactacagcaccctgtgaccactgacattaagcattccataaaaatgtttgaattaacattggatgcacttatctcatttaacaagcggaccctagtcctgtttccaaatattgacgcagggagcaaagagatggttcgagtgatgcggaagaagggcattgagcatcatcccaactttcgtgcagttaaacacgtcccatttgaccagtttatacagttggttgcccatgctggctgtatgattgggaacagcagctgtggggttcgagaagttggagcttttggaacacctgtgatcaacctgggaacacgtcagattggaagagaaacaggggagaatgttcttcatgtccgggatgctgacacccaagacaaaatattgcaagcactgcaccttcagtttggtaaacagtacccttgttcaaagatatatggggatggaaatgctgttccaaggattttgaagtttctcaaatctatcgatcttcaagagccactgcaaaagaaattctgctttcctcctgtgaaggagaatatctctcaagatattgaccatattcttgaaactctaagtgccttggccgttgatcttggcgggacgaacctccgagttgcaatagtcagcatgaagggtgaaatagttaagaagtatactcagttcaatcctaaaacctatgaagagaggattaatttaatcctacagatgtgtgtggaagctgcagcagaagctgtaaaactgaactgcagaattttgggagtaggcatttccacaggtggccgtgtaaatcctcgggaaggaattgtgctgcattcaaccaaactgatccaagagtggaactctgtggaccttaggacccccctttctgacactttgcatctccctgtgtgggtagacaatgatggcaactgtgctgccctggcggaaaggaaatttggccaaggaaagggactggaaaactttgttacacttatcacaggcacaggaatcggtggtggaattatccatcagcatgaattgatccacggaagctccttctgtgctgcagaactgggccaccttgttgtgtctctggatgggcctgattgttcctgtggaagccatgggtgcattgaagcatacgcctctggaatggccttgcagagggaggcaaaaaagctccatgatgaggacctgctcttggtggaagggatgtcagtgccaaaagatgaggctgtgggtgcgctccatctcatccaagctgcgaaacttggcaatgcgaaggcccagagcatcctaagaacagctggaacagctttgggtcttggggttgtgaacatcctccataccatgaatccctcccttgtgatcctctccggagtcctggccagtcactatatccacattgtcaaagacgtcattcgccagcaggccttgtcctccgtgcaggacgtggatgtggtggtttcggatttggttgaccccgccctgctgggtgctgccagcatggttctggactacacaacacgcaggatctactagacctccaggaacagacatggaccttctctccagagctcctgagtggaatcaagttcttgtctttaggatgaccgtttcttaacaatcaaatctggtattgaactgcaggtgactttggcagagaaatgttttcacttttggtctcctcttccagagtcacctttccccactcctatttttgtagatgctattctttctgatgtcttcttactaggggtcattttagctcaaaccctgtaagttacagtcacaattttctgtgccaaagcagctacaataatagagaggaagccttcttagaactctgcttactaatgtattaataccactgagaccttcaggccttgcctgggatatcacttcatcctgaagtttgcattaataatccttccaggccgggcacagtggctcacgcctgtaatcccagcactttgggaggccgaggcgggcggatcacgaggtcaggagatcgagaccgccctggctaacatggtgaaacatggtgaaaccccgtctctactaaaaatacaaaaaattagctgggtgtggtggcgggtcccagctactcgggaggctgaggcaggagaatggcatgaaccagggaggcggagctggcagtgaactgagaccgcaccactgcactccagcctgggtgacagagcaagactccatctcaaaaataataataataaataataataataataataataataataataataccttccagctgggcgcagtggctcacgcctgtaatcccaacatttcaggtgatccgcccgcctctgcctcccaaagtgctgggattacaggtgtaagccatcacacctggccctagtgacaggtttttatgggtacttttagatgatctaagaaatcatgtgcatatatctttcagatttttattttgggaaaatgaaggtttctacaacatattgtttcagtgttcaaataaactgaaggactcaacattacatttgaactatatccttcctagtgggttagtgtgaaaaagagtttggctgattcctaaaactctgccagccctgcagtaatctccagggcctggttattgttcagacattccatggtgattcctgggaaggaagcttggctgctcagtttctgagtctggggtgagataatgttctgggaagggacatctgttctttggtgtaatctctcatggtgaaatctgctctgtacatcagacaattgcattgctaccaagtttcataccaaatatttgaaaggatggtattgaatctaaaaccaaatattagtttttattaaactcatgggaaggctaatatattccaacgtaaattattacatatggttaagtaattgcatgttaatttattttaatgtaaatatttttgttactgttctgagccaaattctaaagaaaaaataaatacatttccttgttgaaaaaaaaaa

SEQ ID NO: 47878 - DNA, 2655 bp, Homo sapiens
  misc_feature (30)..(30): n is a, c, g, or t
gacttgcttttcttctcatttttccctctncgttcttgtcacggtctgctgacacatctagataaaatattgcaagcactgcaccttcagtttggtaaacagtacccttgttcaaagatatatggggatggaaatgctgttccaaggattttgaagtttctcaaatctatcgatcttcaagagccactgcaaaagaaattctgctttcctcctgtgaaggagaatatctctcaagatattgaccatattcttgaaactctaagtgccttggccgttgatcttggcgggacgaacctccgagttgcaatagtcagcatgaagggtgaaatagttaagaagtatactcagttcaatcctaaaacctatgaagagaggattaatttaatcctacagatgtgtgtggaagctgcagcagaagctgtaaaactgaactgcagaattttgggagtaggcatttccacaggtggccgtgtaaatcctcgggaaggaattgtgctgcattcaaccaaactgatccaagagtggaactctgtggaccttaggacccccctttctgacactttgcatctccctgtgtgggtagacaatgatggcaactgtgctgccctggcggaaaggaaatttggccaaggaaagggactggaaaactttgttacacttatcacaggcacaggaatcggtggtggaattatccatcagcatgaattgatccacggaagctccttctgtgctgcagaactgggccaccttgttgtgtctctggatgggcctgattgttcctgtggaagccatgggtgcattgaagcatacgcctctggaatggccttgcagagggaggcaaaaaagctccatgatgaggacctgctcttggtggaagggatgtcagtgccaaaagatgaggctgtgggtgcgctccatctcatccaagctgcgaaacttggcaatgcgaaggcccagagcatcctaagaacagctggaacagctttgggtcttggggttgtgaacatcctccataccatgaatccctcccttgtgatcctctccggagtcctggccagtcactatatccacattgtcaaagacgtcattcgccagcaggccttgtcctccgtgcaggacgtggatgtggtggtttcggatttggttgaccccgccctgctgggtgctgccagcatggttctggactacacaacacgcaggatctactagacctccaggaacagacatggaccttctctccagagctcctgagtggaatcaagttcttgtctttaggatgaccgtttcttaacaatcaaatctggtattgaactgcaggtgactttggcagagaaatgttttcacttttggtctcctcttccagagtcacctttccccactcctatttttgtagatgctattctttctgatgtcttcttactaggggtcattttagctcaaaccctgtaagttacagtcacaattttctgtgccaaagcagctacaataatagagaggaagccttcttagaactctgcttactaatgtattaataccactgagaccttcaggccttgcctgggatatcacttcatcctgaagtttgcattaataatccttccaggccgggcacagtggctcacgcctgtaatcccagcactttgggaggccgaggcgggcggatcacgaggtcaggagatcgagaccgccctggctaacatggtgaaacatggtgaaaccccgtctctactaaaaatacaaaaaattagctgggtgtggtggcgggtcccagctactcgggaggctgaggcaggagaatggcatgaaccagggaggcggagctggcagtgaactgagaccgcaccactgcactccagcctgggtgacagagcaagactccatctcaaaaataataataataaataataataataataataataataataataataccttccagctgggcgcagtggctcacgcctgtaatcccaacatttcaggtgatccgcccgcctctgcctcccaaagtgctgggattacaggtgtaagccatcacacctggccctagtgacaggtttttatgggtacttttagatgatctaagaaatcatgtgcatatatctttcagatttttattttgggaaaatgaaggtttctacaacatattgtttcagtgttcaaataaactgaaggactcaacattacatttgaactatatccttcctagtgggttagtgtgaaaaagagtttggctgattcctaaaactctgccagccctgcagtaatctccagggcctggttattgttcagacattccatggtgattcctgggaaggaagcttggctgctcagtttctgagtctggggtgagataatgttctgggaagggacatctgttctttggtgtaatctctcatggtgaaatctgctctgtacatcagacaattgcattgctaccaagtttcataccaaatatttgaaaggatggtattgaatctaaaaccaaatattagtttttattaaactcatgggaaggctaatatattccaacgtaaattattacatatggttaagtaattgcatgttaatttattttaatgtaaatatttttgttactgttctgagccaaattctaaagaaaaaataaatacatttccttgttgaaaaaaaaaa

SEQ ID NO: 47879 - DNA, 1326 bp, Homo sapiens
caaagttctggctatgaattgttaacttggaagaaatactaactgccaccacttattaagtgcctactgtgtgccaggctctgaactaggtgcttcatatacattatcctaaattatctcaacatatgaggtaggtgttttaatttttattttatagaacttggtgtgtttgactgttaagctatggggctagagagagggtttgatcccaggtccctctgtgcttttgctgctgagccacacaacctctcatttcaaaaacactttcaaaatgctaacatattctaattcactctaggccaccaaaaactttaatactaatatctgatttgtaaatgacttaatgtatccttgaccctatcagctgaatttaatgaaatattcctctctgctgtgaaattttaccagtatagtatttggtctagtgacaggtgttctatttttttgagacgggtctcactctgtcacccaggctggagtgcagtggctcaatgcaacctctgccccccaggttcaggtgattctcctgcctcagcctcttgagtggctgggattgcgggcacatgcaccacgcccggctgatttttttttgtatttttagtggacagggtttcaccatgttggccaggctggtcttgaactcctgacctcaggtgatccgcccgcctctgcctcccaaagtgctgggattacaggtgtaagccatcacacctggccctagtgacaggtttttatgggtacttttagatgatctaagaaatcatgtgcatatatctttcagatttttattttgggaaaatgaaggtttctacaacatattgtttcagtgttcaaataaactgaaggactcaacattacatttgaactatatccttcctagtgggttagtgtgaaaaagagtttggctgattcctaaaactctgccagccctgcagtaatctccagggcctggttattgttcagacattccatggtgattcctgggaaggaagcttggctgctcagtttctgagtctggggtgagataatgttctgggaagggacatctgttctttggtgtaatctctcatggtgaaatctgctctgtacatcagacaattgcattgctaccaagtttcataccaaatatttgaaaggatggtattgaatctaaaaccaaatattagtttttattaaactcatgggaaggctaatatattccaacgtaaattattacatatggttaagtaattgcatgttaatttattttaatgtaaatatttttgttactgttctgagccaaattctaaagaaaaaataaatacatttccttgttgaaaaaaaaaa

SEQ ID NO: 47880 - DNA, 805 bp, Homo sapiens
tgattctagaggatcccagatgacacttcaggatgaagtgatatcccaggcaaggctgaaggtctcagtggtattaatacattagtaagcagagtactaagaaggcttcctctctattattgtagctgctttggcacagaaaattgtgactgtgccaaagtgctgggattacaggtgtaagccatcacacctggccctagtgacaggtttttatgggtacttttagatgatctaagaaatcatgtgcatatatctttcagatttttattttgggaaaatgaaggtttctacaacatattgtttcagtgttcaaataaactgaaggactcaacattacatttgaactatatccttcctagtgggttagtgtgaaaaagagtttggctgattcctaaaactctgccagccctgcagtaatctccagggcctggttattgttcagacattccatggtgattcctgggaaggaagcttggctgctcagtttctgagtctggggtgagataatgttctgggaagggacatctgttctttggtgtaatctctcatggtgaaatctgctctgtacatcagacaattgcattgctaccaagtttcataccaaatatttgaaaggatggtattgaatctaaaaccaaatattagtttttattaaactcatgggaaggctaatatattccaacgtaaattattacatatggttaagtaattgcatgttaatttattttaatgtaaatatttttgttactgttctgagccaaattctaaagaaaaaataaatacatttccttgttgaaaaaaaaaa

SEQ ID NO: 47881 - DNA, 376 bp, Homo sapiens
cccacttccaaatccttgtaatgtgtcactggttttacctaggggagaatgttcttcatgtccgggatgctgacacccaagacaaaatattgcaagcactgcaccttcagtttggtaaacagtacccttggtgagtataaaacattctttgttgagtgatttaaaaggggagctaccttcagtaccattttaaagctacaatcactgtttaatcatcctaacagagctttccttcttatgcctacgggcccctagttgctggggagacagggattgctaatatcatacccattattactgttccaaaggttccaatgtagaatacatattttatttcttttttttttttttttttttgagatggactcttgatctg

SEQ ID NO: 47882 - DNA, 769 bp, Homo sapiens
tcgaaaattaaacttattttctattttctttgcttaacatccattaaatatgtcttatctaaacttgggtttagaaagaagtgatagcataagtgttcatgtgattatactgtaactaggtcttttttagaacatagagacagggtctcactatgttgcctaggctggccttgaactcctgggctcaagtgatccacccgcctcagcctcctgggtagctgggtcttacttggaatgtagtgtagtatcaaattcctcaacatgagtactattttgcaagcctgctgtctgctgagttgtctttttttttttttgagatgaagtcttgctcttgtcacccaggctagagtgcaatggcatgatctcagctcactgcagcgtccgcctcctgagttcaagtgattctcctgcctcagcctcccaagtagctgggattacaggcatctgccaccacatcgggctagtttttgtatttttagtagagacggggttttaccatgttggccaggctggcctggaactcctgacctcaagtgatctgcctgtcttgacctcccaaagcgctgggattacacccacccactgcctcaggcataggacacgtgggcttttccagaactttaggtcagaaaatgcgttgcttactaaaacagaatcaaaataggcatatgtccgagcactttgggaggccaagaggggaggattacttcagcttaggaattcaagaccagcctgggcaacatagtgagacgctgtcgctacaaaaagg

SEQ ID NO: 47883 - DNA, 382 bp, Homo sapiens
gtagcattctgctttctgtttgggtggccccacaaaggttagagtagcaaatagagtcaaaaccctgatcactctctctaaggggcacaccatgccttcctaataagaatgcccgcaccagatctgggctggttattgacaccaaacttgatgcaacatcgaagtccaatgtcaccccactttggtgtccaatgcaccccagcttctgagtctctgtaactcagggtcaactagaaagcatggcccagatcgggggtctcccgagtgtgcaggcccctttctctgggcgacttctccctgtgtactatttgcttggttgtgatcacttcctccctgagttttttattctgttgaggtttttgccttgccactgggagtcttt

SEQ ID NO: 47884 - DNA, 471 bp, Homo sapiens
gcataatgaaagattagggtgaaatggccagcttcttcctgcactatgttaatgtcacacctggtccaaacaatctttgggccctatgtaaatcagacactgcctactcaagctcatcaataaaaccctgtgcatttcaccacagaaacagaagacccactggggtgtccctctctttctgcaggagggagagctatcctcttttctctttcttctgcctattaaacctccgctcttaacctcactccacatgtgcccatgtccttaatttccttgacatgagacaacgaaccttgggtattaccctagatgaatgaggccacttcaatactacatgtgctactgtacccactcctgcctctttggtcccagtcctggactaacagggtggcaaagtcacataaaagaaatactccaaacacagtagtcatgcatgcaaaaggcattactatcagaaaggatttgctgaat

SEQ ID NO: 47885 - DNA, 442 bp, Homo sapiens
taagatggtgtttctagaaggcactgaagaaactatataagttttcaaaattacagctttaagaaaggaggtgctaagaaatcagtaaactatgttgtcatttcagcagcaaacacgtggatggagctgagttgaagtatacagtgatttagcgtattatgagataaatctgtccacactgattttgttattttagctttttttcttcttcaacctgggcctttctggtttgggatttatcattcatcttctatgtgtcatattcattaattcccagaaaataggacacttatttgttgcatggctgggggaaatcctgaaagaagactgtagttttaactttttaactaataattaacatttaggccaaattttaatggaaaacaatgtacccaaatggcataacaaaggtttattaatcccctaatattctgtaaccctt

SEQ ID NO: 47886 - DNA, 662 bp, Homo sapiens
aggtctccagaaacacttaattgataatgagtcaaaaggcattactcttggcatgtgaatattggatgtgactcaagggtgagtcaaatgcctgtggagcctggattcatgttcttttccccgtttgtcagtaatcctttctaatgttccagttccatgatgtgattttagtggaattaaacttgaaccacttagttatgatgttgttactgtgttgggaacgcagcagccaccagaccaccaagagcaactgtaggttgggcttggtggtgctggtttagtgttgtggctgatgaggtgtaacccaggaaatttttatttttgcttttaaaaaaacaactcatctgtggtcatcttgtaagtgaagtattggactataaggactcttgagcccgaaaaacattttgtgacttagcctgaggctaacaggaataaacttgtcccatgttcagatagtttaggcatatctgagttggtggaggaaatgtgatctgttcctagccctatgtgctaggcaggatgcctgggtatccagagagtgagtgagaggcccggccgatgccgcatgcctgtaattccagcactctgggaggcgaagcgcttgagcccaagagttcaagaccagcctgggcaacatgggaaaaacctgtctctacaaaaaa

SEQ ID NO: 47887 - DNA, 202 bp, Homo sapiens
tatccctccacccctacacacacaccacaaacaccccacatccttggtagctaatgcctttcgggtgggagccctgaagcccctcccatgtgcataaccattgctttttattgaagatgattgcctgtggtagatggtaaaacatatttaactgcaaaatgacttttattttatcccaggaagggaaaaaaatactttagga

SEQ ID NO: 47888 - DNA, 431 bp, Homo sapiens
atacctttcacccaaattacccaattgttaatatttctgaactattaaagaataagttgcaggcgtgttgcctcattacagcttaattcttcagtgtacatttttaagtaccaggacactccagtataaccatcattaagaagttaacactgatggtatactacggtctaatccaccagctccattcacatttcattgatttgagccaataatgtcctttatcagtctaggatcacatattgcctctacttatcatttctctttagttttctttattctgaaacagtccttgtctttcatgaccttgacactttgtcaagaatacaggccgggtatggtaataccagtgctttgggaagctgagcatgagaatcgcttgagcccagctgtttgagaccagcctgggcaacagccagaccctgtgtctacca

SEQ ID NO: 47889 - DNA, 601 bp, Homo sapiens
gcactggcaagcaaacattgttcagtttccccaccttgctctcggacaactttgggactctaggattattttctaatcggcgtgtttgccatgaaggaagcgatttaagactaagcagagagcaagttttaaagcccgagaaagtggagtttaaatgttctcaatagacatatcccgctccaactctgcccgccgcggcttggaaattacagcgaacaaaacccccagccctgcgcgctgagcgcagctctgcaagcgccggctgcacgcttaattggttgcatccgcagacaaaaccctccactccgcagggtcccgggcgcccctcgatcgtcccctactcaaccgcccggccactggccttggagaagagcatttaatggctgcagctctgaggcgcgagatccaggggcaaaagggggaccgggcccctgacaaggaagcgaccctggctaccctgcactctcttggacactcctttcaacgcgcccttagctgggcgagttaaccccgtcctgcggggaaccaggctccccgtagcccctgccccgggctccctccgcggccgccgcatatttaaagagcccaaaaaggaccaggc

SEQ ID NO: 47890 - DNA, 364 bp, Homo sapiens
tgcctcagcctcccaaagtgctgggattacaggcatgagccacggcgcccggcctaaaagttcttctttttaaagatgtattaacctgtcctttgatactacacccaaagtgaacaaatgctagtttcttattttaaaaaaaaatgtttatttattttaaaaaagaggcatggtctcactcactatgttgcctcggctggtcttgaacttttgggctcaagtaatcctcctgccttggcctcccaaagtgatgggattacaggtgtgagtcactgcgcctggcttattattccttttttttaaaaaaaactttttttgggggcaggacataggatctcgctttgtcacccaggctggagtgcag

SEQ ID NO: 47891 - DNA, 789 bp, Homo sapiens
cagcttctccaggtcaactccttcctggaggattcggatgacttcagacatcatgggtgcaagacacctggtggtatagaagccaggtccatccataaccacaatgatgaccttcccctgcttgagactgactgccacagctgaagcactgagtgtctttggaagttttctcggttgtgatcatctccagcagctgcatcttgtccatgggagagaagtagtgcatgccaatcaccttctcaggtcttttgctgacagcagcgatttcactgattgggaaagcagatgtgttactggcaaagacacagtgatctggaatcaccgcttctacttcctttagcactctgtgcttaagactaaggtcctcaaacacagcttcaatcaccatgtcgacctttaaaacgttgctaatcaagctgcccagttgaaggggtggcctgcccctccacatctgtgggtgtttctcgtcgggtgggacgagagactgagaaaagaaagagacacagagacaaagtatagagaaagaaaagtgggcccaggggaccggcgccggcaccggtctctgagttccctcagcatttattgatcattatctctgccctctcggagaggggaatgtggcaggacaatagggtaatagtggggagagggtcagcaggaaaacatgtgaacaaatgtctctgcatcataaacaaggtaaagaaaaaggtgctgtgctttgatgtgcacatacataaacatctcaatgcattaaagagcagtattgctgccagcatgtctcatctccag

SEQ ID NO: 47892 - DNA, 402 bp, Homo sapiens
actcatagccttggctcgaaaagcctgtacccgggattctttcctgtgggggcaattttggtgcctgcaattagctgaacaggcagcttttgtcccctgctaaagcactcaattgcaggtgtaattaggttccctcacccctgaaatctgcagagagccgcccgccttgactaactgcacccacaattaagtgcttacgggcatgtggctggagccgggaaacatgtgcatgcagctaatagcaggggcaccaagcaggtttgcaaaaatagacactgcggtggagagatccaggctttttgcatttgttgttcaaacggctctgtccagctgggaataacgaggaaagacaaacacaccaattaggctgggtccatacataaataaactgcacagctcctt

SEQ ID NO: 47893 - DNA, 179 bp, Homo sapiens
aaaagagtttgaatcagcacaaataattaaaattatggaccctactcataggaccatcatacataaagaataacaccccttttgcctttatttggagaatattactcaaccacttcaccatttataagaataataacaaaaatgggattttcacattatgactttaaagttgaaggatc

SEQ ID NO: 47894 - DNA, 433 bp, Homo sapiens
tgtgtagttctgtcatcatcttctctttggtacatttcattcacctttataaattcaattaacacctccctgtcttgctcccagtttttccccagcctctgaatatcccaactgcctgctgaatacatctcaacacataccacatctaaaataaaatccaccatttttcccctaaagctgttcttccctggttcagttagccaaaaatctcagtcatttggtccgcagtctgtacaaagctgatcacatggtagttgctcaatatacactgctggtttattgaccaaattgaatatctgcctgcagttacaatttgtaagagtcagcctagatcattcagagatagttgttctggttgtagatttcccatatccttatttcttttcaaaattattcttataatacagcttcaagacattggacagaggcagga

SEQ ID NO: 47895 - DNA, 2917 bp, Homo sapiens
aacaactttagtacttggctttgtgtgaaagaaaacagaattccctatgtaatacccaacacaccatactcatgcaataaatattggtgaatacaggtgctgtactagagatgacaaaagtacaattaagagtcctatttttcactggatctactagttgaataaggatgccatatactaaagcatagaaaagttaaatatccattccctataaaatctaagaaatactatgcagtaatatgtcataaattgccaaataataatttactgtaatacagaaaaagatctgcacctatgtatgaaaagattctcagaaaactaagaataaagggaaattctaacttgatacatcctgtgcacctcaagtctatagcaaaagttacatttcattgagaaattttgagcacaatttaagtaagaggagaagataagaaagaagaaataaagttcactattcgtatatgatatagtcatttgtataaaatccaaaacagcaaactactagaactgagaaaattcagcaaggttgtctaatataagattaatttataaaaagcagttgttttttctataccgagagatcagcaatcttttttaaatgttttcagctttgtgggccatatggtctctgtcataactataactgctgatgtagtatgaaagcagccttagacatcatgtcaagacatggcaatgcctgtgttccaataaagctttctttgtaagtagatggcaagcttggatttggcctgtgagccataaatttctaacccctgccatttatcatgagaaacccacttagaaaatagtctaacaaaaattaacttaattaaaaacgcataaaaccttcatgggaaaaaaaaaatctaagtttattagaaaataaaagattgttatgtgatatatggcttaacctagtaatgcctgttttctttaaagcacatcagtgtctcctgttcaaaattttttttttcctagaaacttgacaaattcattttaaagttagcatagaccaatacaggtccagaattagctgagtcagttttgacagaaagaggaaggaaggaacactagacctacaaggtaaatgagagttactgtaaaattatactaataaaaacaacataatgctagcaaaagaaaggcaaatagattggtataaactagtaatctcagaaagattcatgtatatttgacaacttggtatatgatgtggcacaactaggtagtgaggttgcttaaagaagatgattatttagatttagtaggagtactggctatttggaaaaaaaagctagatccctactttcaactttatatgcaaaggctaactcttgaaggattaaagacctaaataagaaatataacacttatatttaatgaattcacttatatttagtgaatattcacttatatttagtgaatagtaggctgggcatggtggcttatgcctgtaatcccagcactttgagtggtcaggagttcaagaccagcctggccaacatggtgaaatcctacctctactaaaaatacaaaaattagctggtatggtggtggacacctgtagtcccagctactcgggaggctgaggcaggagaatcacttgaacccaggaggcggaggtttccgtgagccaagatcgtgccactgcactccagcctcggtgacacagtgagactctatctgaaaataaataaataaataaatgtgaatagtagaaattttggagaataactacatcatagggatcatagaacataatgttcaaatttagtagatctgattacatcagaattaaagatttctgttaaaagaactatacacagagttaaaagtcagatgtcagctttggaacttttaaaacctaaagggaataatacctgtaatatattaagaactcctaaaagttaacagaaacaaagaacaatagcttttaaaaaaataggtaaaagatactaacagacaatttaaataaagggtagctaagtgctaacaggtagatgagaagatagacaaactcactagtaatcagaaaaaaatgaaagtaaatgagatacaatttttcacccatcaaaatgacaaatatttaaaagttttctgatgccaagtattgggtatggtgtagatatctgtgtacttacgatgtgagtgtaaactaatattgtcattctgtaaaccagtcaataattaaatcagaagtgtttaatccctctgacccagcactcagaggaatttttaaacagatctttgaggatataatctttgtagctgcatagtttgtagtagtggggatttggagatagcctagctaaatatccatcactggtaaatagagcaaataagaaaaatgaaatgggagtaacaatggtgagatctttaaaactagatgaaactttaaaacatacagttgagagaaagaaacaatgagattcataaatatttaagaaaatagaaaaagcacagtagaaggaaatcggagtagagataataggaggaaagaggaaacaagtttgaggaaatatcacttgctaaatttatttatattatatttctatagatgaagcaaggatgatacagattcttttttctggatgaagcctggcttgaaaaaaaaacaaatggggctgggcacggtggctcatgcctgtaatcctagcactttgggaggccgaggcaggcagatcatttgaggtcaggatttcaaaaccagcctgatcaacatggtgaaaccccatctctactaaaaatacaaaaattaggcatggtagcaggcgcctgtaaccccagctattcaggaggctgaggcaaggagaattgcttgaacccaggaggcagaggttgcagtgagccaagatcacaccactacaccccagcctgggtgatagagtgagactccatctcaaaaaaaaaaaaaaaa

SEQ ID NO: 47896 - DNA, 682 bp, Homo sapiens
ggaattggggatgggagagcagctcaaagtgggaaatatggagaaaggagagacattgtggaaaagaagagataaattgaggggaaaaaaagaggatgaaaaaatgaagagagagaattactgatgtgcttcacacccacacctcctctccaacttcacagtaacagaggcaatgtcactatcttttacctgacaagtgctttaccagggagttgtgcctggcatcgtgggagtggaaaatttttcccttttgcattttgagacttgggtgtgctgctttaagatgccactggtatctaagtaatgtttgtttatactggatatttttctctgtagcctttgtggattggacttataatataaacaatattgttagcagaactgcaggtactctattgctatgtttattttattagttaaaaaactaccagagccctaggacttctgagcacatttagaaaataccagaggcaattttaagactagcattagaaagaaagaaaagaataagaataaaactaagacttgcataccttagaatcctaaccaatgtggtgatttttaaaaattaatgtttcagagactctaaattagggtagttggtttcatcaattacattttttaagttaatataaagtgcttttgtatgtaaattctcttaatagataatttaggtaaaatg

SEQ ID NO: 47897 - DNA, 429 bp, Homo sapiens
tggaaaaaaaggaaatccatgatcctggtccccagtgtttttagacaagcaggcacacaacaggctttctctcccattgccactgagatgaggaatggatcagagctaacttgggcattagtcataaagcagatgcacagattctctctaataagggtgggattacttggaaaagccacctgtctgaagatacaaagacagggtaggcaggtattccaggtgggggatcacaagagtaaagttctgtgagcaagcaagccccaagcatgtttgaggagggtgagccatgtgacatgtcggggtacagaactctaggggctggccaggaccatcccaagaagggccaaatgtcatgccaggaggcttggacatttgtcctgtgcaaagcccagtacttaaccacatttcatgctgaagcacaaaaacctg

SEQ ID NO: 47898 - DNA, 697 bp, Homo sapiens
aacattttcaacaattgatcaatacatgactttcttttaagtgtgcttctgttaaagacgtcttttgtatgtgagtggaaaaactcaaaactgtttttcctctgttctcacaccactacccaagcaagcagtaaattctgcagcagacatccactgggtgtcctccagttcaattttgacactatctgcttggagatagggacagatcccacaggttaaagtcccaatccccaagactacctgctctccccagccaagagtcacatgtctgggtctctggaatttctgaccctctgagtggcttcaagttgggattctcatgactttgggttgcactaatttgctagacaggctcagagaactcagggaaacacatgtattagtttattataaaggatgttataagtctgggcacagtagctcacaactgaaatctcagcaccgtggggaccaaggctggaggattgcttgagcccagaaattcgagaccagcctgggcaatatagtgagaccttgtctctacaaaaagctaaaaaataagccaagtgtggtggcatgcacctgtagtcccagttacttgggagtctgaggtgggaggaaagagcacaggaggcagaggctgcagtgagccaagatagtgctactgtactccagcctggacaacacagagagagaccctgtctcaaccaaaaaaaaa

SEQ ID NO: 47899 - DNA, 717 bp, Homo sapiens
gccggcctaactacttcggcgtctacacccgcatcacaggtgtgatcagctggatccagcaagtggtgacctgaggaactgcccccctgcaaagcagggcccacctcctggactcagagagcccagggcaactgccaagcagggggacaagtattctggcggggggtgggggagagagcaggccctgtggtggcaggaggtggcatcttgtctcgtccctgatgtctgctccagtgatggcaggaggatggagaagtgccagcagctgggggtcaagacgtcccctgaggacccaggcccacacccagcccttctgcctcccaattctctctcctccgtccccttcctccactgctgcctaatgcaaggcagtggctcagcagcaagaatgctggttctacatcccgaggagtgtctgaggtgcgccccactctgtacagaggctgtttgggcagccttgcctccagagagcagattccagcttcggaagcccctggtctaacttgggatctgggaatggaaggtgctcccatcggaggggaccctcagagccctggagactgccaggtgggcctgctgccactgtaagccaaaaggtggggaagtcctgactccagggtccttgccccacccctgcctgccacctgggccctcacagcccagaccctcactgggaggtgagctcagctgccctttggaataaagctgcctgatcca

SEQ ID NO: 47900 - DNA, 461 bp, Homo sapiens
aaaagaatagaatgcagcccaaagcagatggagggaaatgacagtccgcagtcagccaggcctcaccaaagaatacaggccctctgccaggtccctcctaccctggagaaatctgagtcttcaaattgccaactccctggactggtctaagtatttttctgccagcgttggaatccagcctcacaacaattcccctaagcaatttctcagttcctctcacttcctctggttccttctcaacagccataattctttatagaaataagttttgcaaagccttcatgttctgacatgacctagagcctcagactcatgtttaccccatgctgacctcagaacagccgggggaatcagaataaaaaaaaaacaaaaaacaaatcttcactctaataagtaaaactgtctcagagttgaagccagctgcccaacccacttgaaacctttctttgacagctcaaatg

SEQ ID NO: 47901 - DNA, 277 bp, Homo sapiens
aagttggttaaaggtttattattttaaaaatctttttaacagtatggaggtttgaagaatattgtagccttgtattataatacaagaatacttggattgttttattagtagataattaccattacagaaatcaaaagttttgatagcaacagtgaagaagataatttttctagagggttgggagttcaattaatagaatggtttatgctgggcatcataagaagtttatataaattcaaactgtagcctaaatgagggccagcctgtggtttgaatt

SEQ ID NO: 47902 - DNA, 159 bp, Homo sapiens
caaggccacaactttctatgaagcgaatgtacccttccaagggcctaaacactaaacagctcacacaagcattttgcagggaccactgataaacccaatgcctccttgggaaagcagtctcaaactacagaaatttctctcttgagctgcctgttcttt

SEQ ID NO: 47903 - DNA, 513 bp, Homo sapiens
caggcatgtgccacgacaactggctgatttttgttatttttcttagagacggggttttgccacgttactcaggctggtctcgaactcctgaactcaaaccatccactcgtctcggccttccaaagtgctggaattacaggcatgagccaccgtgcccggccaagtacagtacttaaatgctgaaccactttgtggttcacagagagaggaaatcagcaagtacgagggtgaagtttcagccaagtacaaggaaggtttcatcaaggagcaaggccactgggctttgatggatgggtgggatttgctagaggggaagagagtagaggacatatctgtcacagggaataacttaaatgaaggcacagagtggaaataagactggctattcatgggacagtgaggagactggcctggcacacacaggaaatatttgtggagggaatgtaggtgattatagctgaatatgctaggaagaacaaacctaagcagctatgaagaatctttaaaagcaga

SEQ ID NO: 47904 - DNA, 462 bp, Homo sapiens
actttatatatgaattcttgaaataagtgcacgtatgtttcatgcttgcaaattgcatccaattagaatagcttattttaaaagctgttttagagaattcagaagtatagactcataaaatgtcaacttatcccctaatattccttttggtacatttagatttctaggtgctggttttgcttacattcactataaatcttaattgcaaagcatattcaagccaatgatcaatatcaaagaaaactattttttttatcctaaggcccatatgccagaatccccctgtcccccaatctttatgcttcttcctcatatctgcttccaaatcaagaaatgattggaatctgggtgcagtcacctgcaccctgtagtcccagctgttctggaggctgaggcaggaggatcactccttgagcccaggagttcaagttcagactgggcaacatagcaagactttgcctg

SEQ ID NO: 47905 - DNA, 402 bp, Homo sapiens
gcacagacaagacatctacctagacctggagtgggaggacagccaggaagacttcctggaggagagggcaccccagcttgcatttgaaagtcagacagacagggtgtggcaaccaggcagcagtacaggggaacagacaaggctgagacatattcatagttgtcacctactcaacattgccaagccttgttcaaagcacctggaaaggatgatctcatctgtccacgtggcaaccctagaggcaggtccttttactgtccatacgtggcagaggaaggaactgatttagagagaggtgcgggcttgtctaaggggacacagctagtatgtgcaggttctcaggctccatgtgggcttctgtgctctctggctggtacccttgcctcttgtcatgccgcacac

SEQ ID NO: 47906 - DNA, 1102 bp, Homo sapiens
ttgcaacctctgcctcctgggttcaagcgtttctcctgcctcagcctcccgagtagccgagactacaggcgcgtgccaccacccccagcaaattttctgtatttttagtagagacggggtttcgctgtgttagccaggattgtgtcgatctcctgacctcatgatccacctgcctgggcctcccaaagtgctgggattacaggcttgagccaccgcacccggcctctcttcagtgttttgtgatatcaatgtgtgcctaagacatactgaactggaacagtgggaggggtgaacatctgtctttcagaatacgcatgtacagcctggccaatgctggctttcttgagaataccaacaaaagttccactggcaaagagcatttatgaaacctgtccattctgttttaatttagttaccctgggtaggttataagcataacaaatgtgcctttgaacttgtttttgattgcttaagaaagaatcatgagtaaaagtacaaataagatatcctaagccaaatgtggtggctcctgcctgtaatctcagcactttgggaggccaaggcaggtggatcgcttgagcccaggagttcgagaccagcctggataacatagtgaaaccctatctctataaaaataaaaaataaaaaaataaaaaattagctgggcggagtggcttgcagctatggtcccagctactcctcaggaggttcacttgaggtggaggttcacttgagcccgggaggtcaaggctggagtgagctgtgatcatgccactgcactcaatctgagtgacagagtaagacactgtctcaagaagaagaagaaaaaaaggctctcctagctctggaatttcatgggaagttcactgaggctaaaggacttggtgcagcctccaagggacaccctacctgtccatggtggttgggatttggttataaaacaagatgctgatgtgctagctatactaactggttggatgaaaggaagacagtaccttgaaacacccgacataagatcgctgtttctcctctcacctgattctaggttagaaacaaaatctgcattcattttgatttggcttggctatgaaaccaaatgcca

SEQ ID NO: 47907 - DNA, 432 bp, Homo sapiens
aattttaaaacataagactgtagtcttatgtttgtttgttttaacccctaatcctaaccctaagattatagtatatttaaaacactatacttggccaaactgtctgaaatacaaaaatgctaactctatagttaattgaaaaaggcaatagtgtggcttataatattacaagcattttatttaaaaaaaaaattgatatggcttcaagtgacagattgacccctagaaaatacctttttttgttttaagagacaggctctctgtcacccatgctggcgcccagcggctcaatcatagctcactaaagcctcaacctcctgggctcaggcagtcctcctgcctctgcctctcaaagcactcagattacaggtgtgacccactgtaccgacccttagaaaatgctcttacacatgcaatttactgtagacaaat

SEQ ID NO: 47908 - DNA, 554 bp, Homo sapiens
aaagcctccttcttttcttatttccatttaactgtcgcctccttggcgaggctttgcctgagcatcctagataaataagcccctctccaggcattctatgacattatcctgttttattttctttattatacttaatagtatctgaatttacttaatttgtgtatttatctcttctcccaacacacagttgaggaacatttggcttgttcattcatgtagtagggccaggaatgtaatagacaataaatgtgaactcacagatgaactgactccttgttctttcccttccataaatagaattctctgtgtgtgtctataaagcaaacaaagtgttttacactgtagtgttcattctaaaccctctattttagaaacctgtacattgaggcgaaagtcacatggggagagagtagtacaacaacgattaaaaaaccttatcttggccagatgtggtggctcacgcctgtaatcccagcactttgggaggccgagacgggtggatcacctgaggtcagaagttcgagaccagcctggccaaaatggtgaaactccgt

SEQ ID NO: 47909 - DNA, 846 bp, Homo sapiens
tagggagaaagaattatagttaagagtttgtgtaagcagttgtgttctcaggcccaaatcttaaattcacaaaaactaacaaaatttcacttcagtctaactgccaagtctttaatatttctcttcagaattcattttgaagttttttcataacccatatatttaatcatttcatttaggttattaatagaattttcttcttatgataacataccttgtaagcatgaatattttaggtgtcaggagtcattttagatgggcaatgtaaaatttaagtaaatgtgaataatcaaaagttaggccaggccgggtgcagtggctcacgcctgtaatcccagccctttgggaagccaaggtgggtggatcatctgaggtcaagagttccagaccagcctaaccaacatggtgaaaccctgtctctactaaagatatcaaattagctgggcatagtggcacatgcctgtaatcccagctacctgggaggctgaagcaggataatctcttgaacccgggaggcagaggttacagtgagccgagatcgcgccattgcactccagcctggtcaacaagagggaaactcccatcctcaaaaaaacagttaattacatttttcaaaattatagtaatgttttttctgattgcaaaatattacctattttctgttaacaatttaaaagtgtaaagaagaaactgaaaattatatttagcttcactgtataaagataactactcttaaaattccttcactgtttgttttttgttgttttgtgtgtttttttggtggccgaatttccatatatatctgtatttaatttaaaaaatgagaacctaagtatgcattgtagt

SEQ ID NO: 47910 - DNA, 692 bp, Homo sapiens
gagatgtggaggcccaatttaaatagttacagctgctagctcctaaggtctatcttactatctgcaccgtttgcggggagtcagcttaatgatagtaaactgtgctaaatgggtctagaaatatccagttaatctgtttgagatattcggaaactcaatagcttgctgaagtagcaaacttgaatccttatttttattttaaaagggagtaaagggactgtagataagtaaaagatgctctgcactgcgcctctctggtaccagtccctctcgtttaggcagcggccacttcccgcggagctgttcacgccaagtgaccctgccactgcgctgctcccaccaccccatgtccaccccgtcctcggacgcctggtctcagcacatcaccggtattctcttcctcttaccagtaattagtttgagactgtgactcacttctgtccaacaagatgtgaagggaagtcttcctgggaggtttctggaaagcgttctctcacttgtgatagccctgggaagaaatgctccccgggtcctcagagctttgttgtggctggacgcatcttctggaactgcgacagcggaggaggaagccaagagagtgaaccaaaacaaggaagggcggagggcgggggaggcctgcaaaccttacggcttatttccactgacatcagagactcatgttaataagtaac

SEQ ID NO: 47911 - DNA, 1148 bp, Homo sapiens
taagagatagagtttcaccgtgttgcctaggcttgtctcaaactctaggcctcaagtgatcctcctattttggcctcccaaagtgctaggattacaggaatgaatcaccatgcccagctctgccctgtctttagaaaccccactccccttttttttaaggatttgttcttgtttttattttatattttaatgttttgagacaaggtctcactgttgcccaggctggagtatagtggcctgaacacagctcactgcagccttgacctcttgagctcaagtcatcctcctacctcagcctcctgagtagctgggcttacagttgtgtgccactacgcccagttaattttgtttttttgatagcgacagggtcttggccatattgcccagctggtcccaaacttctgggctcaagtagctcgcccaccctggcttcccaaggtgctaggattacagatgtgagccactactcgtcaagaaccctatgtttttccattattcttgtttgaggctctccacaaatggtctccagcttgccttcctggctttgttttttttgataaagacacatattcctctgagttgctttattcaccttttccataccacactttgttccctacttcctttatcttgattcctgtcaattccccttcatctctgttttctagctccagtactctgttggcatcctgcctgactcaggtaccagtccacttttaaagcttttcttgaccacttacgtctatagtgttctttttactgaatccctggggcttgccacagattatcttatagttgtggattttgtatatgtatctttcctaccttaggagggggccttaagggtaagtcccagactgatttacctgtttttccccaaatgttaaccatttgaaagaaagaactaaatggatatttctcaaatggcttttgatagatacatgtacaatacatctgttgtcatacctggttggaaaaaaaaatgcctgtaaattcttcacattgtttgaaatcagtgtgtcagaagctgtaggattgtagaagctttcttaagcaaggccatagtatggctgtcaaatctgttactaagctttagtctccatttctgaaaaacgagagtaatgtgtaatccttaagatcctttcgta

SEQ ID NO: 47912 - DNA, 493 bp, Homo sapiens
gggagactgagtgatagagaagtaacttgctttaagggcatggggcagagctgggatttgaacccaggtagcctagcaccaggctgcatgctctgccaggaggctgtgcttcctctgtagtaaggtggcctgtccctctcaactctttccatcactgggcacaaagctactgcatcagctgtcctccatatttaaaactcaggtatactctttgatgaaactctacctttagagcttctacccacactaccaagtcccaacaataccaaaacactcataagggatctggcccaaagcaaactgttccacattactacttggtagaaaacgaaaagctcctttttgatttttcacactctggacattttagtgtgtcatgacccagtctgataaccttttatgtctcttaagcattttgttgtgtttgtaactttttaccccctaattcattttcactgtcctgcaaagagttggaataaattaaatgtctaac

SEQ ID NO: 47913 - DNA, 448 bp, Homo sapiens
tttaaagaggtagggaataaaatagatctttagggaagaaaaagttgtctgtgaattgtcatactgaaagtaataaagtttattttgcattttatttgagacatgattatatcaggaagattctagtttcatgggtatttttgtataaatgcagtaacatctattagatgctctcaataaataaatatcaatagatattaatattggtgtttatttttagtcctttaaatgttttattcagctatagtttgagtttagattctcaaatatttcagaaagctgctgttccaatttgaagatgtataggtataatattacatcatataattgaagagtaggggactataaccctacatagtgtcatacagaccatcttcagagcagtaataatgatgtaaaagttgaaaacagttaatatttttgcatgatgctattgattgcagttaat

SEQ ID NO: 47914 - DNA, 306 bp, Homo sapiens
ataaattctaatttacacacactcacacacagccaattcagttgtatgatttgaaccatttttctttcttcttgcaccattatttggtctgagtcccgagaaggaaatcttacttgaataacataaatgtttttaaatattattaaattcttaatatcaaatattaaccaagcacagatgcacaatctggacatcttccatgtggaaatatcttcatacaaaaggcatttatttaatttggactatgtttaacattttttttttttgagacagggtctcactcctgctgcccaggatggagcgtag

SEQ ID NO: 47915 - DNA, 681 bp, Homo sapiens
aagtattatgaagtttttctcaaatgcctagtttggagagactatttttacaactaatttagagctttcaagtggatttaaatttgtcttgctttgaagatattttatttcatatcacgctttcagatttcttttagttttgtaaaatttcaagttgctttttcttgaattataaatttatttagtgtgttttggtttttaatcatttcatttattcattcaacccaccaacagaaatgccaagcagtgttctagataccaggagaaatcgggtgatgagacaaagtctcttacattctggtaggagaaagcagacaaataaacagacaaagaaatactgtagttttagataacagtaagtaaaataaagaaaataaaggaggttgtgataagtagggtctgagaggcaggagagcaggggatactcttaaaaataatggtcgaggacagcctctctgaggaggtgacatttgagaagagaccagaatgttcagaagcagccaataatgcaaaaaatctggtggaggagcaccctagaagagggtagttagtgtaagatcttgaagcaagacaagcttggggtgtgcaagaaacatcaagacaagcagtatgtgcagtgagccatgatcctcccactacactccagcctgggtgaaagagtgagaccctgtctccaaaaag

SEQ ID NO: 47916 - DNA, 800 bp, Homo sapiens
tagcatgagtagtacatgtttattaagggcatcatgttaggaggtgtgtgatgccagtttgttctgttattggtgatagtaactttgaccagttggttaagattgcagcttgccttttaaaaaatataggtatatttacacacagtgatttcacatgtcttttaactgtgctgttcaattgttttgaccagtgcacacacccagaagctatgtccttcggcagtaaaagttttacagcacaatatatgtgctctgctctcctcccgcaatcctgctccaagagatcttaagctggaggcaccaggtctgaattccagactcctccccaccacccacacttcacctccaactggagcatgaccacagacccattcagggaggctggcggactcttcatcctggacagtcccttactgtatgtcaagtaggtaattgccagcatgtgtgcgctcctatgtggctgcctgtggggatgcttctcagtgtagagtgggggaccctccatgccttggccaggcttcagctcctttgtagttgggtagacatgaggacagactgagctggggagatcagtggtggcgtttcatctgctcagtgccatctttgtacccctcatccctatggagattggtgtgtctaccaggtggaaccatggggtagagctatccctgccagctttcctggacctggtcacactataccactggactccgggcatcttcagccttggaacccttatgtggctctgatggcttggctttcactgccttgctgggagatctgggctcacgttgcctggt

SEQ ID NO: 47917 - DNA, 1702 bp, Homo sapiens
  misc_feature (305)..(305): n is a, c, g, or t
  misc_feature (365)..(365): n is a, c, g, or t
  misc_feature (367)..(367): n is a, c, g, or t
  misc_feature (493)..(494): n is a, c, g, or t
  misc_feature (600)..(600): n is a, c, g, or t
  misc_feature (791)..(791): n is a, c, g, or t
  misc_feature (855)..(855): n is a, c, g, or t
  misc_feature (860)..(860): n is a, c, g, or t
  misc_feature (909)..(909): n is a, c, g, or t
  misc_feature (935)..(936): n is a, c, g, or t
  misc_feature (1038)..(1038): n is a, c, g, or t
gaatgtgcaggtgtccacctgggcccatatcacatggcccacctgagaacgggtgggcgaggggtcaggagcagtgatgagcatactgatgcttatgctgtttcctgtgtatgccaagagcaacaaaatcctttgtgtctgaccataaagtctcatttcttctgccacatgaaactggcaggctaacttgttagcttgcaagtagggtaagatgtcagaccctttacagttgtttgttttttggagacagggtctcattctgctgcccagactggagtgcagtggcatggtcatggctcactgcngtctcaaacttctgggcttaagtgatccagctacctcagcctccagagcagctgggactncnggcatgcaccaccatgcctggctaattttaaaaaaattatttttgtagagatagggtcttgctatgttgacgaggttggttttgaactcctggcctcaagtgatcctcctacttctgcctgccaanntgctgggattatgggcatgagccaccatatccagccagttcttattgtttaagtaacacattcagttttctagaaatttacttatgaatttacatcaaccttcatnagtagtattggtttgtaatttttttcttccacactatcttcattagattattatggttatgctaatgctacaaggaatttgtaagttttccatctcttcctgtactgaaacagtatatacgatgtgcaaactattcctttaaaatttgcaaagacttagactgagcgtggtggctcacacttgtaatcccngcactttgggaggtggaggtgggaggatcacttgagggctgatggcttgagtccaggagttcangaccngcctgggctacacggtgaaaccctgtgtctactaaaactacaaaaattngctgagcatgctggtgtgtgcctgtnntcccagctacccgggagactgacgaaggagatcacttgaacccgggaggcagagtttgcagtgagccgagataatgccactgcactccagcctgcataacanagtgagaccctgtttaaaaaaaaaaaaaaattgcaaagactagtaaaatggttttcacttagaaactttattggaattaattattttttcaactttttttctattgacaaaagcctatccagatttactacttatcaagttaatcttagctatttatattttctcagaacataagtgaattaaaaaaacttaactgcatataaaattgtcttatcatttaagagtctctcatatctatagttataactcatttctcatttatttgtttttgtgaactctctctctctctttctgtggctctctctctcttttttctggactttccagaatttgccagaacactataatttttagtgtttgctttcattaatctttgcttttatttttgctggtttttttttggcttcaaaagctaacttcatcttttaacttcttaaatttaattcagcttaattattttatgttactcatgctctaataaagcaagcacataaatctgcttttcctactgatagttttagttctatcttgtaagatttgatatgtaatcttctaatcattattattttttgaataatctgtaatcataattgttcttttctttagtccaatagttatttatgtatatgttttctaatttacaaataaacactttcctatttta

SEQ ID NO: 47918 - DNA, 860 bp, Homo sapiens
tcctgcagtaacagaggcagcacctaccccctcacagagagtgtgggcagaataacagagaggagggagctgcggaaaaagcgtctttcaatttgtgcacatccccaagtggcctatgtgtgaaactcatcagaattaacacagcaaaagctttaagaactgagctatgctgtggaataccactcgggtttctgggtatccactggtctctgggtagcacacaggcagagcagaccaagataacgctgaatttgaaaccaaactgacattcaaactcacagaccacagaagtgagtcatgatgtgcattctgaattgaagcaggttgaatgcatgctaaagtagaaaatataaaaaggaatcagagtttcataatacccaaagtactgataatattgaatattacttgtcatgtcagaaaacagaaaaagtcaaccagaatgagaacaggcaatcaacagatgccaataccaagatggtactgatgttgggattgtctggcaaggatttttaaagcagctatcattaaaaaacaaacaaaaacacttttaacaagaaactatgaacactcaaaaaacaaaggttcaataaataaaagatacaaagaaaccccagccgggtgcggtggctcatgcctgtaatcccagcattttgggagcccaaggtgggcggatcacctgaggtcaggagtttgagaccagcctgaccaacatggagaaaccccgtctgtgctaaaaatacaaaattagctgggcgtggtggcgtgcacctgtaatcccagcttcttgggaggctgaggcaggagaatcgcttaaacccgggaggcggaggttgtggtgagtcaagattgtgccattgcac

SEQ ID NO: 47919 - DNA, 241 bp, Homo sapiens
tgggagaagaggacatatttggataggctttctggaatagaccctccagctatttctacaagacaaaattatataagactacagagagctagaagtgctttaaaacactaaataaatttacactaaacactaacttcagcttaatgctctaaactggcacttgctaaagatgaatttttctgcttactgatggatattgtagactgtcataatagtttttacaaacgaggagttagaaatc

SEQ ID NO: 47920 - DNA, 528 bp, Homo sapiens
gaaatcttggggtcatccttcctttctgtcaccttctatcttcagtcaccaagtctttctgtctgttagcagctctaaaatctgacccttccttctccttcttactgcctctgctttagtttcttactctataaaatggagataatatatcactgtgtagatgccataatacaaatagcaagctcttatggcactaataattttttaatacatgttaaccatatgaataggtcttattattattatgtccattttatggatggagaggttaagtaatgtgttcaaactgctccagctagcagctggtagagttgagggtttgaatataggctgaacatctggctcctgaatctgtcctctgcattgtactgagaaccctgtatcgtaccgaggtacgtcatctgtgttcttctgtactctcctattttgggctaaaccaggtcaaactcctatcttagtgtctttgaaatgctcaaacctcacgttgtgcacatgtaccctaggacttaaagtataattaaaaaaaaa

SEQ ID NO: 47921 - DNA, 441 bp, Homo sapiens
aaatagatgcatctgggctgtgttggaagaagatacactcaaaactgtctaaggagacagaagcccatctgtgtataaaagcccaaattgggttgctttttcttttattgttgtaaaaatccattctgttcaaatcccagctaatgaaaatgtgcatctgtaaataaaaaataaatcaagggaatgtaataatcctgcagctgctgtccacttaactttccttttaaaaaataactcaattttctggtctgaatgttcttgctatttagcaatgtgatggcaatttaagagggaaaaaataagtattgaaatctatttatgtataacaaccttgacaataaatgcagctatgcaataaatatatagtaatttgcttttgtaattgtgtggatacttgaggtccaggatctgaccccagaaatccactacctggctgcttac

SEQ ID NO: 47922 - DNA, 281 bp, Homo sapiens
ccatgaaacaatattctctgaccacaatgcagtgatgacgaaaaataactgaaaaacattccaggtgtagaaattaaaacacaccagcctggccaatgtggtgaaaacctatctctactgaaaatacaaaaatgagccgggcatggtggcgtgagcctgtaatcccagctactcaggaggctgaggcgggagaattgctggaacccaggagacagtggctgcagtgaggtgagatcgtcccactgcactccagcctgggcaacagagtgagactccgtctc

SEQ ID NO: 47923 - DNA, 1257 bp, Homo sapiens
gtattccttgtatttctagtttgattaccaaacctgatgttacaaagaaacctccgttctgtagacagaatttcttttatttttcttcttttactcctcacaatcactttcccagtgccatcaccatctataaggtctcagagcagaggattattcatggtaataagtgggggtgtggtgcagccattccagtaacacccacaagaggacagctgttctgaatgtccccacccacccctctttcagtacaggtgagacattttcagttcatgagctccagaccaaatcccaggccagcccttgcaccaaaagccttttttagaaggcttatcagtctattaggaatgtctcaggaaagatgagccatttctttggggagaaatatatttacagatggaagtgtgtgactgcgtgtctgtgtgtgtgtgtggtgtgtgtgcgcacgtgagtgcgtgtgttcatctatgtgcatttcacttccataaagacccagcccaagctgctgggaaccatgtgttcctgagtattctcagaggttaaacaagtgacaagtgagcttctgaaattagtgtctcagcaagctggctttaggaatgagccccattttatcaagcagagaaaaaaaataacagcagaaaagataaagataaaccaaaaatatataccccccaatggaaaataatgttgattcagcaattcccataggatgtattacatgctctaatttattatattattatttatctgtctttgatctttgcccattgtactcttaaaaagatgttgggatgttgattgcgatttttaaacaactagataatgtataaatcagcagtggaaatcagttttaatgtgtggatgtgtctgattattgttaaatgcctctttttttactttttttttttttagatgtataatgtttcataaaccctggcactggtcacaaagctcagctgtgaaaatgaaatttgtagtatttttaaacatgaatgtcaatttcaagtgtatttgaaatggttcctccaggagagatatttgtgcaccattaggaaaatcttctctgcagaggaagtagccttctttggagaaaatggaaaatgggttctgatatgtgatctcagagtagcccatttcctagggcaccatggaaaacacaaatgtgatctttaagtatacctcttccccagtttggggaggaaaggactcagtttgcaccctttttgtatgtaaaataaaatgtcttacctttcttggcta

SEQ ID NO: 47924 - DNA, 1475 bp, Homo sapiens
gtattccttgtatttctagtttgattaccaaacctgatgttacaaagaaacctccgttctgtagacagaatttcttttatttttcttcttttactcctcacaatcactttcccagtgccatcaccatctataaggtctcagagcagaggattattcatggtaataagtgggggtgtggtgcagccattccagtaacacccacaagaggacagctgttctgaatgtccccacccacccctctttcagtacaggtgagacattttcagttcatgagctccagaccaaatcccaggccagcccttgcaccaaaagccttttttagaaggcttatcagtctattaggaatgtctcaggaaagatgagccatttctttggggagaaatatatttacagatggaagtgtgtgactgcgtgtctgtgtgtgtgtgtggtgtgtgtgcgcacgtgagtgcgtgtgttcatctatgtgcatttcacttccataaagacccagcccaagctgctgggaaccatgtgttcctgagtattctcagaggttaaacaagtgacaagtgagcttctgaaattagtgtctcagcaagctggctttaggaatgagccccattttatcaagcagagaaaaaaaataacagcagaaaagataaagataaaccaaaaatatataccccccaatggaaaataatgttgattcagcaattcccataggatgtattacatgctctaatttattatattattatttatctgtctttgatctttgcccattgtactcttaaaaagatgttgggatgttgattgcgatttttaaacaactagataatgtataaatcagcagtggaaatcagttttaatgtgtggatgtgtctgattattgttaaatgcctctttttttactttttttttttttagatgtataatgtttcataaaccctggcactggtcacaaagctcagctgtgaaaatgaaatttgtagtatttttaaacatgaatgtcaatttcaagtgtatttgaaatggttcctccaggagagatatttgtgcaccattaggaaaatcttctctgcagaggaagtagccttctttggagaaaatggaaaatgggttctgatatgtgatctcagagtagcccatttcctagggcaccatggaaaacacaaatgtgatctttaagtatacctcttccccagtttggggaggaaaggactcagtttgcaccctttttgtatgtaaaataaaatgtcttacctttcttggctacttctgcttgtttggttggttgattggtttgtctgtttttaatctccctcggctcatttgtaattaacaatctagctaggactaactttgatgcgattcaagactcctgtgaacaaaaataatttggcattcttgtttcattccttggattaaatattgtcttctcctgtgagtcacttcaaaaataaatactgctgtctctcttcgagtgctgaaaa

SEQ ID NO: 47925 - DNA, 796 bp, Homo sapiens
actagttctagatcgcgagcggcgccctttttgtatgtaaaataaaatgtcttacctttcttggctacttctgcttgtttggttggttgattggtttgtctgtttttaatctccctcggctcatttgtaattaacaatctagctaggactaactttgatgcgattcaagactcctgtgaacaaaaaaaaaaaaaaaaaaaaaaaaaaaaaaaaagaacacaacaaaaaagaaaaacaaaaaaagaaagaaaataaacagcaaaaaacaaaaaaaaaaggaaacaaaaagaaccaaaaaaaaacaaacccataaaaacaaacaaagcaacatgaaacgaaacaacacaaacgacggcgccccgcctacgctaaacacccacctcgcagcgccggggccacacctatggaacggaacccttcttcccgtagacgccgacctccttcggcgagacactctcccaatcaaaagtgtcagcacgcccccgcgccaacatcatacacagctgtggacagggcgacaataccggcgtgtcgcatcacgtatgtacgcctagagacagctcgccctacccagatttgtcggctctcaaattcagcactcagcaacattcccgacacatctataatacacggaggccgcggatagcaaaaaacacagcaattctgtcgcgttcatgtcgatggcaccccaccaacgacctattagtcatccgggtagcagtcagatctacgtcagctttacgatcaaccatctctactcccccgccgcactatcacatcaccgagccgtagcata

SEQ ID NO: 47926 - DNA, 375 bp, Homo sapiens
aacaatccactggcccaaagaatcagccagaggccttaacactgagttccctgtcaacttgtccacagcagcagcagccgaggcccagccaacaagccactgagccacccctggctctgcctgtcccggtccctgccatcaagctgcaccccacagccaccctctgcagacaggcatttccagataccaaagccagttcctgtaattcctcggcaaactgcaaagcattttgatagctccacacacacccccactgtcacccggcaccctgagccaggagggctccctgggaggagggtcagcccgggccccctcagagaggttcgcagctggcatgtgatcaggccctggggactctgagggacccagcctggc

SEQ ID NO: 47927 - DNA, 652 bp, Homo sapiens
agtagccaaaatcccctttttagaacatattgcatgtcactgaatcttagactccattgattacaagctacaccataattttctgcatgccaaaaagaggaaaaaagaagaaactctgccagttatgtgacatgccattgattctaaaatatgttccaatttgaaagactaaaatgtggagaaaatgtgtaccttagaatagatgaaatacagcaaataagatcatgtcactctcctgctcaaaactgtccaatggcttcatatcatagtcgtaataaaattctaaattcttacatggtttataaggccgtgaatgatttagctctcccctatttctcttagaatatctttaaggaaaaatgacttgaggccaggtgtggtggcttatacctgtaatccctgcactttaggaggccaaggcaagagggttacttgatcccagaagtttgagaccagcctgggcaacatatcaagatcccatctgtaaaaaaaaaaattttaaattagctggatgtagtggtgtgcacctgtagtcccagctcctcaagaggctgaggtaggaggctcacttgagcctgggacattgaggctattgagccgtgattgtgtcactgcacttcaacctgggcaacagagaaagactgtgtctcca

SEQ ID NO: 47928 - DNA, 261 bp, Homo sapiens
ttcaggtaggcaaacctgtagggcaggttggaacctgcagagaagcctgcagtgagggtggggtctgcactgagccttctcaaagggatgtgttttacaggcttctctcatatacacaatcagggaataccttctggattcttgggtgttttgttgttgttgagacagagtctcactccacacccaggctggactgcagtggcatgatcttggctaactgcaacctctgcctcccaggttcaagcaattctcattcttcag

SEQ ID NO: 47929 - DNA, 998 bp, Homo sapiens
tgggaggtgtgcacatatgtgggtccagtgttctttacaaaggccccctgtgtggcatctgtcgtacttcttatttgttcagcatatcccttggcttgtgatggaagatacacaatctgtacctttgtctgaaggagataccagctcctgagtggccttttacatcatccttaggtggggatagttaacttaaaaaaaaaaaaaaccggcgagggagaaaaggccgtcttagccatagttggcagcccctagccctttagcctaaggaagtctacagagactacggcacttgggtgcagacttttaatgaacccatcttttgttgtttttgtccattgcactgtctgtgtgtaacacacacgtcccggttctcgcccctgatcctgatggttccaaggagcgtggatggatactttcaagaccaaccagactactacgtggcttagtgtagatatggcgataaaacacttgtgctttggaaaacgtaaaaatcccgaacttagatcttgaccagtaagtgaagaggaactgaattttaactatttgctgaaaaatctatcattttggaagcattaaaaaaaattaaactgtaaactgagtgcacacatcttaaccctaaatacatacacacatacacacaaccagccacaaaatagtgttatttccttaaatgccaaacactgtctagttctagaagtgaaaaggaccttcttgtcttttcagaagtgtgtgttttgagtatgtaatgagattacctttctgtggctttggagaattaatttcagcgctttattgtcagatcttctctgtaagaaatgtgatagggatttcccattcaatctggaactaagaattcagattgacacttgagctttgtacctcagatagcgtttttcctcatctcctgttatatatcaagcagctgagattggtttttaaaaaagtgaagattgaattgtcttcacacatttattgtgaacttgcagaaaatggaaagg

SEQ ID NO: 47930 - DNA, 481 bp, Homo sapiens
tccaaacatgcctggtgtggtggctcacacctgtaatcctagcactctgggaggctgaggcaggaagatcacttgagctcaggaattcgaggccagccctggacaacataatgagaccctgtctttacaaaaaagtcaaaaatcagctgggtgtgttggcctgagcctgtggtcccaactactcgggaggatggcttgagcccaagaggcggaggttgcagtgacccatgatcattcactgcactccagcctgggcaacacaaaaatcctgtctcaaacaaacaaaaaatctcagttcacacatgactacttctacctctactttaaggaatttttttcctccccaggtagattttggattttaattatctaagtaatatataggcttatactttagcctttgtattaggaattttctttttacatcattttctgaatcttaaacccatactgtataagttaaacaccttttgaaatgaaa

SEQ ID NO: 47931 - DNA, 372 bp, Homo sapiens
ttcttcatctctgcatggtctggtagctcagtgcctggcacttggtagacattcattaaatgaatgaatgtatgcatcagtgaatgaatgaataaacaaacaaatgaacaattctcctgtcacgcaggatctgctgaagatggcggctgtaagttcacagagcactgcctaactttggttcatattgttcctctcttctcctacctgtattttgctcacctcaataccagcccacactgttttcctggactgtgattctttcagtgatcacagagtctgtgctgcataatttaagtgtccctattccttgcagctgcttcctgtgtgctagtcatgtaaacgcccttcttaaatgattgcatccctcacaat

SEQ ID NO: 47932 - DNA, 595 bp, Homo sapiens
gagccagcagtaagcccggggcctggaggggtggcattgaggaggaggatgatgacagccatcacagagaactggacacaagtcaggcatgggcctgggaccatttattatcttctgaggcacagggtgattaggtaacttgtccaaattcacacagctaataattggcaaagttcagatttgaacccaagccttctgactttagggtcccttctgagctcaccctcttatcttacaaatgaaaattaaggctcggaatgtgagctgcctagagtggtcacagagctctttggcggcagaggtgagaatagaaggccaggtgtggtggctcacacctgtaatcccagcactttgggaggctgaggtgggagggtcacttgatcccaggagtttgagactggcttgggcaacatagcaagaccccatctctacaaaagattaagaaaattaggcctggtgatgcatgcctgcaagcccagcggctcaggaggccgaggcaggaggattgcctgagcctagaaggtgaggctacagtgagctgtgatcacgccactgtgctccagcctcggtgcaagccctgcctcaaaaaaaaaaa

SEQ ID NO: 47933 - DNA, 640 bp, Homo sapiens
gagttcaagaccagcctggccaacatggcaaaaccctgtctctactaaaaatgcaaaaattagctggaaatcgcttgaacctgggaggcgggggctgctgtgagccgaggtcattccactgcactccagcctaggcaacagagcaagtctccacctcaaaaagaaaaaaaatttaaataaataaataaacatagctacacaatgagaagactggacctagggactgggtaggatatagcagggcaaagtctccacgtgaagtccaaaccctagggcagctgcacctccccaccccactggccctccaccacacggacactgactcacagcagagccacgctcctagagacacttggggtgttaagcatctgtgggtgccacaaacattcaaatagtaaaatcaaccagggcagtcgagactggacatttctatgtcgatgtctgtttatacctgagcaaagaaatactaagtggccgtgtccctagccagatcaggagtcctggtttttctttctttttccattcccccctcaacatttgcttatgaaaaatgtcaaacatacaaaaaggttgagaggattattcagtgacatccctaaacctaccacctggttttgtttggtacggagggagggggagg

SEQ ID NO: 47934 - DNA, 329 bp, Homo sapiens
gaggagattgagacatagaaagagcaacaacttgcccaagtttatgcaggttttgaagcaaggtattctctagatccagtgcttttcacaatgctaaatccagaaggtggacgcatatatcatttggggaggggaaaacagtaatgttggaaaagtaaattaaagcttaactttgcaggcttctgaatgccaagctaagtattttgaataatttttccccaagcaatatggaatcaatgaaaactcgaccagaggaatagcttgtacaaaagagtgttttaagataattaacttaatagcagtatatggaatcatctgcgtctgaatag

SEQ ID NO: 47935 - DNA, 400 bp, Homo sapiens
ataaatgcaagaagaagaacattacaaaatcccaactatagtgcttagaaaccctttgacagcaactgatagcaactcaaatataattagtatatacaaaaaagataatttatggattcatatgtctgggagtattcctggatttctggatccaaggattcaaacaatgttcccagtttttctttttttttttttttttctttctgtccctatctctcagcttgcttgtctttcctctgcttaattcttggctgggtcagggggtcaaagaacagcttgcttaacaaccccaaggcaaatagagcttcttttctgaaaaccagcaggaaagtcacggaaaggactctcttgggaaggatggtgggggtcatgtggaatgacttactgaagaaggggatga

SEQ ID NO: 47936 - DNA, 328 bp, Homo sapiens
gttactcttcatatggctagaagagattctgaatctgtttgatacacatttgttaagggcttgggaatttggcccagtgtttccttgtttgcttgggttctcataggtttcacatccagagttgagagacccagtactgagaaacccaggtctgggtgaagagtaggttacagagatgagcaaaagagataacctctgagctccttcagtatcctcatgtgataccaatcctaagaatgagaagtttagagtagtcaagtcgtacgggatagtgatggttaaatgttatcctggcgggcagttgtgggggccaacctgagaaagctaa

SEQ ID NO: 47937 - DNA, 338 bp, Homo sapiens
ttgggacattttctccaaagaatcctaaatattctgaggaaaactggaagaacaagtaacataaaaaacaaacttgtggaaatagtttttaaattataaattgtaggccctaaataattcagaaaaaagagagcattgattaaaccccatgtttcctttctcacgtagtatgtcactgatcgtctggttcagatttctaggcccctactcaattctttcaaatttccatttgtttcttagttaaggctgttttccccctttcaggaattgattgacatgaacattttgtccactacagatgccctgtttccccaaaactaaccttcacacctccatta

SEQ ID NO: 47938 - DNA, 413 bp, Homo sapiens
agcagcatgtcagcctgccggagctttgcagttgcaatctgcattttagaaataagcatcctcacagcacagtacacgaccagttatgacccagagctaacagaaagcagtggctctgcatcacacatagactgcagaatgagcccctggagtgaatggtcacaatgcgatccttgtctcagacaaatgtttcgttcaagaagcattgaggtctttggacaatttaatgggaaaagatgcaccgacgctgtgggagacagacgacagtgtgtgcccacagagccctgtgaggatgctgaggatgactgcggaaatgactttcaatgcagtacaggcagatgcataaagatgcgacttcggtgtaatggtgacaatgactgcggatacttttcagatgaggatgattgtgaaag

SEQ ID NO: 47939 - DNA, 379 bp, Homo sapiens
atttgtataacatggtatatttgttttaatttgaatttctttaaataactgtgaaggtaaacatttatagttgtttattccccatgtatgaattatctacttgtgtcttatgttcatatatttggtgttttgaaattttatacgtgagaattagatatcccttataattgttagaaatcctttaacacatttctgcaattttttcaattatattgttatgtttacagcttattttcattataatgaattttaatatgtatcattgatgatttcttttataacctcttatattttttcaaaattcagaatactgtctctccaaatagctgcttatggacattccagaaataaagaatgtcaccacctccagaaaaaaaaa

SEQ ID NO: 47940 - DNA, 365 bp, Homo sapiens
ttcactccctgttctccaaaatgtattgagaaccttacccatcccagatgatgagagtttacaatctgtgacttctgttcttagttgatagtatttctttatgttgcccaaagtaacagattcaacaaaaaatgtactgggagatccccatgtaccaggtactgagccaagtgatctcacatacctgagctcattacatcatttatttctcataccaaccctgcgagagcagttattatccccatattatgaatgagaaaactgagcctccactatgttaaatattttgtctagttgcaaggcaggatgcaaggctaagctttggctttctttgggatgtaccttaacgaggtaatcaattggtc

SEQ ID NO: 47941 - DNA, 419 bp, Homo sapiens
agagtgggtggggagttccaaatcctgtgtgtttagcttcaaggcccacgctgcttccttgaccacaggttgtcagatcaagtgagaaaatgaatgtagcacactgtagaagtcaagtattagaattcttcgctgggcgcgatggcttatgcctgtaatcctgcactttgggaggctgaggcaggtggatcacctgaggtcaggagttcgagaccagactgatcaacatggtgaaaccccggtctctactaaaaatacaaaattagccaggagtggtggtgggcgcctgtaatcaatcccagctactcaggaggctgaggcaggagaattgcttgaaccagggaggcagaggttgcaatgagccaagattgtgccattgcactccaccctgagcaatgagagcgaaacttcatctcaaa

SEQ ID NO: 47942 - DNA, 447 bp, Homo sapiens
ttttgtagcctgggaagccatgcatgcagaatggcagaacttacaattgcctacaaaaggagagtacaatgcaacctgtggagccacgccaccaagagaaggtgacagttccgggccttcaaaacaccctaaactggtgaggagtttcagaatgaaacttgttatgatttgaaacactcatcaaagtgaggctttttcaagtaacagttaagacataattaccaaattttacaacggtcccgttagtgtgctgtgagaaaaaaaaggagaatggaagaaaaccttccaagtttatatgtttatggatgtaatagatggatgtggcactttcagagccaggaagagtggctcaggacaagatgagaagagcttccacagccttaaacacagcccttttccaaagtgacttcccttcacacccatccacccccctccaaaaaaaaaaaa

SEQ ID NO: 47943 - DNA, 560 bp, Homo sapiens
gcctgtgaacccttagccaggctggtaatactctggaatgacaagaaaatgcaccttcttagggctgtggttaaattaaacagtaacatatgcaaagctgagcatataagagaagaagcacttctggagaagttgtcaatggacaacgaagatcactgaagctaggaggctggcaacatgctgctggggacgagaccctgggcagatgctgccagaactcagaatgctctgtcctcagagattcacaagcctgagtggggcctgtttctcatttccagtccccaggtgtggtttcgagaagaggcttcaggaagggaaagctgaccagggagatggtttctgaaaggatgtgtctttctggaccagaggaaacaagccacaagctgggtggaagacaagccatacgcctgctttaataaacatccctgaggatgcagagatgaatgagacacgatgtggcactgtcctcaaggtgctctcgaatcggtgttgggggaatgtggtgaaaagaaaagaaagagggaagtcagagacacaggcggctcacacaggaggaggag

SEQ ID NO: 47944 - DNA, 257 bp, Homo sapiens
tcagcaagaagaaagatgagaaaactgtaatagtaaaggcatatgtctcagtatgtgtttgtgtatatagttatctgctttctgtggctgggaaggtcatactactgaatcctatgacagtttatcacaatgagagagctatataaaggattacaaagaattagtgaaaatgtagcattttgttgctttttaaatagaacattttctgaaagtgtgtgtgctgtgttattcactttaaagatggtatccatttttaa

SEQ ID NO: 47945 - DNA, 5895 bp, Homo sapiens
  misc_feature (898)..(898): n is a, c, g, or t
gctgtgcagctgaggcgccgccgtggagccgccttggagccaccgcccccgatcgccttcgccgctgcgttggggaacctggaccgcgcggcgccgggtttccctcatgatcccgggcgggtggcggcggcggcagaggcggcgggaggatgacctcttaccgggagcggagtgccgacctggcccgtttctacactgtcaccgagccccagcgacacccgaggggctacacagtatataaggtcaccgcccgggttgtttcacgaagaaatccagaggatgtccaggagataattgtatggaagagatacagtgattttaagaaactacacaaagaactatggcaaattcacaaaaacttattccgacattcagagttgtttcctccatttgctaaaggaatagtgtttgggcgatttgatgaaactgttatcgaagagagaagacaatgtgctgaagacctgctacagttctctgccaatattcctgctctttacaatagtaaacagcttgaagactttttcaagggtggaataattaatgatagttctgaattaattggtcctgctgaagctcactcagattccctcattgatacctttcctgagtgtagtacggaaggcttctccagtgacagtgatctggtatctcttactgttgatgtggattctcttgctgagttagatgatggaatggcttccaatcaaaattctcccattagaacttttggtctcaatctttcttcggattcttcagcactaggggctgttgcttctgacagtgaacagagcaaaacagaagaagaacgggaaagtcgtagcctctttcctggcagtttaaagccgaagcttggcaagagagattatttggagaaagcaggagaattaataaagctggntttaaaaaaggaagaagaagacgactatgaagctgcttctgatttttataggaagggagttgatttactcctagaaggtgttcaaggagagtcaagccctacccgtcgagaagctgtgaagagaagaacagccgagtacctcatgcgggcagaaagtatctctagtctttatgggaaacctcagcttgatgatgtatctcagcctccaggatcactaagttcaaggcccctttggaacctaaggagccctgccgaggagctgaaggccttcagagtccttggggtgattgacaaggttttacttgtaatggacacaaggacagaacagactttcattttaaaaggtctaaggaaaagcagtgaatacagcaggaacagaaagaccatcatcccccgctgtgtgcccaacatggtgtgtctgcataagtacatcatctctgaggagtcagtatttcttgtgctgcagcatgcggaaggtggcaaactgtggtcatatatcagtaaatttctaaacagaagtcctgaagaaagctttgacatcaaggaagtgaaaaaacctacacttgcaaaagttcacctgcagcagccaacttctagtcctcaggacagcagtagctttgaatccagaggaagtgatggtggaagcatgcttaaagctctgcctttgaagagtagtcttactccaagttctcaagatgacagcaaccaggaagatgatggccaagatagctctccaaagtggccagattctggttcaagttcagaagaagaatgtactactagttatttaacattatgcaatgaatatgggcaagaaaagattgaaccagggtctttgaatgaggagcccttcatgaagactgaagggaatggtgttgatacaaaagctattaaaagcttcccagcacaccttgctgctgacagtgacagccccagcacacagctgagagctcacgagctgaagttcttccccaacgatgacccagaagcagttagttctccaagaacatcagattccctcagtagatcaaaaaatagccccatggaattctttaggatagacagtaaggatagcgcaagtgaactcctgggacttgactttggagaaaaattgtatagtctaaaatcagaacctttgaaaccattctttactcttccagatggagacagtgcttctaggagttttaatactagtgaaagcaaggtagagtttaaagctcaggacaccattagcaggggctcagatgactcagtgccagttatttcatttaaagatgctgcttttgatgatgtcagtggtactgatgaaggaagacctgatcttcttgtaaatttacctggtgaattggagtcaacaagagaagctgcagcaatgggacctactaagtttacacaaactaatatagggataatagaaaataaactcttggaagcccctgatgttttatgcctcaggcttagtactgaacaatgccaagcacatgaggagaaaggcatagaggaactgagtgatccctctgggcccaaatcctatagtataacagagaaacactatgcacaggaggatcccaggatgttatttgtagcagctgttgatcatagtagttcaggagatatgtctttgttacccagctcagatcctaagtttcaaggacttggagtggttgagtcagcagtaactgcaaacaacacagaagaaagcttattccgtatttgtagtccactctcaggtgctaatgaatatattgcaagcacagacactttaaaaacagaagaagtattgctgtttacagatcagactgatgatttggctaaagaggaaccaacttctttattccagagagactctgagactaagggtgaaagtggtttagtgctagaaggagacaaggaaatacatcagatttttgaggaccttgataaaaaattagcactagcctccaggttttacatcccagagggctgcattcaaagatgggcagctgaaatggtggtagcccttgatgctttacatagagagggaattgtgtgccgcgatttgaacccaaacaacatcttattgaatgatagaggacacattcagctaacgtattttagcaggtggagtgaggttgaagattcctgtgacagcgatgccatagagagaatgtactgtgccccagaggttggagcaatcactgaagaaactgaagcctgtgattggtggagtttgggtgctgtcctctttgaacttctcactggcaagactctggttgaatgccatccagcaggaataaatactcacactactttgaacatgccagaatgtgtctctgaagaggctcgctcactcattcaacagctcttgcagttcaatcctctggaacgacttggtgctggagttgctggtgttgaagatatcaaatctcatccattttttacccctgtggattgggcagaactgatgagatgaacgtaatgcagggttatcttcacacattctgatcttctctgtgacaggcatctccagcactgaggcacctctgactcacagttacttatggagcaccaaagcatttggataaagaccgttataggaaatgggggggaaatggctaaaagagaacaattcgtttacaattacaagatattagctaattgtgccaggggctgttatatacatatatacacaaccaaggtgtgatctgaatttaatccacatttggtgttgcagatgagttgtaaagccaactgaaagagttccttcaagaagttcctctgataggaagctagaagtgtagaatgaagttttacttgacagaaggacctttacatggcagctaacagtgctttttgctgaccaggattggtttatatgattaaattaatatttgcttaataatacactaaaagtatatgaacaatgtcatcaatgaaacttaaaagcgagaaaaaagaatatacacataatttctgacggaaaacctgtaccctgatgctgtataatgtatgttgaatgtggtcccagattatttctgtaagaagacactccatgttgtcagctttgtactctttgttgatactgcttatttagagaagggttcatataaacactcactctgtgtcttcaacagcatctttctttccccatctttctattttctgcaccctctgcttgttccctcatattctgttcttccgactcctgctaacacacatgcaacaaaaaagggaagggagtgcttatttccctttgtgtaaggactaagaaatcatgatatcaaataaacatggtgaaacattagatctcttcttcatttaataaccctcccccctttttttccttgaagaaatgcgtctgttcctttccttgtgaaatattatcagtttctaccattgcttctcatgcttgactttgttttactttttggcttggtatactaagaagcaaaggatctcatctaaatggaattgaatggcagtcctagtttgttacttatggtgatgagattttcagatttgaactaatctatttgacgtgatttagaaagaatgtaagtattcacacatctccaaacatttgtatttgttacttctttttgttgctaaggtagctcctgtagttatgcattgtgtgcaaaaatttacaaatgttttaaaagtgttaacatctgtttttttttaaacgttagccaaagaagaagtcactatttccaagttagaaaccaccagaaataattgaaatttttgatatgttctaatcttctttgcatttttgagatctgtgtgagagcccaaccccactccaggagcatctgtacagcttccatctgccatcgaccaggtcctctcatcaaattaaatggaacagaaaatgctctagtgaaacaaaggaaatgtgcaagcatttttcctttttctattattctatttccctttttcctttttggcccccttataatccaaaccccagctgaaaggctgcaacaacaccaggttggggagcaggtcaccaggatcatagttcagtcaaaatgacatcactccctggaactagatttcaactcactagtcccctggcctcataacaggaacttatgcaggtgagacacaagaatgacttcctgtgtaggactagtaggaaatctgcaagtacttagagctggccattacagaacttccttccagaagtgccctgtgacatgaaagtaggacttcacaactaaggtgaagatccctgccctaccacatgatttgagtctcttggattcaaaggacattaatgtcaacagatggttgccatgtcagtctgttgacacaattccattgcttcagtttctccccttttctctctatatgtttggttggagcttgtgcctaatgtaaatacatcattcataattagaatggacattaattattttagtaataaacacaggataaatagctttggggtgatgaaccagagtctgtttttattttatggtgtgtacatattttaagctgtacttctgtgaatggtactgatttttgtggttgttttttttttatattttgtttgtttaagcagaagagtggaatatggggtcaaaatcataaaagaagttgccatgagtgtttctcatttgatttttttatcgtaaaatatacataacataaaattcaccattttatccgttttaaaatatacacttcagtagtggcattaagtacatttttgtgcgacatcaccactatccatctccaggactttttcggcacctcaaatggaaactctgtacccactaaacaataactcctccccattccacactccagctcctagcaaccactattccactttctgtctctatgaatttgactgtgactgttctaagtacttcatataagcagaatcatacaatatttgttttttgtccttatttcacttagcaaaaagttttcaaggttcgtccatgctgtagcatttatcagaatttcctcccttttaaggctgaataatattccatcatatgtat

SEQ ID NO: 47946 - DNA, 5842 bp, Homo sapiens
  misc_feature (845)..(845): n is a, c, g, or t
gctgtgcagctgaggcgccgccgtggagccgccttggagccaccgcccccgatcgccttcgccgctgcgttggggaacctggaccgcgcggcgccgggtttccctcatgatcccgggcgggtggcggcggcggcagaggcggcgggaggatgacctcttaccgggagcggagtgccgacctggcccgtttctacactgtcaccgagccccagcgacacccgaggggctacacagtatataaggtcaccgcccgggttgtttcacgaagaaatccagaggatgtccaggagataattgtatggaagagatacagtgattttaagaaactacacaaagaactatggcaaattcacaaaaaggcgatttgatgaaactgttatcgaagagagaagacaatgtgctgaagacctgctacagttctctgccaatattcctgctctttacaatagtaaacagcttgaagactttttcaagggtggaataattaatgatagttctgaattaattggtcctgctgaagctcactcagattccctcattgatacctttcctgagtgtagtacggaaggcttctccagtgacagtgatctggtatctcttactgttgatgtggattctcttgctgagttagatgatggaatggcttccaatcaaaattctcccattagaacttttggtctcaatctttcttcggattcttcagcactaggggctgttgcttctgacagtgaacagagcaaaacagaagaagaacgggaaagtcgtagcctctttcctggcagtttaaagccgaagcttggcaagagagattatttggagaaagcaggagaattaataaagctggntttaaaaaaggaagaagaagacgactatgaagctgcttctgatttttataggaagggagttgatttactcctagaaggtgttcaaggagagtcaagccctacccgtcgagaagctgtgaagagaagaacagccgagtacctcatgcgggcagaaagtatctctagtctttatgggaaacctcagcttgatgatgtatctcagcctccaggatcactaagttcaaggcccctttggaacctaaggagccctgccgaggagctgaaggccttcagagtccttggggtgattgacaaggttttacttgtaatggacacaaggacagaacagactttcattttaaaaggtctaaggaaaagcagtgaatacagcaggaacagaaagaccatcatcccccgctgtgtgcccaacatggtgtgtctgcataagtacatcatctctgaggagtcagtatttcttgtgctgcagcatgcggaaggtggcaaactgtggtcatatatcagtaaatttctaaacagaagtcctgaagaaagctttgacatcaaggaagtgaaaaaacctacacttgcaaaagttcacctgcagcagccaacttctagtcctcaggacagcagtagctttgaatccagaggaagtgatggtggaagcatgcttaaagctctgcctttgaagagtagtcttactccaagttctcaagatgacagcaaccaggaagatgatggccaagatagctctccaaagtggccagattctggttcaagttcagaagaagaatgtactactagttatttaacattatgcaatgaatatgggcaagaaaagattgaaccagggtctttgaatgaggagcccttcatgaagactgaagggaatggtgttgatacaaaagctattaaaagcttcccagcacaccttgctgctgacagtgacagccccagcacacagctgagagctcacgagctgaagttcttccccaacgatgacccagaagcagttagttctccaagaacatcagattccctcagtagatcaaaaaatagccccatggaattctttaggatagacagtaaggatagcgcaagtgaactcctgggacttgactttggagaaaaattgtatagtctaaaatcagaacctttgaaaccattctttactcttccagatggagacagtgcttctaggagttttaatactagtgaaagcaaggtagagtttaaagctcaggacaccattagcaggggctcagatgactcagtgccagttatttcatttaaagatgctgcttttgatgatgtcagtggtactgatgaaggaagacctgatcttcttgtaaatttacctggtgaattggagtcaacaagagaagctgcagcaatgggacctactaagtttacacaaactaatatagggataatagaaaataaactcttggaagcccctgatgttttatgcctcaggcttagtactgaacaatgccaagcacatgaggagaaaggcatagaggaactgagtgatccctctgggcccaaatcctatagtataacagagaaacactatgcacaggaggatcccaggatgttatttgtagcagctgttgatcatagtagttcaggagatatgtctttgttacccagctcagatcctaagtttcaaggacttggagtggttgagtcagcagtaactgcaaacaacacagaagaaagcttattccgtatttgtagtccactctcaggtgctaatgaatatattgcaagcacagacactttaaaaacagaagaagtattgctgtttacagatcagactgatgatttggctaaagaggaaccaacttctttattccagagagactctgagactaagggtgaaagtggtttagtgctagaaggagacaaggaaatacatcagatttttgaggaccttgataaaaaattagcactagcctccaggttttacatcccagagggctgcattcaaagatgggcagctgaaatggtggtagcccttgatgctttacatagagagggaattgtgtgccgcgatttgaacccaaacaacatcttattgaatgatagaggacacattcagctaacgtattttagcaggtggagtgaggttgaagattcctgtgacagcgatgccatagagagaatgtactgtgccccagaggttggagcaatcactgaagaaactgaagcctgtgattggtggagtttgggtgctgtcctctttgaacttctcactggcaagactctggttgaatgccatccagcaggaataaatactcacactactttgaacatgccagaatgtgtctctgaagaggctcgctcactcattcaacagctcttgcagttcaatcctctggaacgacttggtgctggagttgctggtgttgaagatatcaaatctcatccattttttacccctgtggattgggcagaactgatgagatgaacgtaatgcagggttatcttcacacattctgatcttctctgtgacaggcatctccagcactgaggcacctctgactcacagttacttatggagcaccaaagcatttggataaagaccgttataggaaatgggggggaaatggctaaaagagaacaattcgtttacaattacaagatattagctaattgtgccaggggctgttatatacatatatacacaaccaaggtgtgatctgaatttaatccacatttggtgttgcagatgagttgtaaagccaactgaaagagttccttcaagaagttcctctgataggaagctagaagtgtagaatgaagttttacttgacagaaggacctttacatggcagctaacagtgctttttgctgaccaggattggtttatatgattaaattaatatttgcttaataatacactaaaagtatatgaacaatgtcatcaatgaaacttaaaagcgagaaaaaagaatatacacataatttctgacggaaaacctgtaccctgatgctgtataatgtatgttgaatgtggtcccagattatttctgtaagaagacactccatgttgtcagctttgtactctttgttgatactgcttatttagagaagggttcatataaacactcactctgtgtcttcaacagcatctttctttccccatctttctattttctgcaccctctgcttgttccctcatattctgttcttccgactcctgctaacacacatgcaacaaaaaagggaagggagtgcttatttccctttgtgtaaggactaagaaatcatgatatcaaataaacatggtgaaacattagatctcttcttcatttaataaccctcccccctttttttccttgaagaaatgcgtctgttcctttccttgtgaaatattatcagtttctaccattgcttctcatgcttgactttgttttactttttggcttggtatactaagaagcaaaggatctcatctaaatggaattgaatggcagtcctagtttgttacttatggtgatgagattttcagatttgaactaatctatttgacgtgatttagaaagaatgtaagtattcacacatctccaaacatttgtatttgttacttctttttgttgctaaggtagctcctgtagttatgcattgtgtgcaaaaatttacaaatgttttaaaagtgttaacatctgtttttttttaaacgttagccaaagaagaagtcactatttccaagttagaaaccaccagaaataattgaaatttttgatatgttctaatcttctttgcatttttgagatctgtgtgagagcccaaccccactccaggagcatctgtacagcttccatctgccatcgaccaggtcctctcatcaaattaaatggaacagaaaatgctctagtgaaacaaaggaaatgtgcaagcatttttcctttttctattattctatttccctttttcctttttggcccccttataatccaaaccccagctgaaaggctgcaacaacaccaggttggggagcaggtcaccaggatcatagttcagtcaaaatgacatcactccctggaactagatttcaactcactagtcccctggcctcataacaggaacttatgcaggtgagacacaagaatgacttcctgtgtaggactagtaggaaatctgcaagtacttagagctggccattacagaacttccttccagaagtgccctgtgacatgaaagtaggacttcacaactaaggtgaagatccctgccctaccacatgatttgagtctcttggattcaaaggacattaatgtcaacagatggttgccatgtcagtctgttgacacaattccattgcttcagtttctccccttttctctctatatgtttggttggagcttgtgcctaatgtaaatacatcattcataattagaatggacattaattattttagtaataaacacaggataaatagctttggggtgatgaaccagagtctgtttttattttatggtgtgtacatattttaagctgtacttctgtgaatggtactgatttttgtggttgttttttttttatattttgtttgtttaagcagaagagtggaatatggggtcaaaatcataaaagaagttgccatgagtgtttctcatttgatttttttatcgtaaaatatacataacataaaattcaccattttatccgttttaaaatatacacttcagtagtggcattaagtacatttttgtgcgacatcaccactatccatctccaggactttttcggcacctcaaatggaaactctgtacccactaaacaataactcctccccattccacactccagctcctagcaaccactattccactttctgtctctatgaatttgactgtgactgttctaagtacttcatataagcagaatcatacaatatttgttttttgtccttatttcacttagcaaaaagttttcaaggttcgtccatgctgtagcatttatcagaatttcctcccttttaaggctgaataatattccatcatatgtat

SEQ ID NO: 47947 - DNA, 4226 bp, Homo sapiens
  misc_feature (898)..(898): n is a, c, g, or t
  misc_feature (4182)..(4186): n is a, c, g, or t
gctgtgcagctgaggcgccgccgtggagccgccttggagccaccgcccccgatcgccttcgccgctgcgttggggaacctggaccgcgcggcgccgggtttccctcatgatcccgggcgggtggcggcggcggcagaggcggcgggaggatgacctcttaccgggagcggagtgccgacctggcccgtttctacactgtcaccgagccccagcgacacccgaggggctacacagtatataaggtcaccgcccgggttgtttcacgaagaaatccagaggatgtccaggagataattgtatggaagagatacagtgattttaagaaactacacaaagaactatggcaaattcacaaaaacttattccgacattcagagttgtttcctccatttgctaaaggaatagtgtttgggcgatttgatgaaactgttatcgaagagagaagacaatgtgctgaagacctgctacagttctctgccaatattcctgctctttacaatagtaaacagcttgaagactttttcaagggtggaataattaatgatagttctgaattaattggtcctgctgaagctcactcagattccctcattgatacctttcctgagtgtagtacggaaggcttctccagtgacagtgatctggtatctcttactgttgatgtggattctcttgctgagttagatgatggaatggcttccaatcaaaattctcccattagaacttttggtctcaatctttcttcggattcttcagcactaggggctgttgcttctgacagtgaacagagcaaaacagaagaagaacgggaaagtcgtagcctctttcctggcagtttaaagccgaagcttggcaagagagattatttggagaaagcaggagaattaataaagctggntttaaaaaaggaagaagaagacgactatgaagctgcttctgatttttataggaagggagttgatttactcctagaaggtgttcaaggagagtcaagccctacccgtcgagaagctgtgaagagaagaacagccgagtacctcatgcgggcagaaagtatctctagtctttatgggaaacctcagcttgatgatgtatctcagcctccaggatcactaagttcaaggcccctttggaacctaaggagccctgccgaggagctgaaggccttcagagtccttggggtgattgacaaggttttacttgtaatggacacaaggacagaacagactttcattttaaaaggtctaaggaaaagcagtgaatacagcaggaacagaaagaccatcatcccccgctgtgtgcccaacatggtgtgtctgcataagtacatcatctctgaggagtcagtatttcttgtgctgcagcatgcggaaggtggcaaactgtggtcatatatcagtaaatttctaaacagaagtcctgaagaaagctttgacatcaaggaagtgaaaaaacctacacttgcaaaagttcacctgcagcagccaacttctagtcctcaggacagcagtagctttgaatccagaggaagtgatggtggaagcatgcttaaagctctgcctttgaagagtagtcttactccaagttctcaagatgacagcaaccaggaagatgatggccaagatagctctccaaagtggccagattctggttcaagttcagaagaagaatgtactactagttatttaacattatgcaatgaatatgggcaagaaaagattgaaccagggtctttgaatgaggagcccttcatgaagactgaagggaatggtgttgatacaaaagctattaaaagcttcccagcacaccttgctgctgacagtgacagccccagcacacagctgagagctcacgagctgaagttcttccccaacgatgacccagaagcagttagttctccaagaacatcagattccctcagtagatcaaaaaatagccccatggaattctttaggatagacagtaaggatagcgcaagtgaactcctgggacttgactttggagaaaaattgtatagtctaaaatcagaacctttgaaaccattctttactcttccagatggagacagtgcttctaggagttttaatactagtgaaagcaaggtagagtttaaagctcaggacaccattagcaggggctcagatgactcagtgccagttatttcatttaaagatgctgcttttgatgatgtcagtggtactgatgaaggaagacctgatcttcttgtaaatttacctggtgaattggagtcaacaagagaagctgcagcaatgggacctactaagtttacacaaactaatatagggataatagaaaataaactcttggaagcccctgatgttttatgcctcaggcttagtactgaacaatgccaagcacatgaggagaaaggcatagaggaactgagtgatccctctgggcccaaatcctatagtataacagagaaacactatgcacaggaggatcccaggatgttatttgtagcagctgttgatcatagtagttcaggagatatgtctttgttacccagctcagatcctaagtttcaaggacttggagtggttgagtcagcagtaactgcaaacaacacagaagaaagcttattccgtatttgtagtccactctcaggtgctaatgaatatattgcaagcacagacactttaaaaacagaagaagtattgctgtttacagatcagactgatgatttggctaaagaggaaccaacttctttattccagagagactctgagactaagggtgaaagtggtttagtgctagaaggagacaaggaaatacatcagatttttgaggaccttgataaaaaattagcactagcctccaggttttacatcccagagggctgcattcaaagatgggcagctgaaatggtggtagcccttgatgctttacatagagagggaattgtgtgccgcgatttgaacccaaacaacatcttattgaatgatagaggacacattcagctaacgtattttagcaggtggagtgaggttgaagattcctgtgacagcgatgccatagagagaatgtactgtgccccagaggttggagcaatcactgaagaaactgaagcctgtgattggtggagtttgggtgctgtcctctttgaacttctcactggcaagactctggttgaatgccatccagcaggaataaatactcacactactttgaacatgccagaatgtgtctctgaagaggctcgctcactcattcaacagctcttgcagttcaatcctctggaacgacttggtgctggagttgctggtgttgaagatatcaaatctcatccattttttacccctgtggattgggcagaactgatgagatgaacgtaatgcagggttatcttcacacattctgatcttctctgtgacaggcatctccagcactgaggcacctctgactcacagttacttatggagcaccaaagcatttggataaagaccgttataggaaatgggggggaaatggctaaaagagaacaattcgtttacaattacaagatattagctaattgtgccaggggctgttatatacatatatacacaaccaaggtgtgatctgaatttaatccacatttggtgttgcagatgagttgtaaagccaactgaaagagttccttcaagaagttcctctgataggaagctagaagtgtagaatgaagttttacttgacagaaggacctttacatggcagctaacagtgctttttgctgaccaggattggtttatatgattaaattaatatttgcttaataatacactaaaagtatatgaacaatgtcatcaatgaaacttaaaagcgagaaaaaagaatatacacataatttctgacggaaaacctgtaccctgatgctgtataatgtatgttgaatgtggtcccagattatttctgtaagaagacactccatgttgtcagctttgtactctttgttgatactgcttatttagagaagggttcatataaacactcactctgtgtcttcaacagcatctttctttccccatctttctattttctgcaccctctgcttgttccctcatattctgttcttccgactcctgctaacacacatgcaacaaaaaagggaagggagtgcttatttccctttgtgtaaggactaagaaatcatgatatcaaataaacatggatgcgaaaggnnnnnccctctcctctcacccccttaaccataaggctacgcctat

SEQ ID NO: 47948 - DNA, 2873 bp, Homo sapiens
gctagctggactgactctcttaatctccaccgctacacaggttggagcaatcactgaagaaactgaagcctgtgattggtggagtttgggtgctgtcctctttgaacttctcactggcaagactctggttgaatgccatccagcaggaataaatactcacactactttgaacatgccagaatgtgtctctgaagaggctcgctcactcattcaacagctcttgcagttcaatcctctggaacgacttggtgctggagttgctggtgttgaagatatcaaatctcatccattttttacccctgtggattgggcagaactgatgagatgaacgtaatgcagggttatcttcacacattctgatcttctctgtgacaggcatctccagcactgaggcacctctgactcacagttacttatggagcaccaaagcatttggataaagaccgttataggaaatgggggggaaatggctaaaagagaacaattcgtttacaattacaagatattagctaattgtgccaggggctgttatatacatatatacacaaccaaggtgtgatctgaatttaatccacatttggtgttgcagatgagttgtaaagccaactgaaagagttccttcaagaagttcctctgataggaagctagaagtgtagaatgaagttttacttgacagaaggacctttacatggcagctaacagtgctttttgctgaccaggattggtttatatgattaaattaatatttgcttaataatacactaaaagtatatgaacaatgtcatcaatgaaacttaaaagcgagaaaaaagaatatacacataatttctgacggaaaacctgtaccctgatgctgtataatgtatgttgaatgtggtcccagattatttctgtaagaagacactccatgttgtcagctttgtactctttgttgatactgcttatttagagaagggttcatataaacactcactctgtgtcttcaacagcatctttctttccccatctttctattttctgcaccctctgcttgttccctcatattctgttcttccgactcctgctaacacacatgcaacaaaaaagggaagggagtgcttatttccctttgtgtaaggactaagaaatcatgatatcaaataaacatggtgaaacattagatctcttcttcatttaataaccctcccccctttttttccttgaagaaatgcgtctgttcctttccttgtgaaatattatcagtttctaccattgcttctcatgcttgactttgttttactttttggcttggtatactaagaagcaaaggatctcatctaaatggaattgaatggcagtcctagtttgttacttatggtgatgagattttcagatttgaactaatctatttgacgtgatttagaaagaatgtaagtattcacacatctccaaacatttgtatttgttacttctttttgttgctaaggtagctcctgtagttatgcattgtgtgcaaaaatttacaaatgttttaaaagtgttaacatctgtttttttttaaacgttagccaaagaagaagtcactatttccaagttagaaaccaccagaaataattgaaatttttgatatgttctaatcttctttgcatttttgagatctgtgtgagagcccaaccccactccaggagcatctgtacagcttccatctgccatcgaccaggtcctctcatcaaattaaatggaacagaaaatgctctagtgaaacaaaggaaatgtgcaagcatttttcctttttctattattctatttccctttttcctttttggcccccttataatccaaaccccagctgaaaggctgcaacaacaccaggttggggagcaggtcaccaggatcatagttcagtcaaaatgacatcactccctggaactagatttcaactcactagtcccctggcctcataacaggaacttatgcaggtgagacacaagaatgacttcctgtgtaggactagtaggaaatctgcaagtacttagagctggccattacagaacttccttccagaagtgccctgtgacatgaaagtaggacttcacaactaaggtgaagatccctgccctaccacatgatttgagtctcttggattcaaaggacattaatgtcaacagatggttgccatgtcagtctgttgacacaattccattgcttcagtttctccccttttctctctatatgtttggttggagcttgtgcctaatgtaaatacatcattcataattagaatggacattaattattttagtaataaacacaggataaatagctttggggtgatgaaccagagtctgtttttattttatggtgtgtacatattttaagctgtacttctgtgaatggtactgatttttgtggttgttttttttttatattttgtttgtttaagcagaagagtggaatatggggtcaaaatcataaaagaagttgccatgagtgtttctcatttgatttttttatcgtaaaatatacataacataaaattcaccattttatccgttttaaaatatacacttcagtagtggcattaagtacatttttgtgcgacatcaccactatccatctccaggactttttcggcacctcaaatggaaactctgtacccactaaacaataactcctccccattccacactccagctcctagcaaccactattccactttctgtctctatgaatttgactgtgactgttctaagtacttcatataagcagaatcatacaatatttgttttttgtccttatttcacttagcaaaaagttttcaaggttcgtccatgctgtagcatttatcagaatttcctcccttttaaggctgaataatattccatcatatgtat

SEQ ID NO: 47949 - DNA, 2103 bp, Homo sapiens
gctcggtacccccctatttccggtgtcccttaaaaaaaaaagaatatacacataatttctgacggaaaacctgtaccctgatgctgtataatgtatgttgaatgtggtcccagattatttctgtaagaagacactccatgttgtcagctttgtactctttgttgatactgcttatttagagaagggttcatataaacactcactctgtgtcttcaacagcatctttctttccccatctttctattttctgcaccctctgcttgttccctcatattctgttcttccgactcctgctaacacacatgcaacaaaaaagggaagggagtgcttatttccctttgtgtaaggactaagaaatcatgatatcaaataaacatggtgaaacattagatctcttcttcatttaataaccctcccccctttttttccttgaagaaatgcgtctgttcctttccttgtgaaatattatcagtttctaccattgcttctcatgcttgactttgttttactttttggcttggtatactaagaagcaaaggatctcatctaaatggaattgaatggcagtcctagtttgttacttatggtgatgagattttcagatttgaactaatctatttgacgtgatttagaaagaatgtaagtattcacacatctccaaacatttgtatttgttacttctttttgttgctaaggtagctcctgtagttatgcattgtgtgcaaaaatttacaaatgttttaaaagtgttaacatctgtttttttttaaacgttagccaaagaagaagtcactatttccaagttagaaaccaccagaaataattgaaatttttgatatgttctaatcttctttgcatttttgagatctgtgtgagagcccaaccccactccaggagcatctgtacagcttccatctgccatcgaccaggtcctctcatcaaattaaatggaacagaaaatgctctagtgaaacaaaggaaatgtgcaagcatttttcctttttctattattctatttccctttttcctttttggcccccttataatccaaaccccagctgaaaggctgcaacaacaccaggttggggagcaggtcaccaggatcatagttcagtcaaaatgacatcactccctggaactagatttcaactcactagtcccctggcctcataacaggaacttatgcaggtgagacacaagaatgacttcctgtgtaggactagtaggaaatctgcaagtacttagagctggccattacagaacttccttccagaagtgccctgtgacatgaaagtaggacttcacaactaaggtgaagatccctgccctaccacatgatttgagtctcttggattcaaaggacattaatgtcaacagatggttgccatgtcagtctgttgacacaattccattgcttcagtttctccccttttctctctatatgtttggttggagcttgtgcctaatgtaaatacatcattcataattagaatggacattaattattttagtaataaacacaggataaatagctttggggtgatgaaccagagtctgtttttattttatggtgtgtacatattttaagctgtacttctgtgaatggtactgatttttgtggttgttttttttttatattttgtttgtttaagcagaagagtggaatatggggtcaaaatcataaaagaagttgccatgagtgtttctcatttgatttttttatcgtaaaatatacataacataaaattcaccattttatccgttttaaaatatacacttcagtagtggcattaagtacatttttgtgcgacatcaccactatccatctccaggactttttcggcacctcaaatggaaactctgtacccactaaacaataactcctccccattccacactccagctcctagcaaccactattccactttctgtctctatgaatttgactgtgactgttctaagtacttcatataagcagaatcatacaatatttgttttttgtccttatttcacttagcaaaaagttttcaaggttcgtccatgctgtagcatttatcagaatttcctcccttttaaggctgaataatattccatcatatgtat

SEQ ID NO: 47950 - DNA, 1952 bp, Homo sapiens
tcagccggtaccagatttcacggcagagagaagggttcatataaacactcactctgtgtcttcaacagcatctttctttccccatctttctattttctgcaccctctgcttgttccctcatattctgttcttccgactcctgctaacacacatgcaacaaaaaagggaagggagtgcttatttccctttgtgtaaggactaagaaatcatgatatcaaataaacatggtgaaacattagatctcttcttcatttaataaccctcccccctttttttccttgaagaaatgcgtctgttcctttccttgtgaaatattatcagtttctaccattgcttctcatgcttgactttgttttactttttggcttggtatactaagaagcaaaggatctcatctaaatggaattgaatggcagtcctagtttgttacttatggtgatgagattttcagatttgaactaatctatttgacgtgatttagaaagaatgtaagtattcacacatctccaaacatttgtatttgttacttctttttgttgctaaggtagctcctgtagttatgcattgtgtgcaaaaatttacaaatgttttaaaagtgttaacatctgtttttttttaaacgttagccaaagaagaagtcactatttccaagttagaaaccaccagaaataattgaaatttttgatatgttctaatcttctttgcatttttgagatctgtgtgagagcccaaccccactccaggagcatctgtacagcttccatctgccatcgaccaggtcctctcatcaaattaaatggaacagaaaatgctctagtgaaacaaaggaaatgtgcaagcatttttcctttttctattattctatttccctttttcctttttggcccccttataatccaaaccccagctgaaaggctgcaacaacaccaggttggggagcaggtcaccaggatcatagttcagtcaaaatgacatcactccctggaactagatttcaactcactagtcccctggcctcataacaggaacttatgcaggtgagacacaagaatgacttcctgtgtaggactagtaggaaatctgcaagtacttagagctggccattacagaacttccttccagaagtgccctgtgacatgaaagtaggacttcacaactaaggtgaagatccctgccctaccacatgatttgagtctcttggattcaaaggacattaatgtcaacagatggttgccatgtcagtctgttgacacaattccattgcttcagtttctccccttttctctctatatgtttggttggagcttgtgcctaatgtaaatacatcattcataattagaatggacattaattattttagtaataaacacaggataaatagctttggggtgatgaaccagagtctgtttttattttatggtgtgtacatattttaagctgtacttctgtgaatggtactgatttttgtggttgttttttttttatattttgtttgtttaagcagaagagtggaatatggggtcaaaatcataaaagaagttgccatgagtgtttctcatttgatttttttatcgtaaaatatacataacataaaattcaccattttatccgttttaaaatatacacttcagtagtggcattaagtacatttttgtgcgacatcaccactatccatctccaggactttttcggcacctcaaatggaaactctgtacccactaaacaataactcctccccattccacactccagctcctagcaaccactattccactttctgtctctatgaatttgactgtgactgttctaagtacttcatataagcagaatcatacaatatttgttttttgtccttatttcacttagcaaaaagttttcaaggttcgtccatgctgtagcatttatcagaatttcctcccttttaaggctgaataatattccatcatatgtat

SEQ ID NO: 47951 - DNA, 1395 bp, Homo sapiens
  misc_feature (845)..(845): n is a, c, g, or t
gctgtgcagctgaggcgccgccgtggagccgccttggagccaccgcccccgatcgccttcgccgctgcgttggggaacctggaccgcgcggcgccgggtttccctcatgatcccgggcgggtggcggcggcggcagaggcggcgggaggatgacctcttaccgggagcggagtgccgacctggcccgtttctacactgtcaccgagccccagcgacacccgaggggctacacagtatataaggtcaccgcccgggttgtttcacgaagaaatccagaggatgtccaggagataattgtatggaagagatacagtgattttaagaaactacacaaagaactatggcaaattcacaaaaaggcgatttgatgaaactgttatcgaagagagaagacaatgtgctgaagacctgctacagttctctgccaatattcctgctctttacaatagtaaacagcttgaagactttttcaagggtggaataattaatgatagttctgaattaattggtcctgctgaagctcactcagattccctcattgatacctttcctgagtgtagtacggaaggcttctccagtgacagtgatctggtatctcttactgttgatgtggattctcttgctgagttagatgatggaatggcttccaatcaaaattctcccattagaacttttggtctcaatctttcttcggattcttcagcactaggggctgttgcttctgacagtgaacagagcaaaacagaagaagaacgggaaagtcgtagcctctttcctggcagtttaaagccgaagcttggcaagagagattatttggagaaagcaggagaattaataaagctggntttaaaaaaggaagaagaagacgactatgaagctgcttctgatttttataggaagggagttgatttactcctagaaggtgttcaaggagagtcaagccctacccgtcgagaagctgtgaagagaagaacagccgagtacctcatgcgggcagaaagtatctctagtctttatgggaaacctcagcttgatgatgtatctcagcctccaggatcactaagttcaaggcccctttggaacctaaggagccctgccgaggagctgaaggccttcagagtccttggggtgattgacaaggtaattcttcagtgtctcttcaagagttcagtcataaatcgactgcatgctgacattctgtctttgaagctttggatcttaaggatatgaaacaaaaggagaaaatgactcaaatgcatgtgcactttacaataacaaaagcaaaagagaaaaagcttttatctgagcaattcatgtaaggtcatgcaaaatatatttgagctaaaggagaaggcgcatatttgttggcattcagttgagtaaggggtttggttt

SEQ ID NO: 47952 - DNA, 457 bp, Homo sapiens
cacagctagaatggtattagacatagctccctttcaagaaaaatggtcacttggctattaatcaagactgcttgttaccagggttgaatttagaagttgtttcttttcaaatattggttttcctttgatttgccagttggattcctgttactcactaagtccgtctttttttagctcttgcagttcaatcctctggaacgacttggtgctggagttgctggtgttgaagatatcaaatctcatccattttttacccctgtggattgggcagaactgatgagatgaacgtaatgcagggttatcttcacacattctgatcttctctgtgacaggcatctccagcactgaggcacctctgactcacagttacttatggagcaccaaagcatttggataaagaccgttataggaaatgggggggaaatggctaaaagagaacaattcgtttacaattaca

SEQ ID NO: 47953 - DNA, 399 bp, Homo sapiens
tttgaaaacacttgtcatctagtttaatagattagtatagtcgtttctgtacatctttacacatacttaattgggataactattttttatttagtgttgtttatgctcttaatgctaatgaaacacaattgctcttatctctttagggtggaataattaatgatagttctgaattaattggtcctgctgaagctcactcagattccctcattgatacctttcctgagtgtagtacggaaggtaagagattttaatttttttgcatttcaaaggtttggattacagaagactataaatcatatctgcattgcaaaaagacagatgtatataggaatttgagggtatttcactgattctaagatgctttttttctttacattttattatcactgatgttgg

SEQ ID NO: 47954 - DNA, 441 bp, Homo sapiens
taagggtgaaagtggtttagtgctagaaggagacaaggaaatacatcagatttttgaggaccttgataaaaaattagcactagcctccaggttttacatcccagagggctgcattcaaagatgggcagctgaaatggtggtagcccttgatgctttacatagagagggaattgtgtgccgcgatttgaacccaaacaacatcttattgaatgatagaggtcaggaacttttgcaaatgcatttctttttattcgctgttgcttccaattaactgagtaggcgttttatcttgtaattagtatcttcatttcctgtctagagcttcattatcagtgcagcaaattcacccccagtaatagcttctagtacttaatgatgccattattcttaatgatactgtttttagctacaaaaggagtaattacagttcacttctgcaga

SEQ ID NO: 47955 - DNA, 374 bp, Homo sapiens
ttgttaataaattattactcgtgtcttttatgtaggttttacttgtaatggacacaaggacagaacagactttcattttaaaagtaagtaaaatttgtagccaggcgcggtgcctataattccagcactttgggagactgagataggcaggtcacctaaggtcaggagttcgagactatcctggccaacatggtgaaaccccgtttctactaaaaatacaaaaattagccgggtataatggtgggcttctataatcccagctacccgggagacttaggcaggagaatcgcttgaacccaggaggcagagattgcagtgaaccaagattgcaccattgcactccagcctgggcaacaagagtgagaccctgtctc

SEQ ID NO: 47956 - DNA, 889 bp, Homo sapiens
gaatgttaatcgtataaggcctatatggcctgatacacccatctcatcttgggaatgggctagccaaaggtaccagaaaactcaaaggtctttggctaaaatcctctgtatcctccagcagtaactttgccattaggactagaaatactcaaagtccaatgagtaggatttcctctcccctagatagtacttggatgggtgctttccatgcttgccaagggcaagaaggcagtgatgaagttcaggaactccataggcaattcacagagaatgaattcatatcaacttccaaacattaacagttacatgatgcctattcctcctccacttcccccaactgggaaaatcacaagagaaaatagatctgaaacatggagaaggagaagatttcgtccaaccactgctccaaatggcttagaacctcttttgacaaaggattcaagaaggattcataaaacatccttacatagtaatgcagctattacaatgatctatttggggaaaaatgtgcacctatcttctgataatcctgacttccgggatgaaattaaagtttatcagcagcactgtggtggggaaaacctttgtgtctacaaaggcaaactacttgaaaaagagacctttcagtttatttccaaaaggcatcatggtttccccttcagtctcacctttttcctgaatgggatgcaggtgaacaggttaagctcctgttgtgaatacaagcatcggaaaggttccaggcttggaggcaaacgaggctacttgggtttgtgtgtgttgagagatcatctccttgctacaagtgcattattgcaatgggccttgacaaaaaaccgtctttgccgaaatctaggaaagaaaagagcactgagaaaggagaggaactgaa

SEQ ID NO: 47957 - DNA, 1982 bp, Homo sapiens
tagttttactttgtagaaataactctctgtaattggactgtattcaacgaaaacttagtaagttgtaattatgcctcaggtatgtttctatgcactgagtgaagagtggagataaaaatagaatttagattttcctttactttttaaataggttgttgcctcttatatatttattctatgatgcaaatgtcactatcctaattcctcagtttatgtttaacagcacacagtggcacttctatgattcaaatacatttgataccctttgaaatcaatcagaatactgcaaaattaatttttctaaaacaatgcttttatcgttatttctcctgttgaatcatcagtacaatttccaaatgaaaacacttaaaataatctcatattacaatctttctctaacagaaccatgatgtaaggacagtgataacaaatatctgacaatgatatgattatttcctcatccatggaaattttccttaataaactaaagggctattttctaaaaagccaaagcattgcttacaagaacttttcatcatgacatggatagacactcagattcatacattcaaagggaagtgtcatgtattccctttcaatccaccctattctattgtgttatcttcctaaattattttctatctacattcttcattctctttcccattgaccctatgttctgtgtgataaaaattgcgtcattggaggcttttgaaggttaagtattatgccccatttcaccattaatcaacatacaacccttctccatattttgtaattcctttcatatacagaaaaaaagatactataatttcttcaaaatgcttgatattaatgatatatgggaaaacaattattttgtgcagcaatcttcagataactgggaaaggccggggaaaaagagagatactggtggttatcaatgacccatgtataaattgtttttattatgtaagctgtcttcacaaatgtcttcttatgtatgatcattagaactgttttatatatatatgtaaaatttccacattatcgagacattactttcagcagtgaagtaatccttttttaactgccacttaatgaattcaataaaatataatttattgtattttgctataataaactattgatgactatttgatgacaatttgcttgccactatgacatttaactggcttatattttgaaatctcatttctgttttctgtggctattttaattttccaccctcaaaatatagatgagtatctttgtagtaggaaaatcataaaaattaacagcttcttccctagttaataactctgcatattgtttttgtgcgtggagcaggggctaaatcaggaggggatttgaggcaacattgaagaccaagcagtatagaataaaagataagagcacaaaatctgtaattataaagcctttttagaattaggtctttgccactttctaaccctgaaaacttgagcaagtcacaacttttctgcgctcaattccttatctgtacaatgtagacaatgagtatttattgcaaagatgaaataatacataaaacaattaaaacagtgcctagcatacttcagtgtgctcatttaatatcagctgccatgaaggtaatcattgtgaaaatcttgaaattttatttatctaaatgggattgaggcatcggatttcttgttccacactgctagctggcttcaaaatgtagaaatatgtcgcaaattactgggaggcaaggaggtttctggcttcattactgttaccattgttcttttgttgtttgctaccaagttaaatttttcacgtgtgtcaagtactcctgcttaaggcattattctcgagtacttaatattttcaacgtgtgtcaatgatcatcattcaatagaaaagcacagcaaggctataaagattggaataacactgcaaatgatacataggttgtaataatccagctattgcaaaaataaagataagttagatactgt

SEQ ID NO: 47958 - DNA, 347 bp, Homo sapiens
tcaaatccttgagaacagagacatcagttaaatcaactttgaatcctcagaatgtagcacacagcagacatgcaaatattttttaaatgaatgaatcaattgtgagacatgagggcttatcttggatcctctatagtcactaaacaggattttaaactggagaatactgtattggccaatggttatctggaaaaccataatcaatgggagtattgtttgtgtttgtggcaggggctggggctggggctggggaagattttcaggaaatggctcagtaattgtaggtgctggagagtctgaaatctgtagagtgggctggcaggctggagacccagggaagagttgat

SEQ ID NO: 47959 - DNA, 740 bp, Homo sapiens
gggatttctattttccaagccagttactaagcaaaatttgtgttatttctcaaatatatgccatggttctgtgtgagtgtgtaaagagctgtaactagctcactttttttttttttgatagaaacataaacagagacgaaaaatgtagggaatgtttcacctgttttactgccattaaataaacctcatctgctaccaagctgttttgggtgacatttgctaaataaatacattttgtggggagacttgaacactgaagcacagagacatgcaaccgatgttctcaggatgaatcctgtttgcttctcagtgcctatacccctaccccagggggaggagtgaagtgggtaaattcaggtttatgttttcacattggtagtttattttccaaacgtacacagctacaacaaaaagtacatgcttttattaccagcgtttcttgtaattctctctctctttctgccccctaacccaattttcccctctccctcactaccttcctccctccctccacaaatacctttattgctttttttttaactggggagtattcactatttctttacacttctatatggatttcacttttaaaaaatctatcagcatgcatatttcgtgcatgtctgaaacctttaaaatattgtttgatcttcatgattatttaaaaatatgtatattgagtatttgcttaaggtaaagccattgctgccatttccaattaaaaaactaataaatgtatt

SEQ ID NO: 47960 - DNA, 543 bp, Homo sapiens
ggacttcttatacttcggggaatgagagagaagagagtaagggactttgcctgggaacccagaacattgtcttctctttcccacatctatctaggctgggtatctaggagtctgcaagatttattgcatacttgggattatggcaccctctagtgctgaaatggctgcagtgaccacagcttagggaactcagcactcagtcccctttgaattctttgaaggccctctgaagaagaatgagtacaagcaaggccagactgtgaagactggaataaataagaaactcttcagtgttcagacatgtacaaatatccacaagtattgagaacattcaagaaaatatgatctcatcaaatggactaaataagctgcccagtgaccagccctggagtgatagagatctatcagatagggaatacctttcagacagggaattcaaaatatctgtcttgaagaagctcaaagaatgtcaagaaaacatgaagaaagaattcagaattttagcagagaaatttaacaaagagattgaaataattaccaaaa

SEQ ID NO: 47961 - DNA, 1252 bp, Homo sapiens
ggactctgtcttcagctggacactccctccctgcaccatgtcttacagttgtggcctgcccagcctgagctgccgcaccagctgctcctcccggccctgtgtgccccccagctgccacggctgcaccctgcccggggcctgcaacatccccgccaatgtgagcaactgcaactggttctgtgagggctccttcaatggcagtgagaaggagaccatgcagttcctgaacgaccgcctggccagctacctggagaaggtgcgtcagctggagcgggacaacgcggagctggagaacctcatccgggagcggtcacagcagcaggagcccttggtgtgtgccagctaccagtcctacttcaagaccattgaggagctccagcagaagatcctgtgcagcaagtctgagaatgccaggcttgtggtgcagatcgacaatgccaagctggcctcagatgacttcaggaccaaatatgagaccgagctgtccctgcggcagctggtggagtcggacatcaatggcctgcgcaggatcctggatgagctgaccctgtgcaggtctgacctggaggcccaggtggagtccctgaaggaggagctgctgtgcctcaagcagaaccatgagcaggaggttaacaccctgcgctgccagcttggagaccgcctcaacgtggaggtggacgctgctcccactgtggacctgaaccaggtcctgaatgagaccaggagtcagtatgaggccctggtggaaaccaaccgcagggaagtggagcaatggttcgccacgcagaccgaggagctgaacaagcaggtggtatccagctcggagcagctgcagtcctaccaggcggagatcatcgagctgagacgcacggtcaatgccctggagatcgagctgcaggcccagcacaacctgcgagactctctggaaaacacgctgacagagagcgaggcccgctacagctcccagctgtcccaggtgcagagactgatcaccaacgtggagtcccagctggcggagatccgcagtgacctggagcggcagaaccaggagtatcaggtgctgctggacgtgcgggcgcggctggagtgtgagatcaacacgtaccggagcctgctggagagcgaggactgcaagctcccctccaacccctgcgccacaaccaatgcatgtgacaagtccactgggccctgtatctctaatccctgtggcctacgtgctcggtgtgggccttgcaacacatttgggtactag

SEQ ID NO: 47962 - DNA, 383 bp, Homo sapiens
ccaggctggagtccaatggcgcaatcttggctcactgcagcctccgcctcccgggtttaagcgattctcatgcctcagcctcctgtgtagctgggattacagacgtgcgccaccatgcccagctgatttttgtatttttactagagacagggtttcaccatgtcagccaggctgatctcgaacttctggcctcatgtgatccatccaccttggcctcccaaagtgctgcgattataggtgtgagccaccgcacccagcctgaatttttatttattagccactctttttttagtgacataaggaactgaatgtagcttattacctcgtttcagtaatgggctcaaatgctaacttagaagatcctcccacaatatatcaattca

SEQ ID NO: 47963 - DNA, 751 bp, Homo sapiens
tgaaggatgaggcgttattccaaaaaagagggaaggacagctggacagcaggagcagtgggagctgcactaaagtttcccttccttcacagactcgtggtgagtgtggccttttagggtcagcagagtctgagcaaacctgagggtctcaacagccagaccctcccaaccctgtactcccatcctttgttgctttgcagcaggagctgagtgattggcacaagaatatgtggtgatgactggtttgttttgtacaaagcctggttgtaagtgccacaggggtttaaaaatgaggtggtgtttgaccttggttttctctggctctaaagccagcactcttgttctctggacagggtcttttaatcacctagtgtatgttcagttttaatgtagatacaagaaatgagacatacatttcctgcccacaaggaatttacagtccagctaggccaaaaggaattggccttagaaagtaatcagtgatgctaggtgcggtggctcttgcctgtaatcccagcactttgtggggctgaggcagaagagtcacttgagctcagcctggacaacatggcaagaccctgtctcttaaaaaaaaaaaaaattggtgtgcacctgtagtcctagcaactcaagaggcagaggtgggaggatcactcgagcccaggaatttgaggctgtggtaagctgattgcaccattgcactccagcctggcagataagggaagactctacctcaaaagaaagaaagaaaa

SEQ ID NO: 47964 - DNA, 436 bp, Homo sapiens
attgactgtaggggagcttgtcttgcagatctaacttggttattgataacatgtagcttttgaaaaaagcaggttatagtaaactagagaggttatgaaagaagtattggacttgtagataatacctggctttgaattcttgctctgtcattgactccttagtaaccttaggcaagtcactttatttttctgggcttcaatttcctcccctataaaacggtgatttcccaagtcctttgccgttttgcaaaccgttaactctgagacaagtgaatgtctccgtggtggtagtagttcacacagtgccgagggttatcattataaataccagattttcagtgtacagaggggttgtaagaaccaagtgtgcacatagggaggaatgtgtgccaacaccagaacaaaccccagcaaaaggctttgagtttgggtgctt

SEQ ID NO: 47965 - DNA, 317 bp, Homo sapiens
acattagccactagctgcgtgtgtctgctggaatttaattaaataaaattgaaagggcagtttctcaatttcaaaggttcaatagcagcacctgctggacacagcaggccacaagttacagaatgcccaccaggtggggtgagcccctctggcgctcccttccacatgctgcctcccagctggggaaactgaggcaggtccctggggagctggaaggtgcacaccaaggacctaactcctgattcagagctccctctgctggacataaagcaggtgacagcacagaggtgacaccaggggccttggagctgtcccta

SEQ ID NO: 47966 - DNA, 593 bp, Homo sapiens
  misc_feature (513)..(513): n is a, c, g, or t
  misc_feature (539)..(539): n is a, c, g, or t
  misc_feature (558)..(558): n is a, c, g, or t
  misc_feature (577)..(577): n is a, c, g, or t
agataaatgatttttcaaacaggtttaatcaaaaggggtgattaacaacagcaacaaagtctacaaatctagatataacttacactgctttttctacttcataagtaaatttaattacagcatctgtaagaaacttaaacaaatatataagaaaaaacaaacaaacaaccccatcaaaaagtgggcaaaagatatgaacaagcacttttcaaaataatttcacataaattatgatatctcaaagataattctctaatatatttttgttgcattctagctgtgattagaaaaaaacagtttattaaagaagtcttgcagtaacagaaaaagttaatctcattattaataaagaaggaaacaaagataaaaattgtgtttctcttcgaaattaagaactagtctcgagttttttttttttttttttctttccttttttgagacggagtctcactctgtcacccaggctacagtgcagtgttgcgatctcagctcactgcaacctctgccttcctngttcaagcgattctctgtccagcctnctgagtagctggattacangcgcatgccaccacgcctngctaatttttgtagct

SEQ ID NO: 47967 - DNA, 1166 bp, Homo sapiens
agataaatgatttttcaaacaggtttaatcaaaaggggtgattaacaacagcaacaaagtctacaaatctagatataacttacactgctttttctacttcataagtaaatttaattacagcatctgtaagaaacttaaacaaatatataagaaaaaacaaacaaacaaccccatcaaaaagtgggcaaaagatatgaacaagcacttttcaaaataatttcacataaattatgatatctcaaagataattctctaatatatttttgttgcattctagctgtgattagaaaaaaacagtttattaaagaagtcttgcagtaacagaaaaagttaatctcattattaataaagaaggaaacaaagataaaaattgtgtttctcttcgaaattaagaactagtcttataaaatctttctttcccaaagatcacttgttccggaatctcaagcatttagaacataagtgagcacaagaaagtaagcaatcaaaagttcagagagccaccagaacaaatttcaataatgtcttagagttgtattttgctttcatccaagttactaaccgtgttatttggaacatatctcatactcatactcatactcctaatcttaagtgtatgttccagttttgtaatatatattagtgaactccctcatcccctcaaatattcatatctttaacttaggattactgccaactctcttaccaagaaatgtttctaaataaataaaaacataattatggaaaaagaagtacaggcatgttttgttagggttgcaaaattttggaaataaataaaatggttcaacagaagggaagggtgacagttaaataaataatgttcattattcttgagaagatatatacttctagtacaaagtaggtatgtctaaatctctaatcaaaattgtatattcagtgtgatcatatcatgtataaaataaaatctgtgactagaaaaaaataagacaagaaaatataccaaaattggtatctctttgtggtaaggatataagtcatattttaaaatttcagggcctggtacggtggctcaagcctgtaatcccagcactttgggaggtcgaggcaggtggattacttgaggtcaggagttccagaccagtctggccaacttggtgaaaccctgtctgtgctaaaaatacaaa

SEQ ID NO: 47968 - DNA, 4571 bp, Homo sapiens
gcgcgagacctggtgcgggaggcccgggcagggagaagtgtgcggggccgggacaagccggctccgagtccggctccggggggcggggcgggaggggcctgcgcggcggcgggagcccagagccgcgctaaagcgggtcaagcgtcctccttttctccccgccccttctcctcctcctacctgggcctctgcgtggagacgcgcacctggcaaccggaggccgcgtctccgccttctctgctcgcgcctggcgcccggagcctgcccgggacctccgccggagccgcgctcgctgcaggcggcctcgagcgctctctcgttgatgccgttttggaggtgaccggcgcggcggccgctctatggtggggccgcgttagtggctgcggctccgcgggactccagggcgcggctgcgaggtggcggggcgccccgcctgcagaaccctgcttgcagctcaggtttcggggtgcttgaggaggccgccacggcagcgcgggagcggaagatgttggagctgaggcaccggggaagctgccccggccccagggaagcggtgtcgccgccacaccgcgagggagaggcggccggcggcgaccacgaaaccgagagcaccagcgacaaagaaacagatattgatgacagatatggagatttggattccagaacagattctgatattccggaaattccaccatcctcagatagaacccctgagattctcaaaaaagctctatctggtttatcttcaaggtggaaaaactggtggatacgtggaattctcactctaactatgatctcgttgtttttcctgatcatctatatgggatccttcatgctgatgcttcttgttctgggcatccaagtgaaatgcttccatgaaattatcactataggttatagagtctatcattcttatgatctaccatggtttagaacactaagttggtactttctattgtgtgtaaactactttttctatggagagactgtagctgattattttgctacatttgttcaaagagaagaacaacttcagttcctcattcgctaccatagatttatatcatttgccctctatctggcaggtttctgcatgtttgtactgagtttggtgaagaaacattatcgtctgcagttttatatgttcgcatggactcatgtcactttactgataactgtcactcagtcacaccttgtcatccaaaatctgtttgaaggcatgatatggttccttgttccaatatcaagtgttatctgcaatgacataactgcttacctttttggatttttttttgggagaactccattaattaagttgtctcctaaaaagacttgggaaggattcattggtggtttcttttccacagttgtgtttggattcattgctgcctatgtgttatccaaataccagtactttgtctgcccagtggaataccgaagtgatgtaaactccttcgtgacagaatgtgagccctcagaacttttccagcttcagacttactcacttccaccctttctaaaggcagtcttgagacaggaaagagtgagcttgtaccctttccagatccacagcattgcactgtcaacctttgcatctttaattggcccatttggaggcttctttgctagtggattcaaaagagccttcaaaatcaaggattttgcaaataccattcctggacatggtgggataatggacagatttgattgtcagtatttgatggcaacttttgtacatgtgtacatcacaagttttataaggggcccaaatcccagcaaagtgctacagcagttgttggtgcttcaacctgaacagcagttaaatatatataaaaccctgaagactcatctcattgagaaaggaatcctacaacccaccttgaaggtataactggatccagagagggaaggactgacaagaaggaattattcagaaaaacactgacagatgttttataaattgtacagaaaaatagttaaaaatgcaataggttgaagttttggagatatgtttctctctgaaattactgtgaatatttaacaaacacttacttgatctatgttatgaaataagtagcaaattgccagcaaaatgtcttgtaccttttctaaagtgtattttctgatgtgaacttccttccccttacttgctaggtttcataatttaaaagactggtatttaaaagagtcaaacactataaaatgagtaagttgacgatgttttaagattgcacctggcagtgtgcctttttgcaacaaatatttacctggcagtgtgcctttttgcaacaaatatttacttttgcacttggagctgcttttaattttagcaaaatgttttatgcaaggcacaataggaagtcagttctcctgcacttcctcctcatgtagtctggagtactttctaaagggcttagttggatttaaaaaaaaaaaaaaaagattgtctacttttcaaagaagtaaccatttgccaggggaaaacattctgcttttaggtagtttcaaaattcaggggagggagcctgaaatttttgccatgattggtttgttagaaagagcaggcatcagactacttctgataaaattgtttggaaggtcacgacctcgcaaaaacttttcaagagcaacaaggaagaattctgctgtgaagaacacagtgtacggatcctccgcatattatctcaacagaggacagtagctcaggaggcagcttcaaacggtgacctgtggcctgggccatctcttcgtcatgtgcttcacttttccctgtttccctgtgaactggcttccatggttctgtagggtagtgagtcggggttgtggctgcagcagagcaggagatgcttgcccgagtgggagcaacccacccccgtgtccccaatgcctcactcctggcttctagtgcagccctttgtagactcacctcgcaagaaggaagatctgcctggagacctgatcccagtccagctttttgaccataggtcatctttgtccccttgctcctttgcatcatgtcataaaatttgaggatatcagctgattattttttcttccaagaatgaaaatcaagcagaattgattcctacacgaaaaaaaagcacacgaatgccaaacctttcctttggtggactggacactaaccagatgagagtaaatttcttatccgtggacgtatgtaagctactgctgctgtgtgctctccacagccatatttattgtattaaacaatcagcactaaaccttcaaaaattgcccagtgttcctagttaaatgttcagaggggagaaatagatatattttaaataatgttttgctaatgaaaagagtaaatatttttgtttaaatcagcaaaaactttccattattttatatttccgtctactatacctaaaacaaaagattgccgttatacctgggttccgctgatgcagtcagccagcacctcctcacatgcacacatgattagacataggtgcactcggtaccaagagtccattttatggtccagcatatactccattgattcatcatcactgcatgtgttcagccagtgtatctcacactatccatacaaatctaaaattgatactggaaatgttattataggaggcagtgatcgcatttaaaatcaggccacctacaagtttaattttcaacatctcatgtttttatttgtcccattacagcctcaaatgttggtcataaaaaaaatttaggctaccaaagtttaaagaataaaatgaaaattttataagaacttacattaaaaactcagtagtttgcatgagtaagaactccttgagatacacagatccccccacatttgtatttaaaataattggtgaggcattgaaatccagaattataagaaagcattactgaatatgtgtgttataaaatcaatattattataaacaaaataggaagctagaaatatttgggatcacagtaatagcttttctcaaatatacttttagaattgaatgtacattatcctatatgtaaaaaagcaaattattaattttaatggagctctcgattgacctttttagcatacttttatagcatgtatattaaaatagaatatattttagcaaaagattgccataaaaccctgacttggctcattttgatatttgcactgtgaagagggcttaaattccaatgtagcaatgtggtggcagacaaatgaaaaactaggaagttctttcacagtaatgcctagttgttccaaatttgctatatttggaggtgctctactggtacttcctgcttgactctctgacctgtgggatgcacattcttcctcagcgctttttccttgttgtggtgacgtacattcactatctgagagtgaaagaccacacacacccctctttttaaaattattgtatctcttccttttcactttggtttgaacaaagatagtgtcaccttgttccgtgaaaaagaaaaagcataaacagtgtatatttagggtatatgggtgatagcttatgatgtgtgtcaatcagttctctgaatcttttactgaaactgagacaggaaaataaaactgaaacaaatca

SEQ ID NO: 47969 - DNA, 4385 bp, Homo sapiens
gcgcgagacctggtgcgggaggcccgggcagggagaagtgtgcggggccgggacaagccggctccgagtccggctccggggggcggggcgggaggggcctgcgcggcggcgggagcccagagccgcgctaaagcgggtcaagcgtcctccttttctccccgccccttctcctcctcctacctgggcctctgcgtggagacgcgcacctggcaaccggaggccgcgtctccgccttctctgctcgcgcctggcgcccggagcctgcccgggacctccgccggagccgcgctcgctgcaggcggcctcgagcgctctctcgttgatgccgttttggaggtgaccggcgcggcggccgctctatggtggggccgcgttagtggctgcggctccgcgggactccagggcgcggctgcgaggtggcggggcgccccgcctgcagaaccctgcttgcagctcaggtttcggggtgcttgaggaggccgccacggcagcgcgggagcggaagatgttggagctgaggcaccggggaagctgccccggccccagggaagcggtgtcgccgccacaccgcgagggagaggcggccggcggcgaccacgaaaccgagagcaccagcgacaaagaaacagatattgatgacagatatggagatttggattccagaacagattctgatattccggaaattccaccatcctcagatagaacccctgagattctcaaaaaagctctatctggtttatcttcaaggtggaaaaactggtggatacgtggaattctcactctaactatgatctcgttgtttttcctgatcatctatatgggatccttcatgctgatgcttcttgttctgggcatccaagtgaaatgcttccatgaaattatcactataggttatagagtctatcattcttatgatctaccatggtttagaacactaagttggtactttctattgtgtgtaaactactttttctatggagagactgtagctgattattttgctacatttgttcaaagagaagaacaacttcagttcctcattcgctaccatagatttatatcatttgccctctatctggcaggtttctgcatgtttgtactgagtttggtgaagaaacattatcgtctgcagttttatatggttccttgttccaatatcaagtgttatctgcaatgacataactgcttacctttttggatttttttttgggagaactccattaattaaggctgcctatgtgttatccaaataccagtactttgtctgcccagtggaataccgaagtgatgtaaactccttcgtgacagaatgtgagccctcagaacttttccagcttcagacttactcacttccaccctttctaaaggcagtcttgagacaggaaagagtgagcttgtaccctttccagatccacagcattgcactgtcaacctttgcatctttaattggcccatttggaggcttctttgctagtggattcaaaagagccttcaaaatcaaggattttgcaaataccattcctggacatggtgggataatggacagatttgattgtcagtatttgatggcaacttttgtacatgtgtacatcacaagttttataaggggcccaaatcccagcaaagtgctacagcagttgttggtgcttcaacctgaacagcagttaaatatatataaaaccctgaagactcatctcattgagaaaggaatcctacaacccaccttgaaggtataactggatccagagagggaaggactgacaagaaggaattattcagaaaaacactgacagatgttttataaattgtacagaaaaatagttaaaaatgcaataggttgaagttttggagatatgtttctctctgaaattactgtgaatatttaacaaacacttacttgatctatgttatgaaataagtagcaaattgccagcaaaatgtcttgtaccttttctaaagtgtattttctgatgtgaacttccttccccttacttgctaggtttcataatttaaaagactggtatttaaaagagtcaaacactataaaatgagtaagttgacgatgttttaagattgcacctggcagtgtgcctttttgcacaaatatttacttttgcacttggagctgcttttaattttagcaaaatgttttatgcaaggcacaataggaagtcagttctcctgcacttcctcctcatgtagtctggagtactttctaaagggcttagttggatttaaaaaaaaaaaaaaaagattgtctacttttcaaagaagtaaccatttgccaggggaaaacattctgcttttaggtagtttcaaaattcaggggagggagcctgaaatttttgccatgattggtttgttagaaagagcaggcatcagactacttctgataaaattgtttggaaggtcacgacctcgcaaaaacttttcaagagcaacaaggaagaattctgctgtgaagaacacagtgtacggatcctccgcatattatctcaacagaggacagtagctcaggaggcagcttcaaacggtgacctgtggcctgggccatctcttcgtcatgtgcttcacttttccctgtttccctgtgaactggcttccatggttctgtagggtagtgagtcggggttgtggctgcagcagagcaggagatgcttgcccgagtgggagcaacccacccccgtgtccccaatgcctcactcctggcttctagtgcagccctttgtagactcacctcgcaagaaggaagatctgcctggagacctgatcccagtccagctttttgaccataggtcatctttgtccccttgctcctttgcatcatgtcataaaatttgaggatatcagctgattattttttcttccaagaatgaaaatcaagcagaattgattcctacacgaaaaaaaagcacacgaatgccaaacctttcctttggtggactggacactaaccagatgagagtaaatttcttatccgtggacgtatgtaagctactgctgctgtgtgctctccacagccatatttattgtattaaacaatcagcactaaaccttcaaaaattgcccagtgttcctagttaaatgttcagaggggagaaatagatatattttaaataatgttttgctaatgaaaagagtaaatatttttgtttaaatcagcaaaaactttccattattttatatttccgtctactatacctaaaacaaaagattgccgttatacctgggttccgctgatgcagtcagccagcacctcctcacatgcacacatgattagacataggtgcactcggtaccaagagtccattttatggtccagcatatactccattgattcatcatcactgcatgtgttcagccagtgtatctcacactatccatacaaatctaaaattgatactggaaatgttattataggaggcagtgatcgcatttaaaatcaggccacctacaagtttaattttcaacatctcatgtttttatttgtcccattacagcctcaaatgttggtcataaaaaaaatttaggctaccaaagtttaaagaataaaatgaaaattttataagaacttacattaaaaactcagtagtttgcatgagtaagaactccttgagatacacagatccccccacatttgtatttaaaataattggtgaggcattgaaatccagaattataagaaagcattactgaatatgtgtgttataaaatcaatattattataaacaaaataggaagctagaaatatttgggatcacagtaatagcttttctcaaatatacttttagaattgaatgtacattatcctatatgtaaaaaagcaaattattaattttaatggagctctcgattgacctttttagcatacttttatagcatgtatattaaaatagaatatattttagcaaaagattgccataaaaccctgacttggctcattttgatatttgcactgtgaagagggcttaaattccaatgtagcaatgtggtggcagacaaatgaaaaactaggaagttctttcacagtaatgcctagttgttccaaatttgctatatttggaggtgctctactggtacttcctgcttgactctctgacctgtgggatgcacattcttcctcagcgctttttccttgttgtggtgacgtacattcactatctgagagtgaaagaccacacacacccctctttttaaaattattgtatctcttccttttcactttggtttgaacaaagatagtgtcaccttgttccgtgaaaaagaaaaagcataaacagtgtatatttagggtatatgggtgatagcttatgatgtgtgtcaatcagttctctgaatcttttactgaaactgagacaggaaaataaaactgaaacaaatca

SEQ ID NO: 47970 - DNA, 4592 bp, Homo sapiens
  misc_feature (4581)..(4581): n is a, c, g, or t
gcgcgagacctggtgcgggaggcccgggcagggagaagtgtgcggggccgggacaagccggctccgagtccggctccggggggcggggcgggaggggcctgcgcggcggcgggagcccagagccgcgctaaagcgggtcaagcgtcctccttttctccccgccccttctcctcctcctacctgggcctctgcgtggagacgcgcacctggcaaccggaggccgcgtctccgccttctctgctcgcgcctggcgcccggagcctgcccgggacctccgccggagccgcgctcgctgcaggcggcctcgagcgctctctcgttgatgccgttttggaggtgaccggcgcggcggccgctctatggtggggccgcgttagtggctgcggctccgcgggactccagggcgcggctgcgaggtggcggggcgccccgcctgcagaaccctgcttgcagctcaggtttcggggtgcttgaggaggccgccacggcagcgcgggagcggaagatgttggagctgaggcaccggggaagctgccccggccccagggaagcggtgtcgccgccacaccgcgagggagaggcggccggcggcgaccacgaaaccgagagcaccagcgacaaagaaacagatattgatgacagatatggagatttggattccagaacagattctgatattccggaaattccaccatcctcagatagaacccctgagattctcaaaaaagctctatctggtttatcttcaaggtggaaaaactggtggatacgtggaattctcactctaactatgatctcgttgtttttcctgatcatctatatgggatccttcatgctgatgcttcttgttctgggcatccaagtgaaatgcttccatgaaattatcactataggttatagagtctatcattcttatgatctaccatggtttagaacactaagttggtactttctattgtgtgtaaactactttttctatggagagactgtagctgattattttgctacatttgttcaaagagaagaacaacttcagttcctcattcgctaccatagatttatatcatttgccctctatctggcaggtttctgcatgtttgtactgagtttggtgaagaaacattatcgtctgcagttttatatgttcgcatggactcatgtcactttactgataactgtcactcagtcacaccttgtcatccaaaatctgtttgaaggcatgatatggttccttgttccaatatcaagtgttatctgcaatgacataactgcttacctttttggatttttttttgggagaactccattaattaagttgtctcctaaaaagacttgggaaggattcattggtggtttcttttccacagttgtgtttggattcattgctgcctatgtgttatccaaataccagtactttgtctgcccagtggaataccgaagtgatgtaaactccttcgtgacagaatgtgagccctcagaacttttccagcttcagacttactcacttccaccctttctaaaggcagtcttgagacaggaaagagtgagcttgtaccctttccagatccacagcattgcactgtcaacctttgcatctttaattggcccatttggaggcttctttgctagtggattcaaaagagccttcaaaatcaaggattttgcaaataccattcctggacatggtgggataatggacagatttgattgtcagtatttgatggcaacttttgtacatgtgtacatcacaagttttataaggggcccaaatcccagcaaagtgctacagcagttgttggtgcttcaacctgaacagcagttaaatatatataaaaccctgaagactcatctcattgagaaaggaatcctacaacccaccttgaaggtataactggatccagagagggaaggactgacaagaaggaattattcagaaaaacactgacagatgttttataaattgtacagaaaaatagttaaaaatgcaataggttgaagttttggagatatgtttctctctgaaattactgtgaatatttaacaaacacttacttgatctatgttatgaaataagtagcaaattgccagcaaaatgtcttgtaccttttctaaagtgtattttctgatgtgaacttccttccccttacttgctaggtttcataatttaaaagactggtatttaaaagagtcaaacactataaaatgagtaagttgacgatgttttaagattgcacctggcagtgtgcctttttgcaacaaatatttacctggcagtgtgcctttttgcaacaaatatttacttttgcacttggagctgcttttaattttagcaaaatgttttatgcaaggcacaataggaagtcagttctcctgcacttcctcctcatgtagtctggagtactttctaaagggcttagttggatttaaaaaaaaaaaaaaaagattgtctacttttcaaagaagtaaccatttgccaggggaaaacattctgcttttaggtagtttcaaaattcaggggagggagcctgaaatttttgccatgattggtttgttagaaagagcaggcatcagactacttctgataaaattgtttggaaggtcacgacctcgcaaaaacttttcaagagcaacaaggaagaattctgctgtgaagaacacagtgtacggatcctccgcatattatctcaacagaggacagtagctcaggaggcagcttcaaacggtgacctgtggcctgggccatctcttcgtcatgtgcttcacttttccctgtttccctgtgaactggcttccatggttctgtagggtagtgagtcggggttgtggctgcagcagagcaggagatgcttgcccgagtgggagcaacccacccccgtgtccccaatgcctcactcctggcttctagtgcagccctttgtagactcacctcgcaagaaggaagatctgcctggagacctgatcccagtccagctttttgaccataggtcatctttgtccccttgctcctttgcatcatgtcataaaatttgaggatatcagctgattattttttcttccaagaatgaaaatcaagcagaattgattcctacacgaaaaaaaagcacacgaatgccaaacctttcctttggtggactggacactaaccagatgagagtaaatttcttatccgtggacgtatgtaagctactgctgctgtgtgctctccacagccatatttattgtattaaacaatcagcactaaaccttcaaaaattgcccagtgttcctagttaaatgttcagaggggagaaatagatatattttaaataatgttttgctaatgaaaagagtaaatatttttgtttaaatcagcaaaaactttccattattttatatttccgtctactatacctaaaacaaaagattgccgttatacctgggttccgctgatgcagtcagccagcacctcctcacatgcacacatgattagacataggtgcactcggtaccaagagtccattttatggtccagcatatactccattgattcatcatcactgcatgtgttcagccagtgtatctcacactatccatacaaatctaaaattgatactggaaatgttattataggaggcagtgatcgcatttaaaatcaggccacctacaagtttaattttcaacatctcatgtttttatttgtcccattacagcctcaaatgttggtcataaaaaaaatttaggctaccaaagtttaaagaataaaatgaaaattttataagaacttacattaaaaactcagtagtttgcatgagtaagaactccttgagatacacagatccccccacatttgtatttaaaataattggtgaggcattgaaatccagaattataagaaagcattactgaatatgtgtgttataaaatcaatattattataaacaaaataggaagctagaaatatttgggatcacagtaatagcttttctcaaatatacttttagaattgaatgtacattatcctatatgtaaaaaagcaaattattaattttaatggagctctcgattgacctttttagcatacttttatagcatgtatattaaaatagaatatattttagcaaaagattgccataaaaccctgacttggctcattttgatatttgcactgtgaagagggcttaaattccaatgtagcaatgtggtggcagacaaatgaaaaactaggaagttctttcacagtaatgcctagttgttccaaatttgctatatttggaggtgctctactggtacttcctgcttgactctctgacctgtgggatgcacattcttcctcagcgctttttccttgttgtggtgacgtacattcactatctgagagtgaaagaccacacacacccctctttttaaaattattgtatctcttccttttcactttggtttgaacaaagatagtgtcaccttgttccgtgaaaaagaaaaagcataaacagtgtatatttagggtatatgggtgatagcttatgatgtgtgtcaatcagttctctgaatcttttactgaaactgagacaggaaaataaaactgaaacaaatcaaaaaattaanacaggaagcat

SEQ ID NO: 47971 - DNA, 4409 bp, Homo sapiens
gcgcgagacctggtgcgggaggcccgggcagggagaagtgtgcggggccgggacaagccggctccgagtccggctccggggggcggggcgggaggggcctgcgcggcggcgggagcccagagccgcgctaaagcgggtcaagcgtcctccttttctccccgccccttctcctcctcctacctgggcctctgcgtggagacgcgcacctggcaaccggaggccgcgtctccgccttctctgctcgcgcctggcgcccggagcctgcccgggacctccgccggagccgcgctcgctgcaggcggcctcgagcgctctctcgttgatgccgttttggaggtgaccggcgcggcggccgctctatggtggggccgcgttagtggctgcggctccgcgggactccagggcgcggctgcgaggtggcggggcgccccgcctgcagaaccctgcttgcagctcaggtttcggggtgcttgaggaggccgccacggcagcgcgggagcggaagatgttggagctgaggcaccggggaagctgccccggccccagggaagcggtgtcgccgccacaccgcgagggagaggcggccggcggcgaccacgaaaccgagagcaccagcgacaaagtggaaaaactggtggatacgtggaattctcactctaactatgatctcgttgtttttcctgatcatctatatgggatccttcatgctgatgcttcttgttctgggcatccaagtgaaatgcttccatgaaattatcactataggttatagagtctatcattcttatgatctaccatggtttagaacactaagttggtactttctattgtgtgtaaactactttttctatggagagactgtagctgattattttgctacatttgttcaaagagaagaacaacttcagttcctcattcgctaccatagatttatatcatttgccctctatctggcaggtttctgcatgtttgtactgagtttggtgaagaaacattatcgtctgcagttttatatgttcgcatggactcatgtcactttactgataactgtcactcagtcacaccttgtcatccaaaatctgtttgaaggcatgatatggttccttgttccaatatcaagtgttatctgcaatgacataactgcttacctttttggatttttttttgggagaactccattaattaagttgtctcctaaaaagacttgggaaggattcattggtggtttcttttccacagttgtgtttggattcattgctgcctatgtgttatccaaataccagtactttgtctgcccagtggaataccgaagtgatgtaaactccttcgtgacagaatgtgagccctcagaacttttccagcttcagacttactcacttccaccctttctaaaggcagtcttgagacaggaaagagtgagcttgtaccctttccagatccacagcattgcactgtcaacctttgcatctttaattggcccatttggaggcttctttgctagtggattcaaaagagccttcaaaatcaaggattttgcaaataccattcctggacatggtgggataatggacagatttgattgtcagtatttgatggcaacttttgtacatgtgtacatcacaagttttataaggggcccaaatcccagcaaagtgctacagcagttgttggtgcttcaacctgaacagcagttaaatatatataaaaccctgaagactcatctcattgagaaaggaatcctacaacccaccttgaaggtataactggatccagagagggaaggactgacaagaaggaattattcagaaaaacactgacagatgttttataaattgtacagaaaaatagttaaaaatgcaataggttgaagttttggagatatgtttctctctgaaattactgtgaatatttaacaaacacttacttgatctatgttatgaaataagtagcaaattgccagcaaaatgtcttgtaccttttctaaagtgtattttctgatgtgaacttccttccccttacttgctaggtttcataatttaaaagactggtatttaaaagagtcaaacactataaaatgagtaagttgacgatgttttaagattgcacctggcagtgtgcctttttgcacaaatatttacttttgcacttggagctgcttttaattttagcaaaatgttttatgcaaggcacaataggaagtcagttctcctgcacttcctcctcatgtagtctggagtactttctaaagggcttagttggatttaaaaaaaaaaaaaaaagattgtctacttttcaaagaagtaaccatttgccaggggaaaacattctgcttttaggtagtttcaaaattcaggggagggagcctgaaatttttgccatgattggtttgttagaaagagcaggcatcagactacttctgataaaattgtttggaaggtcacgacctcgcaaaaacttttcaagagcaacaaggaagaattctgctgtgaagaacacagtgtacggatcctccgcatattatctcaacagaggacagtagctcaggaggcagcttcaaacggtgacctgtggcctgggccatctcttcgtcatgtgcttcacttttccctgtttccctgtgaactggcttccatggttctgtagggtagtgagtcggggttgtggctgcagcagagcaggagatgcttgcccgagtgggagcaacccacccccgtgtccccaatgcctcactcctggcttctagtgcagccctttgtagactcacctcgcaagaaggaagatctgcctggagacctgatcccagtccagctttttgaccataggtcatctttgtccccttgctcctttgcatcatgtcataaaatttgaggatatcagctgattattttttcttccaagaatgaaaatcaagcagaattgattcctacacgaaaaaaaagcacacgaatgccaaacctttcctttggtggactggacactaaccagatgagagtaaatttcttatccgtggacgtatgtaagctactgctgctgtgtgctctccacagccatatttattgtattaaacaatcagcactaaaccttcaaaaattgcccagtgttcctagttaaatgttcagaggggagaaatagatatattttaaataatgttttgctaatgaaaagagtaaatatttttgtttaaatcagcaaaaactttccattattttatatttccgtctactatacctaaaacaaaagattgccgttatacctgggttccgctgatgcagtcagccagcacctcctcacatgcacacatgattagacataggtgcactcggtaccaagagtccattttatggtccagcatatactccattgattcatcatcactgcatgtgttcagccagtgtatctcacactatccatacaaatctaaaattgatactggaaatgttattataggaggcagtgatcgcatttaaaatcaggccacctacaagtttaattttcaacatctcatgtttttatttgtcccattacagcctcaaatgttggtcataaaaaaaatttaggctaccaaagtttaaagaataaaatgaaaattttataagaacttacattaaaaactcagtagtttgcatgagtaagaactccttgagatacacagatccccccacatttgtatttaaaataattggtgaggcattgaaatccagaattataagaaagcattactgaatatgtgtgttataaaatcaatattattataaacaaaataggaagctagaaatatttgggatcacagtaatagcttttctcaaatatacttttagaattgaatgtacattatcctatatgtaaaaaagcaaattattaattttaatggagctctcgattgacctttttagcatacttttatagcatgtatattaaaatagaatatattttagcaaaagattgccataaaaccctgacttggctcattttgatatttgcactgtgaagagggcttaaattccaatgtagcaatgtggtggcagacaaatgaaaaactaggaagttctttcacagtaatgcctagttgttccaaatttgctatatttggaggtgctctactggtacttcctgcttgactctctgacctgtgggatgcacattcttcctcagcgctttttccttgttgtggtgacgtacattcactatctgagagtgaaagaccacacacacccctctttttaaaattattgtatctcttccttttcactttggtttgaacaaagatagtgtcaccttgttccgtgaaaaagaaaaagcataaacagtgtatatttagggtatatgggtgatagcttatgatgtgtgtcaatcagttctctgaatcttttactgaaactgagacaggaaaataaaactgaaacaaatca

SEQ ID NO: 47972 - DNA, 3353 bp, Homo sapiens
gcgcgagacctggtgcgggaggcccgggcagggagaagtgtgcggggccgggacaagccggctccgagtccggctccggggggcggggcgggaggggcctgcgcggcggcgggagcccagagccgcgctaaagcgggtcaagcgtcctccttttctccccgccccttctcctcctcctacctgggcctctgcgtggagacgcgcacctggcaaccggaggccgcgtctccgccttctctgctcgcgcctggcgcccggagcctgcccgggacctccgccggagccgcgctcgctgcaggcggcctcgagcgctctctcgttgatgccgttttggaggtgaccggcgcggcggccgctctatggtggggccgcgttagtggctgcggctccgcgggactccagggcgcggctgcgaggtggcggggcgccccgcctgcagaaccctgcttgcagctcaggtttcggggtgcttgaggaggccgccacggcagcgcgggagcggaagatgttggagctgaggcaccggggaagctgccccggccccagggaagcggtgtcgccgccacaccgcgagggagaggcggccggcggcgaccacgaaaccgagagcaccagcgacaaagaaacagatattgatgacagatatggagatttggattccagaacagattctgatattccggaaattccaccatcctcagatagaacccctgagattctcaaaaaagctctatctggtttatcttcaaggtggaaaaactggtggatacgtggaattctcactctaactatgatctcgttgtttttcctgatcatctatatgggatccttcatgctgatgcttcttgttctgggcatccaagtgaaatgcttccatgaaattatcactataggttatagagtctatcattcttatgatctaccatggtttagaacactaagttggtactttctattgtgtgtaaactactttttctatggagagactgtagctgattattttgctacatttgttcaaagagaagaacaacttcagttcctcattcgctaccatagatttatatcatttgccctctatctggcaggtttctgcatgtttgtactgagtttggtgaagaaacattatcgtctgcagttttatatgttcgcatggactcatgtcactttactgataactgtcactcagtcacaccttgtcatccaaaatctgtttgaaggcatgatatggttccttgttccaatatcaagtgttatctgcaatgacataactgcttacctttttggatttttttttgggagaactccattaattaagttgtctcctaaaaagacttgggaaggattcattggtggtttcttttccacagttgtgtttggattcattgctgcctatgtgttatccaaataccagtactttgtctgcccagtggaataccgaagtgatgtaaactccttcgtgacagaatgtgagccctcagaacttttccagcttcagacttactcacttccaccctttctaaaggcagtcttgagacaggaaagagtgagcttgtaccctttccagatccacagcattgcactgtcaacctttgcatctttaattggcccatttggaggcttctttgctagtggattcaaaagagccttcaaaatcaaggattttgcaaataccattcctggacatggtgggataatggacagatttgattgtcagtatttgatggcaacttttgtacatgtgtacatcacaagttttataaggggcccaaatcccagcaaagtgctacagcagttgttggtgcttcaacctgaacagcagttaaatatatataaaaccctgaagactcatctcattgagaaaggaatcctacaacccaccttgaaggtataactggatccagagagggaaggactgacaagaaggaattattcagaaaaacactgacagatgttttataaattgtacagaaaaatagttaaaaatgcaataggttgaagttttggagatatgtttctctctgaaattactgtgaatatttaacaaacacttacttgatctatgttatgaaataagtagcaaattgccagcaaaatgtcttgtaccttttctaaagtgtattttctgatgtgaacttccttccccttacttgctaggtttcataatttaaaagactggtatttaaaagagtcaaacactataaaatgagtaagttgacgatgttttaagattgcacctggcagtgtgcctttttgcaacaaatatttacctggcagtgtgcctttttgcaacaaatatttacttttgcacttggagctgcttttaattttagcaaaatgttttatgcaaggcacaataggaagtcagttctcctgcacttcctcctcatgtagtctggagtactttctaaagggcttagttggatttaaaaaaaaaaaaaaaagattgtctacttttcaaagaagtaaccatttgccaggggaaaacattctgcttttaggtagtttcaaaattcaggggagggagcctgaaatttttgccatgattggtttgttagaaagagcaggcatcagactacttctgataaaattgtttggaaggtcacgacctcgcaaaaacttttcaagagcaacaaggaagaattctgctgtgaagaacacagtgtacggatcctccgcatattatctcaacagaggacagtagctcaggaggcagcttcaaacggtgacctgtggcctgggccatctcttcgtcatgtgcttcacttttccctgtttccctgtgaactggcttccatggttctgtagggtagtgagtcggggttgtggctgcagcagagcaggagatgcttgcccgagtgggagcaacccacccccgtgtccccaatgcctcactcctggcttctagtgcagccctttgtagactcacctcgcaagaaggaagatctgcctggagacctgatcccagtccagctttttgaccataggtcatctttgtccccttgctcctttgcatcatgtcataaaatttgaggatatcagctgattattttttcttccaagaatgaaaatcaagcagaattgattcctacacgaaaaaaaagcacacgaatgccaaacctttcctttggtggactggacactaaccagatgagagtaaatttcttatccgtggacgtatgtaagctactgctgctgtgtgctctccacagccatatttattgtattaaacaatcagcactaaaccttcaaaaattgcccagtgttcctagttaaatgttcagaggggagaaatagatatattttaaataatgttttgctaatgaaaagagtaaatatttttgtttaaatcagca

SEQ ID NO: 47973 - DNA, 2823 bp, Homo sapiens
cggccgccgcgccggtcacctccaaaacggcatcaacgagagagcgctcgaggccgcctgcagcgagcgcggctccggcggaggtcccgggcaggctccgggcgccaggcgcgagcagagaaggcggagacgcggcctccggttgccaggtgcgcgtctccacgcagaggcccaggtaggaggaggagaagggaaggactgacaagaaggaattattcagaaaaacactgacagatgttttataaattgtacagaaaaatagttaaaaatgcaataggttgaagttttggagatatgtttctctctgaaattactgtgaatatttaacaaacacttacttgatctatgttatgaaataagtagcaaattgccagcaaaatgtcttgtaccttttctaaagtgtattttctgatgtgaacttccttccccttacttgctaggtttcataatttaaaagactggtatttaaaagagtcaaacactataaaatgagtaagttgacgatgttttaagattgcacctggcagtgtgcctttttgcacaaatatttacttttgcacttggagctgcttttaattttagcaaaatgttttatgcaaggcacaataggaagtcagttctcctgcacttcctcctcatgtagtctggagtactttctaaagggcttagttggatttaaaaaaaaaaaaaaaagattgtctacttttcaaagaagtaaccatttgccaggggaaaacattctgcttttaggtagtttcaaaattcaggggagggagcctgaaatttttgccatgattggtttgttagaaagagcaggcatcagactacttctgataaaattgtttggaaggtcacgacctcgcaaaaacttttcaagagcaacaaggaagaattctgctgtgaagaacacagtgtacggatcctccgcatattatctcaacagaggacagtagctcaggaggcagcttcaaacggtgacctgtggcctgggccatctcttcgtcatgtgcttcacttttccctgtttccctgtgaactggcttccatggttctgtagggtagtgagtcggggttgtggctgcagcagagcaggagatgcttgcccgagtgggagcaacccacccccgtgtccccaatgcctcactcctggcttctagtgcagccctttgtagactcacctcgcaagaaggaagatctgcctggagacctgatcccagtccagctttttgaccataggtcatctttgtccccttgctcctttgcatcatgtcataaaatttgaggatatcagctgattattttttcttccaagaatgaaaatcaagcagaattgattcctacacgaaaaaaaagcacacgaatgccaaacctttcctttggtggactggacactaaccagatgagagtaaatttcttatccgtggacgtatgtaagctactgctgctgtgtgctctccacagccatatttattgtattaaacaatcagcactaaaccttcaaaaattgcccagtgttcctagttaaatgttcagaggggagaaatagatatattttaaataatgttttgctaatgaaaagagtaaatatttttgtttaaatcagcaaaaactttccattattttatatttccgtctactatacctaaaacaaaagattgccgttatacctgggttccgctgatgcagtcagccagcacctcctcacatgcacacatgattagacataggtgcactcggtaccaagagtccattttatggtccagcatatactccattgattcatcatcactgcatgtgttcagccagtgtatctcacactatccatacaaatctaaaattgatactggaaatgttattataggaggcagtgatcgcatttaaaatcaggccacctacaagtttaattttcaacatctcatgtttttatttgtcccattacagcctcaaatgttggtcataaaaaaaatttaggctaccaaagtttaaagaataaaatgaaaattttataagaacttacattaaaaactcagtagtttgcatgagtaagaactccttgagatacacagatccccccacatttgtatttaaaataattggtgaggcattgaaatccagaattataagaaagcattactgaatatgtgtgttataaaatcaatattattataaacaaaataggaagctagaaatatttgggatcacagtaatagcttttctcaaatatacttttagaattgaatgtacattatcctatatgtaaaaaagcaaattattaattttaatggagctctcgattgacctttttagcatacttttatagcatgtatattaaaatagaatatattttagcaaaagattgccataaaaccctgacttggctcattttgatatttgcactgtgaagagggcttaaattccaatgtagcaatgtggtggcagacaaatgaaaaactaggaagttctttcacagtaatgcctagttgttccaaatttgctatatttggaggtgctctactggtacttcctgcttgactctctgacctgtgggatgcacattcttcctcagcgctttttccttgttgtggtgacgtacattcactatctgagagtgaaagaccacacacacccctctttttaaaattattgtatctcttccttttcactttggtttgaacaaagatagtgtcaccttgttccgtgaaaaagaaaaagcataaacagtgtatatttagggtatatgggtgatagcttatgatgtgtgtcaatcagttctctgaatcttttactgaaactgagacaggaaaataaaactgaaacaaatca

SEQ ID NO: 47974 - DNA, 961 bp, Homo sapiens
cctactactactaaattcgcggccgcgtcgacacaagtttaattttcaacatctcatgtttttatttgtcccattacagcctcaaatgttggtcataaaaaaaatttaggctaccaaagtttaaagaataaaatgaaaattttataagaacttacattaaaaactcagtagtttgcatgagtaagaactccttgagatacacagatccccccacatttgtatttaaaataattggtgaggcattgaaatccagaattataagaaagcattactgaatatgtgtgttataaaatcaatattattataaacaaaataggaagctagaaatatttgggatcacagtaatagcttttctcaaatatacttttagaattgaatgtacattatcctatatgtaaaaaagcaaattattaattttaatggagctctcgattgacctttttagcatacttttatagcatgtatattaaaatagaatatattttagcaaaagattgccataaaaccctgacttggctcattttgatatttgcactgtgaagagggcttaaattccaatgtagcaatgtggtggcagacaaatgaaaaactaggaagttctttcacagtaatgcctagttgttccaaatttgctatatttggaggtgctctactggtacttcctgcttgactctctgacctgtgggatgcacattcttcctcagcgctttttccttgttgtggtgacgtacattcactatctgagagtgaaagaccacacacacccctctttttaaaattattgtatctcttccttttcactttggtttgaacaaagatagtgtcaccttgttccgtgaaaaagaaaaagcataaacagtgtatatttagggtatatgggtgatagcttatgatgtgtgtcaatcagttctctgaatcttttactgaaactgagacaggaaaataaaactgaaacaaatca

SEQ ID NO: 47975 - DNA, 351 bp, Homo sapiens
tacagagagaagggaaattgctggctaagtagaggatggtacagaaggcttaaatagacttttcttccttgatccttaaagtttgaaaaattaacaaaaatgtggtgcgtgctttgacttactatttacacaatggttcttagatcaggtggtatgctcaaatacaatttcagtgaaattagcccctctcctccccttctttctcctctttaggaaagagtgagcttgtaccctttccagatccacagcattgcactgtcaacctttgcatctttaattggcccatttggaggcttctttgctagtggattcaaaagagccttcaaaatcaaggtgtgtgtttagattctt

SEQ ID NO: 47976 - DNA, 283 bp, Homo sapiens
ctaaagtgtattttctgatgtgaacttccttccccttacttgctaggtttcataatttaaaagactggtatttaaaagagtcaaacactataaaatgagtaagttgacgatgttttaagattgcacctggcagtgtgcctttttgcacaaatatttacttttgcacttggagctgcttttaattttagcaaaatgttttatgcaaggcacaataggaagtcagttctcctgcacttcctcctcatgtagtctggagtactttctaaagggcttagttggattt

SEQ ID NO: 47977 - DNA, 4537 bp, Homo sapiens
gcgcgagacctggtgcgggaggcccgggcagggagaagtgtgcggggccgggacaagccggctccgagtccggctccggggggcggggcgggaggggcctgcgcggcggcgggagcccagagccgcgctaaagcgggtcaagcgtcctccttttctccccgccccttctcctcctcctacctgggcctctgcgtggagacgcgcacctggcaaccggaggccgcgtctccgccttctctgctcgcgcctggcgcccggagcctgcccgggacctccgccggagccgcgctcgctgcaggcggcctcgagcgctctctcgttgatgccgttttggaggtgaccggcgcggcggccgctctatggtggggccgcgttagtggctgcggctccgcgggactccagggcgcggctgcgaggtggcggggcgccccgcctgcagaaccctgcttgcagctcaggtttcggggtgcttgaggaggccgccacggcagcgcgggagcggaagatgttggagctgaggcaccggggaagctgccccggccccagggaagcggtgtcgccgccacaccgcgagggagaggcggccggcggcgaccacgaaaccgagagcaccagcgacaaagaaacagatattgatgacagatatggagatttggattccagaacagattctgatattccggaaattccaccatcctcagatagaacccctgagattctcaaaaaagctctatctggtttatcttcaaggtggaaaaactggtggatacgtggaattctcactctaactatgatctcgttgtttttcctgatcatctatatgggatccttcatgctgatgcttcttgttctgggcatccaagtgaaatgcttccatgaaattatcactataggttatagagtctatcattcttatgatctaccatggtttagaacactaagttggtactttctattgtgtgtaaactactttttctatggagagactgtagctgattattttgctacatttgttcaaagagaagaacaacttcagttcctcattcgctaccatagatttatatcatttgccctctatctggcaggtttctgcatgtttgtactgagtttggtgaagaaacattatcgtctgcagttttatatgttcgcatggactcatgtcactttactgataactgtcactcagtcacaccttgtcatccaaaatctgtttgaaggcatgatatggttccttgttccaatatcaagtgttatctgcaatgacataactgcttacctttttggatttttttttgggagaactccattaattaagttgtctcctaaaaagacttgggaaggattcattggtggtttcttttccacagttgtgtttggattcattgctgcctatgtgttatccaaataccagtactttgtctgcccagtggaataccgaagtgatgtaaactccttcgtgacagaatgtgagccctcagaacttttccagcttcagacttactcacttccaccctttctaaaggcagtcttgagacaggaaagagtgagcttgtaccctttccagatccacagcattgcactgtcaacctttgcatctttaattggcccatttggaggcttctttgctagtggattcaaaagagccttcaaaatcaaggattttgcaaataccattcctggacatggtgggataatggacagatttgattgtcagtatttgatggcaacttttgtacatgtgtacatcacaagttttataaggggcccaaatcccagcaaagtgctacagcagttgttggtgcttcaacctgaacagcagttaaatatatataaaaccctgaagactcatctcattgagaaaggaatcctacaacccaccttgaaggtataactggatccagagagggaaggactgacaagaaggaattattcagaaaaacactgacagatgttttataaattgtacagaaaaatagttaaaaatgcaataggttgaagttttggagatatgtttctctctgaaattactgtgaatatttaacaaacacttacttgatctatgttatgaaataagtagcaaattgccagcaaaatgtcttgtaccttttctaaagtgtattttctgatgtgaacttccttccccttacttgctaggtttcataatttaaaagactggtatttaaaagagtcaaacactataaaatgagtaagttgacgatgttttaagattgcacctggcagtgtgcctttttgcacaaatatttacttttgcacttggagctgcttttaattttagcaaaatgttttatgcaaggcacaataggaagtcagttctcctgcacttcctcctcatgtagtctggagtactttctaaagggcttagttggatttaaaaaaaaaaaaaaaagattgtctacttttcaaagaagtaaccatttgccaggggaaaacattctgcttttaggtagtttcaaaattcaggggagggagcctgaaatttttgccatgattggtttgttagaaagagcaggcatcagactacttctgataaaattgtttggaaggtcacgacctcgcaaaaacttttcaagagcaacaaggaagaattctgctgtgaagaacacagtgtacggatcctccgcatattatctcaacagaggacagtagctcaggaggcagcttcaaacggtgacctgtggcctgggccatctcttcgtcatgtgcttcacttttccctgtttccctgtgaactggcttccatggttctgtagggtagtgagtcggggttgtggctgcagcagagcaggagatgcttgcccgagtgggagcaacccacccccgtgtccccaatgcctcactcctggcttctagtgcagccctttgtagactcacctcgcaagaaggaagatctgcctggagacctgatcccagtccagctttttgaccataggtcatctttgtccccttgctcctttgcatcatgtcataaaatttgaggatatcagctgattattttttcttccaagaatgaaaatcaagcagaattgattcctacacgaaaaaaaagcacacgaatgccaaacctttcctttggtggactggacactaaccagatgagagtaaatttcttatccgtggacgtatgtaagctactgctgctgtgtgctctccacagccatatttattgtattaaacaatcagcactaaaccttcaaaaattgcccagtgttcctagttaaatgttcagaggggagaaatagatatattttaaataatgttttgctaatgaaaagagtaaatatttttgtttaaatcagcaaaaactttccattattttatatttccgtctactatacctaaaacaaaagattgccgttatacctgggttccgctgatgcagtcagccagcacctcctcacatgcacacatgattagacataggtgcactcggtaccaagagtccattttatggtccagcatatactccattgattcatcatcactgcatgtgttcagccagtgtatctcacactatccatacaaatctaaaattgatactggaaatgttattataggaggcagtgatcgcatttaaaatcaggccacctacaagtttaattttcaacatctcatgtttttatttgtcccattacagcctcaaatgttggtcataaaaaaaatttaggctaccaaagtttaaagaataaaatgaaaattttataagaacttacattaaaaactcagtagtttgcatgagtaagaactccttgagatacacagatccccccacatttgtatttaaaataattggtgaggcattgaaatccagaattataagaaagcattactgaatatgtgtgttataaaatcaatattattataaacaaaataggaagctagaaatatttgggatcacagtaatagcttttctcaaatatacttttagaattgaatgtacattatcctatatgtaaaaaagcaaattattaattttaatggagctctcgattgacctttttagcatacttttatagcatgtatattaaaatagaatatattttagcaaaagattgccataaaaccctgacttggctcattttgatatttgcactgtgaagagggcttaaattccaatgtagcaatgtggtggcagacaaatgaaaaactaggaagttctttcacagtaatgcctagttgttccaaatttgctatatttggaggtgctctactggtacttcctgcttgactctctgacctgtgggatgcacattcttcctcagcgctttttccttgttgtggtgacgtacattcactatctgagagtgaaagaccacacacacccctctttttaaaattattgtatctcttccttttcactttggtttgaacaaagatagtgtcaccttgttccgtgaaaaagaaaaagcataaacagtgtatatttagggtatatgggtgatagcttatgatgtgtgtcaatcagttctctgaatcttttactgaaactgagacaggaaaataaaactgaaacaaatca

SEQ ID NO: 47978 - DNA, 4344 bp, Homo sapiens
gcgcgagacctggtgcgggaggcccgggcagggagaagtgtgcggggccgggacaagccggctccgagtccggctccggggggcggggcgggaggggcctgcgcggcggcgggagcccagagccgcgctaaagcgggtcaagcgtcctccttttctccccgccccttctcctcctcctacctgggcctctgcgtggagacgcgcacctggcaaccggaggccgcgtctccgccttctctgctcgcgcctggcgcccggagcctgcccgggacctccgccggagccgcgctcgctgcaggcggcctcgagcgctctctcgttgatgccgttttggaggtgaccggcgcggcggccgctctatggtggggccgcgttagtggctgcggctccgcgggactccagggcgcggctgcgaggtggcggggcgccccgcctgcagaaccctgcttgcagctcaggtttcggggtgcttgaggaggccgccacggcagcgcgggagcggaagatgttggagctgaggcaccggggaagctgccccggccccagggaagcggtgtcgccgccacaccgcgagggagaggcggccggcggcgaccacgaaaccgagagcaccagcgacaaagaaacagatattgatgacagatatggagatttggattccagaacagattctgatattccggaaattccaccatcctcagatagaacccctgagattctcaaaaaagctctatctggtttatcttcaaggtggaaaaactggtggatacgtggaattctcactctaactatgatctcgttgtttttcctgatcatctatatgggatccttcatgctgatgcttcttgttctgggcatccaagtgaaatgcttccatgaaattatcactataggttatagagtctatcattcttatgatctaccatggtttagaacactaagttggtactttctattgtgtgtaaactactttttctatggagagactgtagctgattattttgctacatttgttcaaagagaagaacaacttcagttcctcattcgctaccatagatttatatcatttgccctctatctggcaggtttctgcatgtttgtactgagtttggtgaagaaacattatcgtctgcagttttatatgttcgcatggactcatgtcactttactgataactgtcactcagtcacaccttgtcatccaaaatctgtttgaaggcatgatatggttccttgttccaatatcaagtgttatctgcaatgacataactgcttacctttttggatttttttttgggagaactccattaattaagttgtctcctaaaaagacttgggaaggattcattggtggtttcttttccacagttgtgtttggattcattgctgcctatgtgttatccaaataccagtactttgtctgcccagtggaataccgaagtgatgtaaactccttcgtgacagaatgtgagccctcagaacttttccagcttcagacttactcacttccaccctttctaaaggcagtcttgagacaggaaagagtgagcttgtaccctttccagatccacagcattgcactgtcaacctttgcatctttaattggcccatttggaggcttctttgctagtggattcaaaagagccttcaaaatcaaggattttgcaaataccattcctggacatggtgggataatggacagatttgattgtcagtatttgatggcaacttttgtacatgtgtacatcacaagttttataaggggcccaaatcccagcaaagtgctacagcagttgttggtgcttcaacctgaacagcagttaaatatatataaaaccctgaagactcatctcattgagaaaggaatcctacaacccaccttgaaggtataactggatccagagagggaaggactgacaagaaggaattattcagaaaaacactgacagatgttttataaattgtacagaaaaatagttaaaaatgcaataggttgaagttttggagatatgtttctctctgaaattactgtgaatatttaacaaacacttacttgatctatgttatgaaataagtagcaaattgccagcaaaatgtcttgtaccttttctaaagtgtattttctgatgtgaacttccttccccttacttgctaggtttcataatttaaaagactggtatttaaaagagtcaaacactataaaatgagtaagttgacgatgttttaagattgcacctggcagtgtgcctttttgcaacaaatatttacctggcagtgtgcctttttgcaacaaatatttacttttgcacttggagctgcttttaattttagcaaaatgttttatgcaaggcacaataggaagtcagttctcctgcacttcctcctcatgtagtctggagtactttctaaagggcttagttggatttaaaaaaaaaaaaaaaagattgtctacttttcaaagaagtaaccatttgccaggggaaaacattctgcttttaggtagtttcaaaattcaggggagggagcctgaaatttttgccatgattggtttgttagaaagagcaggcatcagactacttctgataaaattgtttggaaggtcacgacctcgcaaaaacttttcaagagcaacaaggaagaattctgctgtgaagaacacagtgtacggatcctccgcatattatctcaacagaggacagtagctcaggaggcagcttcaaacggtgacctgtggcctgggccatctcttcgtcatgtgcttcacttttccctgtttccctgtgaactggcttccatggttctgtagggtagtgagtcggggttgtggctgcagcagagcaggagatgcttgcccgagtgggagcaacccacccccgtgtccccaatgcctcactcctggcttctagtgcagccctttgtagactcacctcgcaagaaggaagatctgcctggagacctgatcccagtccagctttttgaccataggtcatctttgtccccttgctcctttgcatcatcttcaaaaattgcccagtgttcctagttaaatgttcagaggggagaaatagatatattttaaataatgttttgctaatgaaaagagtaaatatttttgtttaaatcagcaaaaactttccattattttatatttccgtctactatacctaaaacaaaagattgccgttatacctgggttccgctgatgcagtcagccagcacctcctcacatgcacacatgattagacataggtgcactcggtaccaagagtccattttatggtccagcatatactccattgattcatcatcactgcatgtgttcagccagtgtatctcacactatccatacaaatctaaaattgatactggaaatgttattataggaggcagtgatcgcatttaaaatcaggccacctacaagtttaattttcaacatctcatgtttttatttgtcccattacagcctcaaatgttggtcataaaaaaaatttaggctaccaaagtttaaagaataaaatgaaaattttataagaacttacattaaaaactcagtagtttgcatgagtaagaactccttgagatacacagatccccccacatttgtatttaaaataattggtgaggcattgaaatccagaattataagaaagcattactgaatatgtgtgttataaaatcaatattattataaacaaaataggaagctagaaatatttgggatcacagtaatagcttttctcaaatatacttttagaattgaatgtacattatcctatatgtaaaaaagcaaattattaattttaatggagctctcgattgacctttttagcatacttttatagcatgtatattaaaatagaatatattttagcaaaagattgccataaaaccctgacttggctcattttgatatttgcactgtgaagagggcttaaattccaatgtagcaatgtggtggcagacaaatgaaaaactaggaagttctttcacagtaatgcctagttgttccaaatttgctatatttggaggtgctctactggtacttcctgcttgactctctgacctgtgggatgcacattcttcctcagcgctttttccttgttgtggtgacgtacattcactatctgagagtgaaagaccacacacacccctctttttaaaattattgtatctcttccttttcactttggtttgaacaaagatagtgtcaccttgttccgtgaaaaagaaaaagcataaacagtgtatatttagggtatatgggtgatagcttatgatgtgtgtcaatcagttctctgaatcttttactgaaactgagacaggaaaataaaactgaaacaaatca

SEQ ID NO: 47979 - DNA, 4478 bp, Homo sapiens
gcgcgagacctggtgcgggaggcccgggcagggagaagtgtgcggggccgggacaagccggctccgagtccggctccggggggcggggcgggaggggcctgcgcggcggcgggagcccagagccgcgctaaagcgggtcaagcgtcctccttttctccccgccccttctcctcctcctacctgggcctctgcgtggagacgcgcacctggcaaccggaggccgcgtctccgccttctctgctcgcgcctggcgcccggagcctgcccgggacctccgccggagccgcgctcgctgcaggcggcctcgagcgctctctcgttgatgccgttttggaggtgaccggcgcggcggccgctctatggtggggccgcgttagtggctgcggctccgcgggactccagggcgcggctgcgaggtggcggggcgccccgcctgcagaaccctgcttgcagctcaggtttcggggtgcttgaggaggccgccacggcagcgcgggagcggaagatgttggagctgaggcaccggggaagctgccccggccccagggaagcggtgtcgccgccacaccgcgagggagaggcggccggcggcgaccacgaaaccgagagcaccagcgacaaagaaacagatattgatgacagatatggagatttggattccagaacagattctgatattccggaaattccaccatcctcagatagaacccctgagattctcaaaaaagctctatctggtttatcttcaagtgatcatctatatgggatccttcatgctgatgcttcttgttctgggcatccaagtgaaatgcttccatgaaattatcactataggttatagagtctatcattcttatgatctaccatggtttagaacactaagttggtactttctattgtgtgtaaactactttttctatggagagactgtagctgattattttgctacatttgttcaaagagaagaacaacttcagttcctcattcgctaccatagatttatatcatttgccctctatctggcaggtttctgcatgtttgtactgagtttggtgaagaaacattatcgtctgcagttttatatgttcgcatggactcatgtcactttactgataactgtcactcagtcacaccttgtcatccaaaatctgtttgaaggcatgatatggttccttgttccaatatcaagtgttatctgcaatgacataactgcttacctttttggatttttttttgggagaactccattaattaagttgtctcctaaaaagacttgggaaggattcattggtggtttcttttccacagttgtgtttggattcattgctgcctatgtgttatccaaataccagtactttgtctgcccagtggaataccgaagtgatgtaaactccttcgtgacagaatgtgagccctcagaacttttccagcttcagacttactcacttccaccctttctaaaggcagtcttgagacaggaaagagtgagcttgtaccctttccagatccacagcattgcactgtcaacctttgcatctttaattggcccatttggaggcttctttgctagtggattcaaaagagccttcaaaatcaaggattttgcaaataccattcctggacatggtgggataatggacagatttgattgtcagtatttgatggcaacttttgtacatgtgtacatcacaagttttataaggggcccaaatcccagcaaagtgctacagcagttgttggtgcttcaacctgaacagcagttaaatatatataaaaccctgaagactcatctcattgagaaaggaatcctacaacccaccttgaaggtataactggatccagagagggaaggactgacaagaaggaattattcagaaaaacactgacagatgttttataaattgtacagaaaaatagttaaaaatgcaataggttgaagttttggagatatgtttctctctgaaattactgtgaatatttaacaaacacttacttgatctatgttatgaaataagtagcaaattgccagcaaaatgtcttgtaccttttctaaagtgtattttctgatgtgaacttccttccccttacttgctaggtttcataatttaaaagactggtatttaaaagagtcaaacactataaaatgagtaagttgacgatgttttaagattgcacctggcagtgtgcctttttgcacaaatatttacttttgcacttggagctgcttttaattttagcaaaatgttttatgcaaggcacaataggaagtcagttctcctgcacttcctcctcatgtagtctggagtactttctaaagggcttagttggatttaaaaaaaaaaaaaaaagattgtctacttttcaaagaagtaaccatttgccaggggaaaacattctgcttttaggtagtttcaaaattcaggggagggagcctgaaatttttgccatgattggtttgttagaaagagcaggcatcagactacttctgataaaattgtttggaaggtcacgacctcgcaaaaacttttcaagagcaacaaggaagaattctgctgtgaagaacacagtgtacggatcctccgcatattatctcaacagaggacagtagctcaggaggcagcttcaaacggtgacctgtggcctgggccatctcttcgtcatgtgcttcacttttccctgtttccctgtgaactggcttccatggttctgtagggtagtgagtcggggttgtggctgcagcagagcaggagatgcttgcccgagtgggagcaacccacccccgtgtccccaatgcctcactcctggcttctagtgcagccctttgtagactcacctcgcaagaaggaagatctgcctggagacctgatcccagtccagctttttgaccataggtcatctttgtccccttgctcctttgcatcatgtcataaaatttgaggatatcagctgattattttttcttccaagaatgaaaatcaagcagaattgattcctacacgaaaaaaaagcacacgaatgccaaacctttcctttggtggactggacactaaccagatgagagtaaatttcttatccgtggacgtatgtaagctactgctgctgtgtgctctccacagccatatttattgtattaaacaatcagcactaaaccttcaaaaattgcccagtgttcctagttaaatgttcagaggggagaaatagatatattttaaataatgttttgctaatgaaaagagtaaatatttttgtttaaatcagcaaaaactttccattattttatatttccgtctactatacctaaaacaaaagattgccgttatacctgggttccgctgatgcagtcagccagcacctcctcacatgcacacatgattagacataggtgcactcggtaccaagagtccattttatggtccagcatatactccattgattcatcatcactgcatgtgttcagccagtgtatctcacactatccatacaaatctaaaattgatactggaaatgttattataggaggcagtgatcgcatttaaaatcaggccacctacaagtttaattttcaacatctcatgtttttatttgtcccattacagcctcaaatgttggtcataaaaaaaatttaggctaccaaagtttaaagaataaaatgaaaattttataagaacttacattaaaaactcagtagtttgcatgagtaagaactccttgagatacacagatccccccacatttgtatttaaaataattggtgaggcattgaaatccagaattataagaaagcattactgaatatgtgtgttataaaatcaatattattataaacaaaataggaagctagaaatatttgggatcacagtaatagcttttctcaaatatacttttagaattgaatgtacattatcctatatgtaaaaaagcaaattattaattttaatggagctctcgattgacctttttagcatacttttatagcatgtatattaaaatagaatatattttagcaaaagattgccataaaaccctgacttggctcattttgatatttgcactgtgaagagggcttaaattccaatgtagcaatgtggtggcagacaaatgaaaaactaggaagttctttcacagtaatgcctagttgttccaaatttgctatatttggaggtgctctactggtacttcctgcttgactctctgacctgtgggatgcacattcttcctcagcgctttttccttgttgtggtgacgtacattcactatctgagagtgaaagaccacacacacccctctttttaaaattattgtatctcttccttttcactttggtttgaacaaagatagtgtcaccttgttccgtgaaaaagaaaaagcataaacagtgtatatttagggtatatgggtgatagcttatgatgtgtgtcaatcagttctctgaatcttttactgaaactgagacaggaaaataaaactgaaacaaatca

SEQ ID NO: 47980 - DNA, 2597 bp, Homo sapiens
  misc_feature (2561)..(2561): n is a, c, g, or t
gcgcgagacctggtgcgggaggcccgggcagggagaagtgtgcggggccgggacaagccggctccgagtccggctccggggggcggggcgggaggggcctgcgcggcggcgggagcccagagccgcgctaaagcgggtcaagcgtcctccttttctccccgccccttctcctcctcctacctgggcctctgcgtggagacgcgcacctggcaaccggaggccgcgtctccgccttctctgctcgcgcctggcgcccggagcctgcccgggacctccgccggagccgcgctcgctgcaggcggcctcgagcgctctctcgttgatgccgttttggaggtgaccggcgcggcggccgctctatggtggggccgcgttagtggctgcggctccgcgggactccagggcgcggctgcgaggtggcggggcgccccgcctgcagaaccctgcttgcagctcaggtttcggggtgcttgaggaggccgccacggcagcgcgggagcggaagatgttggagctgaggcaccggggaagctgccccggccccagggaagcggtgtcgccgccacaccgcgagggagaggcggccggcggcgaccacgaaaccgagagcaccagcgacaaagaaacagatattgatgacagatatggagatttggattccagaacagattctgatattccggaaattccaccatcctcagatagaacccctgagattctcaaaaaagctctatctggtttatcttcaaggtggaaaaactggtggatacgtggaattctcactctaactatgatctcgttgtttttcctgatcatctatatgggatccttcatgctgatgcttcttgttctgggcatccaagtgaaatgcttccatgaaattatcactataggttatagagtctatcattcttatgatctaccatggtttagaacactaagttggtactttctattgtgtgtaaactactttttctatggagagactgtagctgattattttgctacatttgttcaaagagaagaacaacttcagttcctcattcgctaccatagatttatatcatttgccctctatctggcaggtttctgcatgtttgtactgagtttggtgaagaaacattatcgtctgcagttttatatgttcgcatggactcatgtcactttactgataactgtcactcagtcacaccttgtcatccaaaatctgtttgaaggcatgatatggttccttgttccaatatcaagtgttatctgcaatgacataactgcttacctttttggatttttttttgggagaactccattaattaagttgtctcctaaaaagacttgggaaggattcattggtggtttcttttccacagttgtgtttggattcattgctgcctatgtgttatccaaataccagtactttgtctgcccagtggaataccgaagtgatgtaaactccttcgtgacagaatgtgagccctcagaacttttccagcttcagacttactcacttccaccctttctaaaggcagtcttgagacaggaaagagtgagcttgtaccctttccagatccacagcattgcactgtcaacctttgcatctttaattggcccatttggaggcttctttgctagtggattcaaaagagccttcaaaatcaaggattttgcaaataccattcctggacatggtgggataatggacagatttgattgtcagtatttgatggcaacttttgtacatgtgtacatcacaagttttataaggggcccaaatcccagcaaagtgctacagcagttgttggtgcttcaacctgaacagcagttaaatatatataaaaccctgaagactcatctcattgagaaaggaatcctacaacccaccttgaaggtataactggatccagagagggaaggactgacaagaaggaattattcagaaaaacactgacagatgttttataaattgtacagaaaaatagttaaaaatgcaataggttgaagttttggagatatgtttctctctgaaattactgtgaatatttaacaaacacttacttgatctatgttatgaaataagtagcaaattgccagcaaaatgtcttgtaccttttctaaagtgtattttctgatgtgaacttccttccccttacttgctaggtttcataatttaaaagactggtatttaaaagagtcaaacactataaaatgagtaagttgacgatgttttaagattgcacctggcagtgtgcctttttgcaacaaatatttacctggcagtgtgcctttttgcaacaaatatttacttttgcacttggagctgcttttaattttagcaaaatgttttatgcaaggcacaataggaagtcagttctcctgcacttcctcctcatgtagtctggagtactttctaaagggcttagttggatttaaaaaaaaaaaaaaaagattgtctacttttcaaagaagtaaccatttgccaggggaaaacattctgcttttaggtagtttcaaaattcaggggagggagcctgaaatttttgccatgattggtttgttagaagtgncagaaacagaccgggatcctctagatcacctcgcac

SEQ ID NO: 47981 - DNA, 296 bp, Homo sapiens
tcccatgcacaaaggagcgagctgcatttggacgggatgggctaccattgcagcatctttccaaactgtggggtgagatagagccactctatctccagtgacactactctgaatgactacagagaggggtccaggaaacaaaaagagcaggtgtctacacccactagggccaggggaccactcccctcatggttacccagcacatcactgagatctttggagccatacccaagtcagaattttagagctggaaagaatctcagtttagctcagcccattaccattttgcagataaa

SEQ ID NO: 47982 - DNA, 428 bp, Homo sapiens
ggagatattgaggcaaaatagctacatgttacttgaaaaatatgaaacagttctacctgttaggaatgtcaaactgagtcctgtagagaactttaactctccttttcttcctacgtttccatttttgttttatattaaccaacttaaggccatctttttttttttttttttgagacagggtctcattctgtctcccaggctggagtgcaaaggcactatcttgactcactgcaacctctgcctcctgggttcaagtgattctccagcctcaacctcccgagtagctgggactacagtcgcctaccaccatgctgagctaagttttgtatttttagtagagacagggtttcaccatgtaggccaggctggtcttgaactcctggtctcaagtgatctacctacctcagcctcccaaagtgctgggatta

SEQ ID NO: 47983 - DNA, 412 bp, Homo sapiens
ctgtcttttaatgagggttgataactatgtgtgtgttcaaagtagataaaggatacaaagcaactacttcaagttattcaaaaagctcaaccagaaaaaacaactaataattgcatgttttccccccaaatgtactcagctagatctttctaagctcttaattcacgtttcacactcaattgatgttatgcaaagtatgtttttaaacatgatccaggaatatcaaatacagctttacacaactcatataattcccatatttatgtaagtatacaaataagcaacatgaactgccagatgctttgggaagaaaattaccagaaaaaaatttgttgttaagtcttccacatctaattgaaacatcagttccagtgagtatttggagaagcaccaatccaacagcttaacataa

SEQ ID NO: 47984 - DNA, 476 bp, Homo sapiens
tatagtgttcattacatgccaggttcaacttggagcattttacacgtattaatttaatcgtcacatcaaccctatgaggtaggactgttattccaaagagggatcatacagctggaagcggcagagcctaaattcaaacctggttagctagcttctattatagaaacctcattttgtctgaatgcccaggggagattagcctcctgaggattgataaaccaaggtcccaagagcccaaggtgtaaataaaatggcaattggttgatttatactggggtgactgaactacttacgtgagttgcccagggcaccctggagtaattctttaagggtggtattccaggcaatctgagttgtattgggaaagcaactgatggaaaaacagaccctctgcttcctgttatgaggacattttttttttttttttgcagaggcaataggaagttgaagcctccacttttgacctcattggagca

SEQ ID NO: 47985 - DNA, 156 bp, Homo sapiens
atctcttgacctgaatgcaatgcagccttaaacctggaagtgggcactggggcccaaaaagggagagctccaggagaaaccctctaggtttctgttacagagctgggtaggaactcctaacgctcagagaaagtacagaagtcctcagagtttttt

SEQ ID NO: 47986 - DNA, 528 bp, Homo sapiens
tttcttaaatggacatttaattgtacatatttatggggtacataatgatgtttcagtacaaataatgtatagtgatgagataaggataattaaatatttttaaatatcagtttcaactcttctagtcctcatgtaccacatccctggagcccgatcccgtgtgtcacctccctcacttctccctcttccaggttaggttcatcatgaaaacagaggacattgggtacgaggtcccctcaacttttcgtgctacctacttgctttcacatttgccagcatccacctttcttctatctcaacagcactgggctttcctcctccataagctcatacccttcacctgagtgtttgaatcccattcccttcctgagtctttaaggagtcctcctcctgtgtcctgtgtcttcagatgggcctctgcacgctctctgccttatagacacttgcttgaacttctcatttaaaacaaaaacattaggaacaaaaccttttcactccctggatcccttcagtcttctagctaccacc

SEQ ID NO: 47987 - DNA, 249 bp, Homo sapiens
ttttttggtttacgtctttagtatctgagctaccatgttaaacaaactttaaggaagtattcaaacaagaaaaaaaataatttcttcatttagtcacacatacacgcaccagaagcacaaaaaaaccaataatcgtacaaggacttctcaaattcttccttatatattgtgtaagaattaccaaatagtaaaatctggaacattcacttttaattttccaagcaaacaagctaatacacaggaaagcaa

SEQ ID NO: 47988 - DNA, 349 bp, Homo sapiens
gtagacagctccagctctatcacaggttctccaaggaagcaggacaacaggcagaggcagcacctcctccctgctggggagaaatggtgtggaaaacctcaactgctgctaagatggacacaccaatgaagtttgttttaaaagtcctatttgagtgtggaatttttgtgacaactttaccttttcactttgaaattatttccaacctaaataaaaatgtcaggccgggcccagtggctcactcctgtaatcttagcactttgggaggtcgaggcaggtggatcacctgaggccaggagttcaagaccagcctggccaatgtagcgaaaccccatctctactaaaaatg

SEQ ID NO: 47989 - DNA, 536 bp, Homo sapiens
aaactttattttttagagcgcttttaggttcacagcaaaattgaacagaaggtagacagatttcctatatatcccctgcctccacacatgcatatagcctcccccattatcaacatctccgaccaaagtggtacatttgttacaattgatgtgctgctcattttctcattcattccaatatgaactgaatacctactaggtgtttttgtgaacaaatggatattagaaagaaaatgcaactcatccctaaagttaataaatactccccaaatcaaacaaaacctaaactgagggaacagaccacctgaaacaaagaagatcaactgtctttttctttgcaaagtctgctctaacagcatgtgacatccatttgaggcttccagccaatcagaaaatcatcaaaacaagatgcaatgtttccaaatcccagccaaagctcatgaaattaagctggtgaaagcaatgccacaaatttaatgttgggcatactaaattttgacacctaaagatgtaagagactagaatgttaaaaacat

SEQ ID NO: 47990 - DNA, 932 bp, Homo sapiens
atggtaaaaatagtagggactgcgggagagagaaagagtagtgtcccctgacaagtactagaatgacataggtgccaccattaaacgaaactagctaggatggttactttcgattaacactttgctactcaagagtgtggtctgcggcatcaccaggagcttgttagaagtggagatctcagacctacctcagatttactgaatcagaatcgttttttttttttttaacaaactcttcagcaggtttagatgtagctttgtttggaggaagtgtgagattcgttttaggatttctcaaggagttccagccttcaatcagtgaccatggggatctggcaggagggcttgaatttctagctgattcttctattctgtcttaccctcctgtcttccatcatttctgcattgctaatctctatccctggagaaatctatggaactgctggttattactgtagaaagtaacatagttgccaatagtacgactttgtggatgtcacagtcaaaactcaactgcctggctggcacagtggctcacctgtaatcccagcactttgggaagacaaggcggcgggcagggggatcctttgagctcaggagttcgggactagcctgggcaacatagcaagaccctgtctctataaaaaagaaaaaaaaatctcaactgcttgacaggctttttattcacttccctttgtataatgcctcctgtagtaccttttttcccctccaaatctccgtttcccccatcctaacctcctcacagtgttagaaatgcaaattactcttaatttctctgtccacttcatatcatattacaatatgaaatctgtcagtttctctttttactttagaaattttgtcttcatccatcttcattcatttctatttatggagtatataacctcattgcctatgaagaacccttccgt

SEQ ID NO: 47991 - DNA, 367 bp, Homo sapiens
ccgtgaagaaggcggcccgggtcatcatagaaaagtactacacgcgcctgggcaacatagcaagaccctgtctctataaaaaagaaaaaaaaatctcaactgcttgacaggctttttattcacttccctttgtataatgcctcctgtagtaccttttttcccctccaaatctccgtttcccccatcctaacctcctcacagtgttagaaatgcaaattactcttaatttctctgtccacttcatatcatattacaatatgaaatctgtcagtttctctttttactttagaaattttgtcttcatccatcttcattcatttctatttatggagtatataacctcattgcctatgaagaacccttccgt

SEQ ID NO: 47992 - DNA, 159 bp, Homo sapiens
cctctctgcattccagagttaggaaagttctgtggttcatcataaatccattttcttttcttcacacctttaaaatgaggcttcttcactggctggacatcattcattgaagagggtcctctctgcagcttgcatactgatattctcagtagcgtttca

SEQ ID NO: 47993 - DNA, 826 bp, Homo sapiens
gaatttggggttatacaagtgacagaattcttgagtctcagttgattataatataatgaggggacagtgccaggtctttcacgtctccaggtgggaaggggacaagttgcacgatggctgtcctcatctgtgcctggttgtgtgagaattagaaacaacgtttgtaacagtggtacctagtctttgtgaccgtggtcctctttttgatattaatatttttgcagactagttggcataaacaagttggctctctgtactcacattacaaccactgaggtataacactatctcttggagtccttagaagcacctcgctctgttcagctggcctctcagccttgtgtggctgtttcagaactgttgatcatctgtcaagtcatcccagagatcatctagatcttgagtccatttcttgcatgttccagaacacaagaaaacatttgtggctatagcttcatattctatcatgcctttcatccctttctcccgataatacatgaacccggttacagcagaaatgcattccatgcatttgcaacactctggaaggagccagtggttcttgtgtggctttaccaggccagtcgagaatcactgggctggtgcatgagaaaccttcagtaagtggctgctgtcttcatgcacccatggaatgccgaggtgttggttttcttcaataacctgctcctcagggcagtgtttcctaattgctggagaatgacccaagagttgatgaaataatatgaaaagtactgtgtttgctgtaagatggacaagtattggtgatataggccaccccactcccaccctccattctttgtcttga

SEQ ID NO: 47994 - DNA, 497 bp, Homo sapiens
tcgtcttttcttgttcttgctgttctcttttcttctttgcagatttcctcactttgagggagtctagggatcttctttctgagtattcctgaaataatattatcacttacttccatacacagacttctttctttcccactcctatgaggttaacactgaggattagaaaaggcttccagcatttgctgttttcccttttctgaattgtaagtgctatttaggacctataaactacctacctgctatagtaaacaatattccagccaagcgtggtggctcacacctgtaatctcaatactttgggaggctaaggtgggaggatcgcctgaggccagacattcaagaccagcctggacaaacaaagcgagaccctgtctctacaaaaaattttaaaagctgagcatgatggcctgaacctgtagtttcagctactctagaggatcgcttgagtccaaagtgattgaggctgcagtgagctatgatcgcactgctgcgct

SEQ ID NO: 47995 - DNA, 223 bp, Homo sapiens
ctttgtcctgaggtcaatgcccaaacattattttataattttagaagaaaaattttagatgcaatgatcttgtggaaagacccaagcaaagtgtcctgatggtcagcatcttatcacttctcaagtattgtaggagatagactctttatgttccctggggaagccaatttgttccaacagctgcattacaaatagaaattcaaaaagaagtatttgcaattat

SEQ ID NO: 47996 - DNA, 592 bp, Homo sapiens
tagcacctaaactggtacctaagaaaacttgacacatacagaaaaaaccctgcattagtaactctatgaaggaaaatatgtatacagtttactcaaagttatcatgaattaggcatctaaacattaatcttaatattctagaaaagagattatcacatgatttgttaacagaaagctcttcttttgaaaacacacatggaacccgaacataaaagacaattaaagcataagtaggtcccatggagtcaatgcttagccgccttatccctcaaacctttatctcattgcacatgcacgagacatctttagaaaagccactgacttaggccactggtttctaaacttggctgtgctaaaatcagaatcagtaccattagctttttagtaatagattcacaggctgcctaacacaacaaagtaaattagaatctctcgggatacaatctaccattctgtattatttaaaatgtccccagtgggcaggtgcagtggctcacgtctgtaatcccagcactttgaggcgggcagatcgcttgaggtcaggagttcgagactagtatgaccaacatggcaaaaccccatctctactaaa

SEQ ID NO: 47997 - DNA, 304 bp, Homo sapiens
ccatgggcttctgagagcaagaaagaggaattttggtttctgtaactgcagtttccattctctcatggcctctcatttgtttcttgtgcccatgagtttgcctgttagagataaggtgtgtttcttgtcctcaagctcatgcaaatgggtttctgtttcttacaatcattgttcccagatatggatggtgactgatgctctactaaatgctgaaaaaaggcagagtggaagcacagaaaagcgggcttctctgaggaggtgacgttagagcccagttggaaggcaggagtaaatgtgcaccatg

SEQ ID NO: 47998 - DNA, 336 bp, Homo sapiens
  misc_feature (224)..(224): n is a, c, g, or t
  misc_feature (270)..(270): n is a, c, g, or t
  misc_feature (310)..(310): n is a, c, g, or t
ggtgaattttttttagatttccataataaaaagttttaaaagtgtaatatttaagtctttaattgaaaaacatttttctttctccccaaaactatagctttaagtagtctgaaaaaatttagtataatacttttctaaattaaaactaattttaggccaggcatggtagctcacatctgtaatcctggcactttggcctgctggggattacagggcgtgacacncggcatggcagccttatcctggcttttttaatatggaattgtaccntcggggtaacccaaataggatagttgggaaaggcatcctnttttttagggaggggctctggggcct

SEQ ID NO: 47999 - DNA, 392 bp, Homo sapiens
tcatgatgtgtgcgccattggttacacccctcttcttgaagctttctctgtctggaagttcttgccaccgtgttctcccgacttccctcctctctcaggctgttccctggctgacacgtgcctgctcccccatgtgggccacagtgttggggtcctccaggcgtcaccctcagtgctctgctcccctcttaccctcacacctcacacctgagtagcttcactcagctccttgctccacctaactcccaaaccccacatgttcgactgttgtttttttttaagagacaaattctcactgggtgtggtggctcacacctgtaatcccagcactttgggaggctgaggcaggaggatcacttgagcccaggagttcaagaccagcctgggcaacg

SEQ ID NO: 48000 - DNA, 1235 bp, Homo sapiens
  misc_feature (19)..(19): n is a, c, g, or t
  misc_feature (22)..(22): n is a, c, g, or t
acatcgctaggtcgaggcnggntgggcagatccagaaaaagaacagaaacaaatgccagtattgtcgatttcacaagtgcctttctgtcgggatgtcacacaacgcgattcgttttggacgaatgccaagatctgagaaagcaaaactgaaagcagaaattcttacctgtgaacatgacatagaagattctgaaactgcagatctcaaatctctggccaagagaatctacgaggcctacttgaagaacttcaacatgaacaaggtcaaagcccgggtcatcctctcaggaaaggccagtaacaatccaccttttgtcatacatgatatggagacactgtgtatggctgagaagacgctggtggccaagctggtggccaatggcatccagaacaaggaggcggaggtccgcatctttcactgctgccagtgcacgtcagtggagaccgtcacggagctcacggaattcgccaaggccatcccaggcttcgcaaacttggacctgaacgatcaagtgacattgctaaaatacggagtttatgaggccatattcgccatgctgtcttctgtgatgaacaaagacgggatgctggtagcgtatggaaatgggtttataactcgtgaattcctaaaaagcctaaggaaaccgttctgtgatatcatggaacccaagtttgattttgccatgaagttcaatgcactggaactggatgacagtgatatctccctttttgtggctgctatcatttgctgtggagatcgtcctggccttctaaacgtaggacacattgaaaaaatgcaggagggtattgtacatgtgctcagactccacctgcagagcaaccacccggacgatatctttctcttcccaaaacttcttcaaaaaatggcagacctccggcagctggtgacggagcatgcgcagctggtgcagatcatcaagaagacggagtcggatgctgcgctgcacccgctactgcaggagatctacagggacatgtactgagttccttcagatcagccacaccttttccaggagttctgaagctgacagcactacaaaggagacgggggagcagcacgattttgcacaaatatccaccactttaaccttagagcttggacagtctgagctgtaggtaaccggcatattattccatatctttgttttaaccagtacttctaagagcatagaactcaaatgctgggggaggtggctaatctcaggactgggaag

SEQ ID NO: 48001 - DNA, 968 bp, Homo sapiens
aaggtatagtttctgattatggggtagaaatgtgctatgtctgtcatttcagccttatgaattgcccagaataagctagatcacctttaaggccatgtggttagggaaacttgggcacagaatttacattttcaacttggtgataagatgggtttaaggtaagaatcaaataggagaaagccttagctgttccagcggcccatgtttaaaagaatgtgcttctttttccaagtatttctgccgcttgcatgcactgagcttctttggaaaggagcaccatgcaggcatattttccagacaggaccggatttgctcgttactcagaggtgtgtgcattctttgcttttaggatatttaattagcatcttttaatagtgatattacggtgtcttaaaagtttatgcatttgaaaagaaaagaacttactccttgccaggtctcaacctatcatggttatctttgcagctgagctgcgttggttttgaggctcacatatggtaaaagtggttggaaatctggaaatattgctgtgtatctgcaaagcagcttgatatagtggaaaaggtattaggtcattaatcatgagatttggattctagccccttagctgctgcctgccaggcctggagacctttgttctcttctttaaactgctgctttctcatcagaaaatgaagttcctctccataccacctctctgaagggctgtgaagctcgaagtggcagcttaaaaaactgcccatctcaggaggtgtcttaagaaggaggacataccgctggctcctgcctttctcacttagccaggtctgatacctgtgttgttttcactgtggccattttaggatttttcaaaggctttcagaaagcaacatgctaccgtaccccttatacaccaaaactggttttcattttggaatataaaagtgagatttctccaccagtacaataaagttgttacaagtggttac

SEQ ID NO: 48002 - DNA, 1859 bp, Homo sapiens
agcgggcggcgggggcggaggcggccgctagcgccctgcccggcgccgcctccttcggcgttcgccccacggaccggcaggcggcggaccgcggcccaggctgaagctcagggccctgtctgctctgtggactcaacagtttgtggcaagacaagctcagaactgagaagctgtcaccacagcttggagctcggcggcacaaccagcaccatctggtcgcgatggtggacacggaaagcccactctgccccctctccccactcgaggccggcgatctagagagcccgttatctgaagagttcctgcaagaaatgggaaacatccaagagatttcgcaatccatcggcgaggatagttctggaagctttggctttacggaataccagtatttaggaagctgtcctggctcagatggctcggtcatcacggacacgctttcaccagcttcgagcccctcctcggtgacttatcctgtggtccccggcagcgtggacgagtctcccagtggagcattgaacatcgaatgtagaatctgcggggacaaggcctcaggctatcattacggagtccacgcgtgtgaaggctgcaagggcttctttcggcgaacgattcgactcaagctggtgtatgacaagtgcgaccgcagctgcaagatccagaaaaagaacagaaacaaatgccagtattgtcgatttcacaagtgcctttctgtcgggatgtcacacaacgcgattcgttttggacgaatgccaagatctgagaaagcaaaactgaaagcagaaattcttacctgtgaacatgacatagaagattctgaaactgcagatctcaaatctctggccaagagaatctacgaggcctacttgaagaacttcaacatgaacaaggtcaaagcccgggtcatcctctcaggaaaggccagtaacaatccaccttttgtcatacatgatatggagacactgtgtatggctgagaagacgctggtggccaagctggtggccaatggcatccagaacaaggaggcggaggtccgcatctttcactgctgccagtgcacgtcagtggagaccgtcacggagctcacggaattcgccaaggccatcccaggcttcgcaaacttggacctgaacgatcaagtgacattgctaaaatacggagtttatgaggccatattcgccatgctgtcttctgtgatgaacaaagacgggatgctggtagcgtatggaaatgggtttataactcgtgaattcctaaaaagcctaaggaaaccgttctgtgatatcatggaacccaagtttgattttgccatgaagttcaatgcactggaactggatgacagtgatatctccctttttgtggctgctatcatttgctgtggagatcgtcctggccttctaaacgtaggacacattgaaaaaatgcaggagggtattgtacatgtgctcagactccacctgcagagcaaccacccggacgatatctttctcttcccaaaacttcttcaaaaaatggcagacctccggcagctggtgacggagcatgcgcagctggtgcagatcatcaagaagacggagtcggatgctgcgctgcacccgctactgcaggagatctacagggacatgtactgagttccttcagatcagccacaccttttccaggagttctgaagctgacagcactacaaaggagacgggggagcagcacgattttgcacaaatatccaccactttaaccttagagcttggacagtctgagctgtaggtaaccggcatattattccatatctttgttttaaccagtacttctaagagcatagaactcaaatgctgggggaggtggctaatctcaggactgggaag

SEQ ID NO: 48003 - DNA, 1806 bp, Homo sapiens
gttgtcccctcggagggagggcccacgggcggggacatcgggacttgccctttcctcggcgcagcggagctggggcgtcgccgactcagaaggtgctttccgagacctccagggatctccgaggcgaggaaacccgggccccggacagaccgaccctgggctgaagctcagggccctgtctgctctgtggactcaacagtttgtggcaagacaagctcagaactgagaagctgtcaccacagttctggaggctgggaagttcaagatcaaagtgccagcagattcagtgtcatgtgaggacgtgcttcctgcttcatagataagagtgccacacccccctgtcccagtgcactggggctgtggatcccttcaaagctgagattgcctgtctgtggtctccagcgttaagcacagtcattagctcagcttggagctcggcggcacaaccagcaccatctggtcgcgatggtggacacggaaagcccactctgccccctctccccactcgaggccggcgatctagagagcccgttatctgaagagttcctgcaagaaatgggaaacatccaagagatttcgcaatccatcggcgaggatagttctggaagctttggctttacggaataccagtatttaggaagctgtcctggctcagatggctcggtcatcacggacacgctttcaccagcttcgagcccctcctcggtgacttatcctgtggtccccggcagcgtggacgagtctcccagtggagcattgaacatcgaatgtagaatctgcggggacaaggcctcaggctatcattacggagtccacgcgtgtgaaggctgcaagggcttctttcggcgaacgattcgactcaagctggtgtatgacaagtgcgaccgcagctgcaagatccagaaaaagaacagaaacaaatgccagtattgtcgatttcacaagtgcctttctgtcgggatgtcacacaacgcgattcgttttggacgaatgccaagatctgagaaagcaaaactgaaagcagaaattcttacctgtgaacatgacatagaagattctgaaactgcagatctcaaatctctggccaagagaatctacgaggcctacttgaagaacttcaacatgaacaaggtcaaagcccgggtcatcctctcaggaaaggccagtaacaatccagtaggtgtttgcggctgttctgggttctcttggcaacatggaaccagtgtcgtagaggacgattaaggacacatgtgttgaatgttgagaaaattatatttatcccacagttaagcaaaggacagcgaagatggaaacagttcattctgagactctgagctgtagcttaacaacaactcctttcttcttgcttggagccacctcaaagctcttagcaactaagttattatactggctatgtaattaatacacttaaaaaaaaccttaatagcttaccaagtactaagatgatttcttaggagcattttttcttaaatagagataggttcttgctctgttgcccaggctggaatgcagtggtgcaatcatagttcactgcagccttgaactcctgggctcaagcaatcctcctgcctcagcctcccaaggagctgggactacaggtgtgcaccaccacacctggctatgtttgatgttgttgttgttttgttttgtttttgttttttggtagagatgagatgtttcccaggctggtctcaaactcctggcctcaagtgatcttcccacctcggcctcccaaagcactggcattacaggtgtgagtcatggcacccagcattaactggattt

SEQ ID NO: 48004 - DNA, 901 bp, Homo sapiens
gttgtcccctcggagggagggcccacgggcggggacatcgggacttgccctttcctcggcgcagcggagctggggcgtcgccgactcagaaggtgctttccgagacctccagggatctccgaggcgaggaaacccgggccccggacagaccgaccctgggctgaagctcagggccctgtctgctctgtggactcaacagtttgtggcaagacaagctcagaactgagaagctgtcaccacagttctagccaggcacggtggctcacacctgtaatcctaacacttggaaggctgaggtaggaggactgcttgatcctaggaggcagaggttgcaaggagccgaaattgtgccactgtactccagcctgggcaacatagcaagaccctgtcattcatagttctggaggctgggaagttcaagatcaaagtgccagcagattcagtgtcatgtgaggacgtgcttcctgcttcatagataagaggtacatacacgtttaggagcatcgtgtcttcctggtggatgaattctgttatcattaggtgatcctttgagcacttttaaaaagaatctgttggccgggcgcagtggctcacgcctgtaatcccaggactttggggggccaaggcgggcagatcacgaggttaggagattgagaccatcctggctaacacagtgaaaccctgtctctactacaaatacaaaaaaattagccgggcatggtggcaggcgcctgtagtcccagctactcaggaggctgaggcaggagaatggcgtgaacacaggaggcagagcttgcagtgagccaagatcacgccactgcactccagcctgggcaacaaagtgagaccctgtctcaaaaaataaaataaaataaaataaaaataatctgtttaatagcct

SEQ ID NO: 48005 - DNA, 334 bp, Homo sapiens
tcagcatgactttcctcttccaaggtgaagagttggggggcatccagagaacaaccgtaatcacttcctccttcaccttcttactgccaggctgaagctcagggccctgtctgctctgtggactcaacagtttgtggcaagacaagctcagaactgagaagctgtcaccacaggtaaatagaaggtttaatttactgtttccagatggaaatatttaagtgttttcagtgtttacttctgttgcactacagaccagcaatctgggggttattactttgtgatgcaaggttagatacgttttcagactgaaagtaaaatacatgtgcatggattc

SEQ ID NO: 48006 - DNA, 2003 bp, Homo sapiens
gttgtcccctcggagggagggcccacgggcggggacatcgggacttgccctttcctcggcgcagcggagctggggcgtcgccgactcagaaggtgctttccgagacctccagggatctccgaggcgaggaaacccgggccccggacagaccgaccctgggctgaagctcagggccctgtctgctctgtggactcaacagtttgtggcaagacaagctcagaactgagaagctgtcaccacagttctggaggctgggaagttcaagatcaaagtgccagcagattcagtgtcatgtgaggacgtgcttcctgcttcatagataagagcttggagctcggcggcacaaccagcaccatctggtcgcgatggtggacacggaaagcccactctgccccctctccccactcgaggccggcgatctagagagcccgttatctgaagagttcctgcaagaaatgggaaacatccaagagatttcgcaatccatcggcgaggatagttctggaagctttggctttacggaataccagtatttaggaagctgtcctggctcagatggctcggtcatcacggacacgctttcaccagcttcgagcccctcctcggtgacttatcctgtggtccccggcagcgtggacgagtctcccagtggagcattgaacatcgaatgtagaatctgcggggacaaggcctcaggctatcattacggagtccacgcgtgtgaaggctgcaagggcttctttcggcgaacgattcgactcaagctggtgtatgacaagtgcgaccgcagctgcaagatccagaaaaagaacagaaacaaatgccagtattgtcgatttcacaagtgcctttctgtcgggatgtcacacaacgcgattcgttttggacgaatgccaagatctgagaaagcaaaactgaaagcagaaattcttacctgtgaacatgacatagaagattctgaaactgcagatctcaaatctctggccaagagaatctacgaggcctacttgaagaacttcaacatgaacaaggtcaaagcccgggtcatcctctcaggaaaggccagtaacaatccaccttttgtcatacatgatatggagacactgtgtatggctgagaagacgctggtggccaagctggtggccaatggcatccagaacaaggaggcggaggtccgcatctttcactgctgccagtgcacgtcagtggagaccgtcacggagctcacggaattcgccaaggccatcccaggcttcgcaaacttggacctgaacgatcaagtgacattgctaaaatacggagtttatgaggccatattcgccatgctgtcttctgtgatgaacaaagacgggatgctggtagcgtatggaaatgggtttataactcgtgaattcctaaaaagcctaaggaaaccgttctgtgatatcatggaacccaagtttgattttgccatgaagttcaatgcactggaactggatgacagtgatatctccctttttgtggctgctatcatttgctgtggagatcgtcctggccttctaaacgtaggacacattgaaaaaatgcaggagggtattgtacatgtgctcagactccacctgcagagcaaccacccggacgatatctttctcttcccaaaacttcttcaaaaaatggcagacctccggcagctggtgacggagcatgcgcagctggtgcagatcatcaagaagacggagtcggatgctgcgctgcacccgctactgcaggagatctacagggacatgtactgagttccttcagatcagccacaccttttccaggagttctgaagctgacagcactacaaaggagacgggggagcagcacgattttgcacaaatatccaccactttaaccttagagcttggacagtctgagctgtaggtaaccggcatattattccatatctttgttttaaccagtacttctaagagcatagaactcaaatgctgggggaggtggctaatctcaggactgggaag

SEQ ID NO: 48007 - DNA, 2103 bp, Homo sapiens
gttgtcccctcggagggagggcccacgggcggggacatcgggacttgccctttcctcggcgcagcggagctggggcgtcgccgactcagaaggtgctttccgagacctccagggatctccgaggcgaggaaacccgggccccggacagaccgaccctgggctgaagctcagggccctgtctgctctgtggactcaacagtttgtggcaagacaagctcagaactgagaagctgtcaccacagttctggaggctgggaagttcaagatcaaagtgccagcagattcagtgtcatgtgaggacgtgcttcctgcttcatagataagagtgccacacccccctgtcccagtgcactggggctgtggatcccttcaaagctgagattgcctgtctgtggtctccagcgttaagcacagtcattagctcagcttggagctcggcggcacaaccagcaccatctggtcgcgatggtggacacggaaagcccactctgccccctctccccactcgaggccggcgatctagagagcccgttatctgaagagttcctgcaagaaatgggaaacatccaagagatttcgcaatccatcggcgaggatagttctggaagctttggctttacggaataccagtatttaggaagctgtcctggctcagatggctcggtcatcacggacacgctttcaccagcttcgagcccctcctcggtgacttatcctgtggtccccggcagcgtggacgagtctcccagtggagcattgaacatcgaatgtagaatctgcggggacaaggcctcaggctatcattacggagtccacgcgtgtgaaggctgcaagggcttctttcggcgaacgattcgactcaagctggtgtatgacaagtgcgaccgcagctgcaagatccagaaaaagaacagaaacaaatgccagtattgtcgatttcacaagtgcctttctgtcgggatgtcacacaacgcgattcgttttggacgaatgccaagatctgagaaagcaaaactgaaagcagaaattcttacctgtgaacatgacatagaagattctgaaactgcagatctcaaatctctggccaagagaatctacgaggcctacttgaagaacttcaacatgaacaaggtcaaagcccgggtcatcctctcaggaaaggccagtaacaatccaccttttgtcatacatgatatggagacactgtgtatggctgagaagacgctggtggccaagctggtggccaatggcatccagaacaaggaggcggaggtccgcatctttcactgctgccagtgcacgtcagtggagaccgtcacggagctcacggaattcgccaaggccatcccaggcttcgcaaacttggacctgaacgatcaagtgacattgctaaaatacggagtttatgaggccatattcgccatgctgtcttctgtgatgaacaaagacgggatgctggtagcgtatggaaatgggtttataactcgtgaattcctaaaaagcctaaggaaaccgttctgtgatatcatggaacccaagtttgattttgccatgaagttcaatgcactggaactggatgacagtgatatctccctttttgtggctgctatcatttgctgtggagatcgtcctggccttctaaacgtaggacacattgaaaaaatgcaggagggtattgtacatgtgctcagactccacctgcagagcaaccacccggacgatatctttctcttcccaaaacttcttcaaaaaatggcagacctccggcagctggtgacggagcatgcgcagctggtgcagatcatcaagaagacggagtcggatgctgcgctgcacccgctactgcaggagatctacagggacatgtactgagttccttcagatcagccacaccttttccaggagttctgaagctgacagcactacaaaggagacgggggagcagcacgattttgcacaaatatccaccactttaaccttagagcttggacagtctgagctgtaggtaaccggcatattattccatatctttgttttaaccagtacttctaagagcatagaactcaaatgctgggggaggtggctaatctcaggactgggaag

SEQ ID NO: 48008 - DNA, 611 bp, Homo sapiens
gttgtcccctcggagggagggcccacgggcggggacatcgggacttgccctttcctcggcgcagcggagctggggcgtcgccgactcagaaggtgctttccgagacctccagggatctccgaggcgaggaaacccgggccccggacagaccgaccctgggctgaagctcagggccctgtctgctctgtggactcaacagtttgtggcaagacaagctcagaactgagaagctgtcaccacagccccttagctgctgcctgccaggcctggagacctttgttctcttctttaaactgctgctttctcatcagaaaatgaagttcctctccataccacctctctgaagggctgtgaagctcgaagtggcagcttaaaaaactgcccatctcaggaggtgtcttaagaaggaggacataccgctggctcctgcctttctcacttagccaggtctgatacctgtgttgttttcactgtggccattttaggatttttcaaaggctttcagaaagcaacatgctaccgtaccccttatacaccaaaactggttttcattttggaatataaaagtgagatttctccaccagtacaataaagttgttacaagtggttac

SEQ ID NO: 48009 - DNA, 1051 bp, Homo sapiens
tcttgagtcctctgaggcactgagcttggtgatttggacgcaggagctgctcattagtgagctgatagctgggagcatagcgcatcccacatcacctgacttaccttggtgtcctcctttgtagccttttgtcatacatgatatggagacactgtgtatggctgagaagacgctggtggccaagctggtggccaatggcatccagaacaaggaggcggaggtccgcatctttcactgctgccagtgcacgtcagtggagaccgtcacggagctcacggaattcgccaaggccatcccaggcttcgcaaacttggacctgaacgatcaagtgacattgctaaaatacggagtttatgaggccatattcgccatgctgtcttctgtgatgaacaaagacgggatgctggtagcgtatggaaatgggtttataactcgtgaattcctaaaaagcctaaggaaaccgttctgtgatatcatggaacccaagtttgattttgccatgaagttcaatgcactggaactggatgacagtgatatctccctttttgtggctgctatcatttgctgtggagatcgtcctggccttctaaacgtaggacacattgaaaaaatgcaggagggtattgtacatgtgctcagactccacctgcagagcaaccacccggacgatatctttctcttcccaaaacttcttcaaaaaatggcagacctccggcagctggtgacggagcatgcgcagctggtgcagatcatcaagaagacggagtcggatgctgcgctgcacccgctactgcaggagatctacagggacatgtactgagttccttcagatcagccacaccttttccaggagttctgaagctgacagcactacaaaggagacgggggagcagcacgattttgcacaaatatccaccactttaaccttagagcttggacagtctgagctgtaggtaaccggcatattattccatatctttgttttaaccagtacttctaagagcatagaactcaaatgctgggggaggtggctaatctcaggactgggaag

SEQ ID NO: 48010 - DNA, 753 bp, Homo sapiens
ggagcagaataatctgcagctaggggaaggccaggctgggtctcagggtgagagttacagaaggatatgaaataatcggggaagaggcaagttacagcgggtatcctgatgcagaccatccccagccagaaacacagccgcagaactgagcccaagctccagaccaaaaactgagcccaagctcagggtctgcatggcccagagctggcatctgtccgggggactggcccaggcaaagtgaccactgtcatccagtccaggagctgtgagctgcatggaaagaatgtgaatgaagacacaactctaaatgtggaaccatggacgctatgtgagccagtgtgctccctagccgtccagaaaaacaaggcccacttgtacattctgcaagagcataaataaagctgtcctcaggcggcgtgctgtggtggcccatccttgcagtggcttcactggctgcacccctcagcaaggcctctggaacactgtgagggcagcacacccacccaacagcgtgggtaaaaaacggtctagctatggccttgccgcacgtggtgatcgctaacttaattttgcagcaaatttaatctgctctgtattggtattaattagaaatgttcaaaagctggtaataagggcagtgcagaatgggtccttcaggccaatttctggttctgggtatttgaagctcatatccctgcaaataacaggaagccactcacctgattcttttaactttgcgtcctggttatatgt

SEQ ID NO: 48011 - DNA, 460 bp, Homo sapiens
ggagcagaataatctgcagctaggggaaggccaggctgggtctcagggtgagagttacagaaggatatgaaataatcggggaagaggcaagttacagcgggtatcctgatgcagaccatccccagccagaaacacagccgcagaactgagcccaagctccagaccaaaaactgagcccaagctcagggtctgcatggcccagagctggcatctgtccgggggactggcccaggcaaagtgaccactgtcatccagtccaggagctgtgagctgcatggaaagaatgtgaatgaagacacaactctaaatgtggaaccatggacgctatgtgagccagtgtgctccctagccgtccagaaaaacaaggcccacttgtacattctgcaagagcataaataaagcacgggtcgcccgaaacctccccctccctccgcaagacgagcacgtacacaagtgtata

SEQ ID NO: 48012 - DNA, 579 bp, Homo sapiens
cttcaatccagaatgattgctaaagctattccagcacctagagtcaaataaaaatatcccgaggtgggaaggaaaacatttgtttagggaaacattaaaaacaggagagtgtgtgccttggagccagagcccagagccctgctgatgtcccggggcagaaatagcccgtttcatcatcggctctggacgaccgccgcccgcattcctcgattacagcgggtatcctgatgcagaccatccccagccagaaacacagccgcagaactgagcccaagctccagaccaaaaactgagcccaagctcagggtctgcatggcccagagctggcatctgtccgggggactggcccaggcaaagtgaccactgtcatccagtccaggagctgtgagctgcatggaaagaatgtgaatgaagacacaactctaaatgtggaaccatggacgctatgtgagccagtgtgctccctagccgtccagaaaaacaaggcccacttgtacattctgcaagagcataaataaagcacgggtcgcccgaaacctccccctccctccgcaagacgagcacgtacacaagtgtata

SEQ ID NO: 48013 - DNA, 795 bp, Homo sapiens
ggattagatgttgcatttggttgtttccttagtcttccttactctttcttggtctttcataaccttgacttttctgaagagtactgggcagctattttgtattgtagaatgcccctcagtttgaattttttggttatctcttcatgactgaataagcatttttgttaagaatattatggaagtgatgatgttgtgtgcttctcagagcatatcacccttctttgtttgtaaccatcataacttggtcttccttccaaatggatgtgaaacttgagccaatgttgaccctgagactatgtctgggggcaccgtaggtgcttatgaatgcaaatgtgggaattgagattacatggctataataagattgccctccggatggcctaggatatgcctacattattatatattaattttaaaaatcatcataaaaagaaaaaaagaaatagtttctaaatctcagacagaccactggggaaaatgtccctggacttcagttaggaaagctttggataactttacccattttaacacctcacttagcagagactgtgccatcttggtaagacttgggagttccctgccttgaactgattatttagagggggtattccctgctatggtctatgcactccaactattatatgcggattttgaatttagagtaacctcattctgttttaggattttcttagattaatagaaatgaaactactcaacatttttcttcacaaagttcatcctttattctttcctaactgttcctgtttctagatcttatcttcttaaaaaaaaaaa

SEQ ID NO: 48014 - DNA, 457 bp, Homo sapiens
aggtcaccattatccatttaatggtcttataactaaatagaatgactatgaaattaaataatgcaaacttaaagctgttggaaatttaccttattttgagccttgagaggaatgtggctgtgtggcctgagttatgtagcatgcaactgcaacttctgctttttcctgtaaatgatcaggaaaggccttgtggcaccagacataagaccccctgaaagtatcatccctcctgatggaatggtaaagcaatctttcttggaacatagcaagtagtaaccgatcaaattgctataacgtgtgtactgaccttatgtggaaaatgctgcaaccctgtttactgcctatgtaagtgaaatcttaacttccccattttggaatgctgactccagtcattaggtgtctgtatttcctgagtggttaccctcaagctttgtgctcaaataaactctatacttaa

SEQ ID NO: 48015 - DNA, 400 bp, Homo sapiens
aagaatggcagtgtaacaccatgaactgacaaaatttcagccctctgtctttctccatgcttaaagttgagtgcttttgttgattctgttgctcacggcaattataaatgaccacttcataacacatataggtcatactgtaatatttaagaattgtgagcataaactttacatttcatgtgcatatttcctcatgcatcacacgtatctaaagccctgaaaagtagtgatttggacttacccccagtgacttaatgttgcttccccagataaccacgtgataagtgttttaagtcaccaagagacagctttgacagcctgttcagaattcaaaggtttgtgtcaccaagtgtaggagaaccaacccagaagtaccgaggagttgttataatggttccaa

SEQ ID NO: 48016 - DNA, 785 bp, Homo sapiens
taaaaaacagactgtggattctccagaggagggaccatgtgttatttatctgcatatctccagcacctagcatgatgcctggcacttaatagggactcaagaaatgtgttctgaactatttttgttgttagcttaaaagaggtagacttgggtggaaggataaataaggtagtatgcaattattcacttgggaaaccccagaggcaaaaaaagaaaagtatgaatagggtcaagaagggttcctttacatgtatagacaatagctacacaatggactgtttcagggacattagggctattcaaggcccatccgttgaccttttgagatcacccttacgaagggcaattaccatgtgctcccacaaagtgcatcttcttcccgccaggaaggaccaaattctaagctgtataagtcattggtctcaccctatcccagtgcctccatgttatcaccttcagtgccctccactcttgggcacagaccctgttggtcccttggcatattctactctgtttcccaccagagaagggaaaatcccggaaggtggtgcccttcaatcagaagtaaaaatggctgcatctctcagggcaaccagtgcctgggcctggtattcctgagcccacagcagggaggccattagccccggtcccaagaatccctgcaaccagcatccctggcatttagccttccatccctggcacttaaccccctggccccataagaagggacatttcaaatagtttttcttggagccatggagggttcaaaagaattcttgaacatt

SEQ ID NO: 48017 - DNA, 323 bp, Homo sapiens
tctattctgagttaccagaaaaagggtgaatgaacaccaaacaggtgtagaacaccacatctaaaacaaccaaaactcatatccactaattcaatctatttggtgagtgcttcccatgtgccaggattaggctaaccctttctacgaatgaagattaaataacatacatataaagcacttggcccaggctgggtatatagtagctgcttggtaaatggcagctactggagactaggtaggttctattattatctccatttcacagaaggggaaacttggttaaaagagattaagtcatttgtctcaggccacacagctttgag

SEQ ID NO: 48018 - DNA, 422 bp, Homo sapiens
gttacattcttagacaagctactcacgctctcaagacctcagtctcctcaacttaagatgggaaaacaaactcgctggactactgcaaagatacaactaactaggtaatgtctacatctaatgttgcctgcatagaatgattgttcatcttacctaagtcatattccgctggcatataagtgtcattattagctctcccctcgaaatacatcaggtgcactggatgctatctcaaatgttaagtcaactcagtaacaaggtattcaagaaatggtccaatggaacattagagtaataagccctccccagtgaaaaactctctgcctttcctcttaatgaacaactgcttggggaaaccatagaaaatcttgctggacatttgacagtgtttttttttgttttttgttttttgtttttcttgc

SEQ ID NO: 48019 - DNA, 403 bp, Homo sapiens
cacctgcttcccaccccccacaattaattgaattatggccacagggattaagtgtatgactttacaacgacactgcttggacttgaatacctagctttgcccacttactgaatatgtgataatccagcaaattgccttaatgattcacccatttccctcatttataaaatggaggtaatgataggaatgttatggttgctaaatgaattagaacagtgtcggacacataatatcagctgctctcaattacactattgtcttttctactatctttagtttttttttttttacttctataaattggctttttaaaaattattttcccataatttgtctgaagcttggagaaggaaaagagattgatacctactgttaattcatcagtctttgtttaaaaaaaaaa

SEQ ID NO: 48020 - DNA, 309 bp, Homo sapiens
cttcagtggaaaagagggttgggaggatgggatgtgtctttcctggtattactgtgacccactccccatgttctgcttgtcaagcaatctggaagaattcttgctcttccccaccaagtgttgggcaatcttctagaatactacctcttaagatattctgagtccaaatctcccaagattttctcccaaatctctttatggtgaggatctggggaaaacaaaatcccatcctatttcaagttctgaatagaatacaattccattttatcttgccctcaattggattctcatcctaatttctttcccagc

SEQ ID NO: 48021 - DNA, 423 bp, Homo sapiens
cacacacacattggggatctctgatagcatgccttatgaacttcagaggatgaaacaagatcacatgcaacatttacaaacataatatgaactcatttcttcccgtgctcactctatactaatactacagggaccaaattgtaataacataagacagcctagggccagccctctagtccttccactaagagataggaataaataaaataaaattcttttctaattgccctgcagacatttttacttgtcctgagtaaagctgccattaaaatgatggtatttttaaatgattcatttgtttctctcattttctgagctttccctagctgtcatcttacaatcccatgatcagtggaacagagggacctgttccgtcaggaaaggcagggagcagaatgcatgctgctagaagagacacctgga

SEQ ID NO: 48022 - DNA, 690 bp, Homo sapiens
cagaagtgaggcgcccagagaagtgttcacttgtggctcgaagtccaggtgtgatactgcatgaaaaccccccgatttggccatccagagcatggtaatcaagaaacgcctagatgtttccaaaaatggattgggtgtccctccaagtgttcatgaaaaggttgaatttcctcttggtggagagttacagaggagattagcagatcaggctgaattagggcctcactgtgttacccaggctggagtgcagtggtgcaatcacagctcactgcagcctcgacttcgcaggcttaagcacatctcccacctcagtttcccaagtatctgggaccacagggacatggatgaagctggaaaccatcatcctcagcaaactaacacaggaacagaaaaccaaacaccgcatgttctcactcgtaagtgggagttgaacaatgagaacacatggacacagggaggggaacatcacacaccggggcctgtcagggagtggggggctaggggagggagagcattaggacaaacacctaatgcatacggggcttaaaacctagatgatgggttgatgggtgcagcaaaccaccatggcacatgtatacccatgtaacaaacctgcacattctgcacatgtatcctagaatttaaagtaaaattaaaaagtaaataaataaaataaatgtatgaaaataa

SEQ ID NO: 48023 - DNA, 540 bp, Homo sapiens
  misc_feature (461)..(461): n is a, c, g, or t
aaaaaagttaaaaataaataaaaaataaaatagaaaggatgacacttttgcttagtggctaaataggcatcaggacacatggctcagaggcttgacaaatcaggggcaaaatcaccaactgctcagtttccatttaacaagtatgttctgagcaaacatggctcccgcacacaaggactttaagatgataagaaggaacatgtcagttaaatagcaatgtaaggcagtacagtattatagtatatagtaggctgggtgcagtggctcatgccttgtaatcccagcagtttgggaagctgaggtggtcacctgaggtcaggagtttgagaccagcctggccaacatggtgaaaccccgtctctagtaaaaatacaaaaattagctgggcgtggtggcaggtgcctgtaaccgcagctacttgggaagctgaggcaggagaatcgtttgaacccaggaggtgnaggttgcagtgagccgagatcgcgccaccgcactccagcctgggtgacagagtgagactctgtctcaagaaaaaaaaaa

SEQ ID NO: 48024 - DNA, 664 bp, Homo sapiens
aaagaattaatccatttagtcatgggaagcactacttagctttccatagcagctgaattgtggtgcaactttggggctattttaggattttaacctcaaatagaaatgaaagtttatttgtattgatgaacatatgcttttgaataatgagccattgacttgatttcaatgaaagtgaaattgtttttcaattcagttattttatgtttgaacatgaattgaaagctacatctttgtattgctgaaatttaaaaaaaatcaataactttaacattttaacagaaagtgttttaataagcaattattagggtggcttcagaagggtattgtagctttaaaaatttctgacggttattagtacacttttgtactgtgtaaatcagacattggaataaaattacttttattaactaaaattctcctacaataggaaattttactgcattttgacatctagcaggccaaagaaagatgttcagaaagtcttatttctgtctcagaccaataattatcccatattttgtataaaacattctttaaaattgttagtttagatgatcacacaaaagtaacttttccaagggatgtaagttgcctgccactgtactacagtctggcaggttctacagcctggagaaaaatctagtagccttttaaaaaaaaa

SEQ ID NO: 48025 - DNA, 2906 bp, Homo sapiens
  misc_feature (954)..(954): n is a, c, g, or t
  misc_feature (1062)..(1062): n is a, c, g, or t
  misc_feature (2050)..(2050): n is a, c, g, or t
  misc_feature (2140)..(2140): n is a, c, g, or t
  misc_feature (2162)..(2162): n is a, c, g, or t
  misc_feature (2184)..(2184): n is a, c, g, or t
  misc_feature (2257)..(2257): n is a, c, g, or t
cttgatgattgggttagatctggggcgtacatatatatattttgttgttttgttgtttgtttgcaagactattttataggcctattttttatcagaagacatataatatcttttttttttgagtgttcagccattgagccattggtgatcattacctagatccattaattcattaggggttacaaatagtgccattccacctggattcatttatttgttgaaatacttctgtgaggagaaacttgacttcatctgtttggttgattctttctctttattactggttttcagaataaagagttggttatctagcattctccaaagatgaccaatttttttttaatgtcagaaactgcagcctttaaactagttactattttttaatccattgcagttaccattcttattgatgcttaaattgttacatctttggccagtgcaagccttttcaagttggctcccaagtccctttgagacagtctggttattagtctttgatggcttccttactaaccatccttactaggtggtatggcagtaggttccaggggttgttctgtatggattaacttattctcacaagaaccctgtgaaataatacttttgttatccccattttatgggtgaagagaggaacctgagagattgtgacttacctgtatacctctctagaagaagtacagggatgtaaattcaactactcattctagtgctcttttcacttttccaatctgatgcctcttaaaattacttctgtttcatttttttaagtaacttgattgactagctaaaattcatcctactcagtcattgaagattagttattaacttattaaacatgaatttcaaggattgcctaacagtaggatgaagataatagaatagtattctcagaattattctttcaagtattccagtcattcgtcttttctacaatcctgcaaaaatacaaantttgatgaaatatttaagtagttaaggaaagaacagcaaaagtgaagtgtttcctttgtttcttgaaataaagtctctccaactatgagtaactgtagttacatttgntttttttaggaaaatgggaatttgaatctggtgctattttaaaattgaaaggggctcattttgttatgtaatatccatttattgtatatatcgtatgtcaggcattgggtgtacaaggttgaagaccacaatccttgctcatagtcaaggagattctagggtatccacgcagaggaaataacatggcatggtttatggcagagtataatgcctttgggaccagtataactagatcagtgcagtttttttaatgcataaatgacctcagggtcagtggtgagagttggagagatagatatgaattggattattagcgtgccttatatgttttactaaggagctgtcctttaagcaattctaaactgttgtaggattaagtagacaggaaaataatcagatttttagaagtatctcttagagaaatacaaagatagattataggtgggttggaatggaggcagagatctggtgaagctgttgccaaaatctgagcaagatatagtgaagacctgaattaaggcagtgacagttaagaatggagagaaaaaacaggatgtgaatttgagagagatttaacttgtagaatcaataaaagcgaatgactggataaaggtatcttgggcttctgggtggcgtaactgaaggatcccttgctcttcactaagatccagaatactaaagcaagagcagatgtttgtgggtagataatgagtttgaggtgtcccttgggtagttgtatatatttatgaaagccatcagaacgtaagtagtatttaaagtggtagatatggatgatgtaatttaggagacctgattccagagtaagaggagagtactagaacaaaactcttagaaacactaacacttaaatgctgccatctcctatccccaagccaagtaggattttgaccataaattagcgagcagcattgttaggaccactgcttgtcctatctcagtatagagatgcccgtccatgtattcctcntacttattagctcccttttactaatcacagctattcctatctcagttggcaatacctgtgaatcaaggggaaaagtcacatttgactttntgacaaccgccagaagtccttnccaagccaaagcatggattatngaggatccttcagaagactgttggatctttcgacaactgatactttctgctctgttagctctttctgtcttcnctactctaactagcttagattccatggccttccatttctatatctcttgccaatatgctaaacttccttgtttttgtgtcacatttgcctgaaaaaaccccaagcctttgtaagcccaactgtctgtgtagatattgcttgagaaagatcacacattatggaagaggggataatacctctctaaattcttgatcaccaacctcaggtctcaatgttgcctggtaatcctgtgaaatttctactttcaacttattctcccgctttctatagcagtaattttaaacctttattctcttcaaatctcaaatttatctgttcttacttttagcagatggccttgactgctacttccaagacaaaaaagggctgagcgcagtggctcacatctgtaatcccagcactttgggaggctgaggtgggcggatcacctgaggtcagagaccagcctggccaacatggtgaaacccatctccactaaaaatacaaaaattagatgggcgtggtagtgcacacctgtagtcccagttactcgggaggctgagacatgagaattgcttgaaccccataggcagaggttgcagtgagctgagatcgcaccactggactccagcctgggtgacagagcaagactctgtctcaaaaaaaaaaa

SEQ ID NO: 48026 - DNA, 208 bp, Homo sapiens
caaattagaattcaaaaagacatttaaaaagatgtttttgctttgaccaactgacctcatgattatctaacctgagatcatcacttgaatggagtaaacggtcaaggggtctgattcggtgcttgggactggagataaatcattgggatgtggctgtggctctgaagaggtgcctaatctatacgagacagacacataaaccaacaat

SEQ ID NO: 48027 - DNA, 341 bp, Homo sapiens
tttttaaaacatgatagagttaagagaggagtatatgacttggtgcttgtatttcatgcttacagatactgtgagcaattgctaatgagttagcaaattttctaaatcatttttttgatgaatagtcacccacttcttgatacttaaatgactggttttaagttgttcacctcatcagtaaccttgactcctgccatgtaaaatgcacatgctttttcttttagcctggtgatccacggagcaataggccagggaagctcactctgggttgtgtcggggggccagaaaggtttcatatttagtacgtgtctacatgggaatactactcaagccatatggta

SEQ ID NO: 48028 - DNA, 1189 bp, Homo sapiens
cccctctttgctccagaaactgtagcttagatgagagaatgagcctttgtgggacagcattttaaataatagcatacagggagcttgatggatttctttcttggcaaggttttagaactcttttccttcattagatacactctaaagcgtattctaagttgttttcttcattactcagtagttttaaacttgcttttcatttctggatgtttgtatgaaaggaatttcactgaccatagcagagggactttaatcctcatgagttttgtttttggaaataagctatatatatatttcatatattaaaaattaagactcttcatctcacataaggttgagttgctttcttagaatgttaatttcagaaagctagaatatatatccccagaatgcctaatttattgtttgaagaacagaacctatagtaacatcagacctcagaaacttactgtcttgcctttgacttttgaatctttagacagtacacccttttctgtggacctgttgaccccctcctgcagtgtatgctttagttagccatgctgtgccctcttatagtaactagttttctatttccccataactgtagtgagagtcaccctcagtcaaccacacaggctttaaaggtttacagctgtaaccatttcagtgtgtccatgtcacttgttttcattcatttggcaaggatgggtcaaagaaatgacatctaaggtgctagatctgcacttggctctggggagacaaagatgagtaagacacagcccctcccctcatgggctcttgaagatttcactttctggactggtagggggtcagggcacgcatacagacatgacatggccaaagaggcctgtttgaagtgctgcccgtaggagcacagaggaggggtcacgtgccctgctgccaggtagaagttggaaggtggggcaagtgcatttgagagggcagttgagctgggtgttgcattatccatcagacacaccaaagtgttgaggctaatgctgtgtctgtggagtgaacagacagggttggaggttggcaggtagttaagttggcagatatttaggtaaaaaggttggagctaggctgggcaggagtttgggtattgtgatgtcacagccacaggatttgttgcttggtgtgtcaggagtagggatgggagggcgttacgttactggtgaggcaggag

SEQ ID NO: 48029 - DNA, 535 bp, Homo sapiens
gacttttggtgcacttaaagctatgctagcagaagcgtgaaatcacctcccaaaggaagtgggtcctgcctcctcagaaccagaaaagggaaggccataactggagcagtaacctaccgcagccaagtctcagtttcctcatctgtaaagtgtgagagtcaggcaaaattgcctccaagatccttttctgttcgaatattcattgagccaaagaaggttaagaacacatataaattgagaattctgtaattttaagattcatctggaaaaatggcaccctggtaccaaccatcaggactaagagggagagtttgcagtcaaatgaaattaaggttgaacccagttctgccagttccttgctccataacccctagaaaattacttctgtctgagccttgggattctctgtctcttatttatttatttatttttgagacagagtctcgctttgtcgcccaggctggagtgcagaggttgcagtgagccaagattgcgccattgcaatccaacctgggtgacagattgagactctgtc

SEQ ID NO: 48030 - DNA, 405 bp, Homo sapiens
agaaccaggcagtgtgtgtaaagtaggtttcctcatctgtgggtccagtgtcccaattcctgcctcctacaaatgatgttcttggctggcttcaagttcaaaggctttcctcctgtttcatgcatcatcagtctccttcatcacgtgaattttttgaactttgtcatcctatgtgttgtgtcgttctgttttctttatttctttttatttattcatttatttttgagacgaagtcttgctctgtcgcccaggctggagtgcagtggcaccatcttggctcactgcaacctctgcctcctggattcaagtgattctcgtgcctcagcttcctgagtagctgagactacaggtgcatgccgccacgaccggcttttgtatttttagtagaaatggggttttaccctg

SEQ ID NO: 48031 - DNA, 928 bp, Homo sapiens
tcctagcaaagctcacttttaaatctgatctcaacagtcattcaaaggtcagcaacagatgatttagacagtaagattcggattgatacaaatataattgcttatgatggtctaggctcccgataatggcagactagataatttggatcaacagtgagaatgactagaaaacctgcacaaaatacagaaattgtctatatgaaatgctagagcaaatagtaaagcattattggacaggattgggttggagttggggctaagaatggtgggggcctttttctccccttgaggtatttgcccagagattgaggagtaattttgataggctcacagggctgagaaatcacagcttagagtgcaaggatcatgcatggtgaatgtgtctccttgtcttgagttgggaccctgaaagtctgcactattatagtaaagataaattagctagtaagttgttcctcacagggactaaagctcagcaactaaaattggattaaagtgaaatcatatcgctggctcctcaagtttccttgtagaatcaaatgtaaatccttgctagaaagaaaaagaaaacatctaggcctccaacttattcaataatgaattttgcaaaaacagtattcacagaattagaaataaccaggtttgttaggagattagacaatgcgaacatagtgagaccccatccccacaaaaaattagctgggcaaagtggtgtgtgcttgtattcctagctacttgggagactgaggtgggaggattgcttgagcccaggagttcaagggtgcagtgatagtgccactgcactccagcctaagtgacagaatgagaccctgtctttaaaaaagaaagaaagaaaaccctaaaaattacagtaactgaaattaactcagtagaagggcttaagaacagatttggcctagcatgaaac

SEQ ID NO: 48032 - DNA, 1038 bp, Homo sapiens
tcaagggtctatgtctgtcctgtttgctatttcatctgcattgccaaatgcagtggctcctctgggtaggcaacctgaggtggaatcaaattatgaatgcatatgttatctcatgtctataaaataaatgtgttagaatttataaataaagggataggaaaaatgctgattattctgtgtgtcggtgctttgtagtgaaggccagttcacacatgccatttgctatgttggtgtaatttatatgagagtttcatttataacaacgttacctgtcatttatttttctattaagacattatagaaacgtaggactgtacacatccaaatcctgcagaattttcatttcaggttttgaaagttaaaaaaatgtcaccatagaatgaaaattccaagaaaacaagattcatgtacattatcactagacaatttccatttgttttaaacagttttctacagcattagttacatttaacgtttagtataaaagcaattgagcaatttctctttagaagtccatttcattgctttgtagccatagtctgtaggtgaatgaacaagctacatttctccagaattactcattttctttttaaagataaactggtcaatactctccttcctggtatggaggaattttttgtatatgagaagcattcatgaatataatctgccctcttgctttattgtcataggaggggaaattcactgctttcacacccttctgttttggctctttctcccaaaagataagaatctttatttagtatcataccaagaaattggagttcctttagcttcagactatcatcatggcttccaaattgttaggaaatacaagtttgcaagaccccaaggggacttaatattttacatcttactagccatgtcataggttttaagtgcttttaatggggaactgtttcactcatgccatatacctgttttgtttttctaaaaaattaatactgtaagttgtgagcaggtgtcttgtatcactgcgaaacccatgcataataaaaacttgttcttgagctatat

SEQ ID NO: 48033 - DNA, 520 bp, Homo sapiens
  misc_feature (481)..(481): n is a, c, g, or t
  misc_feature (488)..(488): n is a, c, g, or t
  misc_feature (495)..(495): n is a, c, g, or t
  misc_feature (504)..(504): n is a, c, g, or t
  misc_feature (517)..(517): n is a, c, g, or t
agtagagggggtgcccacacagtcattcagggcccagctgatgggggctctgacatctttaagatgttgcttccatggttcccttggataagaaactgagatggaagcagaagtatgtgcaaactaataatgaaagcctaagaagcgtaagaaacaacgttgtcctaggattgtattcagaaaagattgaacattatgtatgttccttttatttgattatgcatgaatgagataggagaaaacgatggaaggatccacactgatctgttgacttcactagctgggagaccagagacagaatagggtaggaaaagagagctttggggttatatacatttgcattcattggtcttcttatgacaagcatatattgctttcttaatttgaaaccacccaatgaaatggatgatttataataaatacatatttttcccaaagttaaaaaaaaaaaaggagggagggaacccatgttcttcccccnggccccnggccttnggggggggntccccgggggggncca

SEQ ID NO: 48034 - DNA, 318 bp, Homo sapiens
aatttcaagctacctacagtgtacaactgacttaagattcctgactttttaggaagtggctctccggagcagggacaagcctatttcggcattctactgcctatgtctgaagcacaagcaaggttattctctacattctttctttttttttttagagacagggtttcactgcagcctcaaactcctggattcaagcaatcctcccacctcaggcttccaagtagctgggactacaggaccactacacctggctagtttatttattttttgtagagatggggtctcactgtgttgctcaagctggcctcaaactcctgg

SEQ ID NO: 48035 - DNA, 604 bp, Homo sapiens
aaaggagaagagacccaggatatttgcaaatggttctagtgatttccacagtccactggtagttggtgtaaacatcatgtgcacatctgaattcctggatccttttgagaaatcacaggaccttgggacaatatgcatggtgtaggaaagggggcactcacgaatagtgactccgtttagacgagacatttccccctcagttcccaggctctacctatcctgattcattcacctaaggaatcagctttgtccctgtaggaatttggattggcaacttttgaattaaagtctaatccagtggtaacagttcacccatggagtcagataacctggcttcgaatctgggaaccacccttatggctgagtggatttcactctctgcacctcagcttctctacctatgggtagtaatcccggagggatgtggtgaggcataagagaaaatccatataaagcacttaaatgagtgcctaggacagagacaacacaactgttccatcatcgtcatctttccaaagtgccactctgcatgtacctttaacttacacacacaaaaatggggtcatacagtaagtgctgttgatggacagatattgaccagctc

SEQ ID NO: 48036 - DNA, 966 bp, Homo sapiens
ccatctctaaataaataaataaatagtgtaaataaatactgtataaaatgcaaagcactcagaatagccaaaacaattttgaagtcagaaaatagcacttacatgctctgattttaacattacctttaaagctgttgtaaacaagacaatgtggttttggcataaggacagagaaagagaacagagttcagaaatagacccagacttatgctcgttttcaacaaaggcatcaatggaatgaaatggagaaattaaagtcttttcaacaaatggtgctggaataacagattactcacatgggaaagatgaacctagatccctacctcacaccctatataaaagctaatttgagataaatcatggatttaaaaataaaagcaaaaaatgtaaagcttctagaagtatatataagagaatagcttttacagggtgcagtggcaggtgcctatagtcccagctactagggaggctgtggtgggaggatcacttgaggccagcagtttgaggttgtatagtatactatggttgattttgcctgttagtagctgctgcactccagcctggtcaacatagtgagacatcatccaacaaaaaaaaaaaaaaagaaagaaaaacagcttgataagtaaagacaagacatagaaagcaaagcaataacttttttgtgtgtgtgtgtggagacgggtctcactctggcacccagattggagtgcagtggctcaatcttggctcactgcaacccccacctcagcctcctgagtagctgggaccacaggtactcaccaccatgcctggctaattttttgtattttttgtagaaatggggtttcaccatgttgcccaggctgtggtgggaggatcacttgaggccagcagtttgaggttgtatagtatactatggttgattttgcctgtttagtagctgctgcactccagcctggtcaacatagtgagacatcatccaac

SEQ ID NO: 48037 - DNA, 569 bp, Homo sapiens
tttttttttttttttttaagatggtgtgtcccaggcaggagtgcagtagtgcgatcttggctcaccacaatctctgcttcccaggttcaagcgattctcctgcctcagcctcctgagtagctgggattacaggcatgggctaccacacccagctgatttttgtattgttagtagagatgggatttcaccatgttgaccaggctggtctcgaactcctgacctcaagtgatccaccggccttggtctcccaaagtgctggagttacaggtgtgaggcaccgcgcccagcctgagctaccacgcccagcctggtgtattcttaagtcatagtgtaaatggcactaagttttgtcttcagcactctcagcttttcattcttttcaatctctttctccattcaatgatgtctcctctctatgtttaggactctactgtgtttattgtcatgtttggtcaatacactaagaaaaaaagtttttgataaatttatttgacttgaagtatgcatgatcaggatttatgtgaaatctctgttagaactatttgcattttaaagaggaaaaaaagtaa

SEQ ID NO: 48038 - DNA, 341 bp, Homo sapiens
ttcctccgttatattttggcctctgttctttccagatttccctggctttgacttttgggtttaggccttgatgcagaatcccttgtcaggacatttgctctctagtgtcagataggctcctcagtcagcaattccagcgaggactgctcctgatggctgtcaggccagctgatatggtctggggagtggggattgggaggaggaggttgggagttgtgacttcccttcctgtgcccttcaaaaggctgattcacgtgttgcattataatcttgttttatttttggtaaaatttacatttacctactctcaaacttaagaaatagaatgtagggaaaaaaag

SEQ ID NO: 48039 - DNA, 515 bp, Homo sapiens
aaaaaaaaaaaaaaaaaaaaaaaaaacagagggagccaacagagtaaagtgaaagcaagtttactaagaaagtaaagggagaaaagagtgcctactccataggcagagcagctccaagggccactagttggctatttttatgcttatttctttttttaattcatttatttttcaaatggagtattatttcttgatcttatgctaaacaaggggtgggttattcatgaggttttccggaaaggagcagccattcctggaactgagggttccccccgctttcagaccacatagggtaacttccaagtgttgccatggcgtttgtaaactgtcctggcgctggtgggcgtgtcttttagcatgctcatttgttataatgagtgtatcgtgaatagtgaggacaaccagaggtcacttcagttgtcatcttggttttggcgggcttcgatccacttatgtaccgcatcttgtttcagcagcggggtcctcgtgacctgtaccttgcaaaacctgtcctg

SEQ ID NO: 48040 - DNA, 410 bp, Homo sapiens
gaaagtttctatttgcttccaaaataattaccttttgattaatgcctggaattctacagctggtgcttcattcttttagcttaaaacttccatctcttctgcagtggagatctcatcagttatttgtagttcagtatggatggcttttaaatcttttcctgatagattttaatggagggcaaaaagacaccataaggatactatactggggagtagacaagagtgaagaatgtgaggacagcccaaccatttaacacataagagtgaggtctaaagaagaaaggtcaggccaggcacagtaatgcacggctgtgatcccagcactttgggcagccgagatggtttgagaccaacatgggaaacacagtgaaaaataattacgaggaccacggtgaattcttccttctctt

SEQ ID NO: 48041 - DNA, 461 bp, Homo sapiens
  misc_feature (301)..(301): n is a, c, g, or t
  misc_feature (335)..(335): n is a, c, g, or t
  misc_feature (341)..(341): n is a, c, g, or t
  misc_feature (348)..(348): n is a, c, g, or t
  misc_feature (371)..(371): n is a, c, g, or t
  misc_feature (386)..(386): n is a, c, g, or t
  misc_feature (407)..(407): n is a, c, g, or t
  misc_feature (453)..(453): n is a, c, g, or t
actgccctaaaaggaagggcacagtatttctggcctcaccatctgtggttaccacagtccttggttgagacccagtgcatgactggctccaagtttgacacacaacatttccagtggtggtggccacagtattgctacagtcacttcttcctcaactccacacagctcagcagagaaagagagagagagagactccattcattaatatttggaagaaagtaagggaagaggaaaattatctctacctgataatccatggaattcttccagaccttccctaaaaccacaaagggttcattantttcccttaagttctggcaaggggacccacaggnttttanttgaggnttgggggggttgcccccctttantgttagggattacanttttcggggttggacccaaanttttttaggggttccaccaacaccccaggttcccttttttttggantaccctgg

SEQ ID NO: 48042 - DNA, 302 bp, Homo sapiens
gagttctccagattattttcatatatagccagatctgagaactactgacttagaatatcctaaaaaagacaggtggatcatgaggtcaggagatcgagaccatcctggctaacatggtgaaaccccgtctctactaaaaatacaaaaaattagccgggcgtggtggcgggcatctgtagtcccagctactccagaggctgaggcaggagaatggtgtgaacccgggaggcggagcttgcagtgagccgagatcatgccactgcactccagcctgggcgacagagcaagactccgtctcaaaa

SEQ ID NO: 48043 - DNA, 157 bp, Homo sapiens
gtcagatctcccctgtacaaagagtggtctactctaaaaattgctttgaaattggaatggacccctccctctcttctattttagttctagtttctagctctttaaaataatgcaacttttcgctttattgttctaaatcaatgcattctagccgttg

SEQ ID NO: 48044 - DNA, 430 bp, Homo sapiens
caccatcctgtttttcaccgaggtggtgattcatctcacaaccaaacttctgtaccctttggccagactcttcccatccatcctaagaccaggcctgggaaccaccatggtactctctgcttctgtgagctcaatgttttagattccacatataagtgagcacaggtggcatttgtctttctgcgcctggcttatttcgctcagcataaagtcctccagattcctccaaatgacagaaatgtctttgtctttttaaaggctcaatagtattccattgtgcatctatatcagcacattttatccattcacctgttgttagacatctagaatgattctatatcttgggctactataaataatgctggcagtggaacataggaatgcagacatctcaacacactgagtgcaattcctttggatttgtgccaag

SEQ ID NO: 48045 - DNA, 853 bp, Homo sapiens
gcaaacaccttgagaatggcatttccaaggcccttgggctgtgccagggcaccaacgccagtcgaggaccacgcctttctgagggatgcttggaatctcacagacaggggttcacattccgactctgcttcctagaggctatgtggccttgggcgtgtctggaacctctctgggccacagtttgcttatctgtgaaagagtcatggtagcctctccttatgggtttatggggagcttcggatatggagggtggggcagcacacagggctcaagctgcagctcttagttacctgcttttcctttgcaggtgtcctacgggcctgatggaaaggtggcaggcgaaatgcacctggcctcagcgtcaggggctgtgaatgcagtagcacttgtagctatgaggtcagagtggactaggatggtccttccaccaagaagcctgggccttcctgctcttcgttgtccagctgcagaaactgatctcatccctcagggcttggcacaactgccccttcctcctcacattcccaaatatacctacccctccccaactcaatcctcctcaccagactgtggctccaggatgacagggcagagttggactcacctgtgtctgccaggccagctcaccgtgggggcaggtcccaagaggcctctggatttggaccaacttccagtgtgaccttgaacaaggccttcgcctccctcagcctccgttgcatgaggggttgtgctggcacatctcagagcaggtagcgctacctggtgagttgagggctctgtccatcatctttgtcactgtaatgctgggtaacaaataaacacgaaacaatgagtgctcgtttctcaggtgccg

SEQ ID NO: 48046 - DNA, 639 bp, Homo sapiens
caacattgcattatttgcttatttggtggttaggactgtcatgtcaagtgattggagttttgcttgaatcccttcctagggcgaaatgtctgggcaaaaatggctgctagtgaacctcggatgtttgatatgctgtggttgcagtcactcataacctagtggttttcttctttttgtcttcatcacattctgaaacaaaaaatatgtttctatactaaccagaaaggaagacaggtatagtcgggggtattacctctacatggggaaagggacgaaaagagaagataattattcagaggaacgaaaagcagctaaagcagctggtagcatccattgcagctttaactgtggtgcacaaatgagctccatttacttgattacatcccccttgggtcctcctattcgaattccaagggtatcccatgtggagttcacaggctcactgagtttgctgggcttgtgagcgaaaatggaactgtcagcatattcatttgagcagtgctagaagtcagggtttgtgactttaggaaatggaatcttaggaaatgtggcagtttttgagctctgggaaaggcaccttagacctgtcctgtgagctgtcctatgtctcctccagagaccatggctacttcttaggcc

SEQ ID NO: 48047 - DNA, 777 bp, Homo sapiens
gagctagcaccatgaacttcaataccctgtggtcttatcagtataatatcgtttcatcttcttacactcaaatctcattcctgatgaaaaatttaaatcctctgtagggtgaaatgctggacctaatccttttatcttcaaaaaaaaaaagtatatgaaaatattaaatattttcaccacttctttaaaaagtaaggcagtactcctaactatgcaatcctgcccattcttgctgagatacgcattgcaatgataaagttcaggattagttcccgaaggctcctcccctgcctagtgatagttcatggttccccattgcctatgaaattccttagcagcccctccaagtctacctacatctggtcttaggccactcatgacgggccctttgctgttgctgtcactcacacacagacacacacatgcacacacacgcacacaggcacacatgcaagcacacacacactcacaccatctagccacatcccctttactcatcacccatgcacttaacccacattacctgactttgtctgtgttgctgacttggcctgaatgccctctctgtactttccttttcatctactcctctaagacaaagctctgctaagccttcccctgtcagccagggagagtcacacctcctcagagcaccttccgagacttccatctcagccccaacagaagtgctgggctgagatgaagtgcagaggctgagatgccactgctgcttaattaaagtgaatggcttaattgtttccttatctgaaaaatagg

SEQ ID NO: 48048 - DNA, 214 bp, Homo sapiens
ggctgatgttggacagggacaccagtagaaaggtcactgcagatttcttcccaagagcaaggctcttcggtcaaccccctttcccactttcccagcggatgtgaacttcgtgctcaccaaagcaagaggtttcaaggtagcagcccatggggttgtatctgattggcagaaatgtgtggtttgccctgaattgttttaagatgttttcatgttg

SEQ ID NO: 48049 - DNA, 798 bp, Homo sapiens
cccttcccattctcctctgcgcggcctccatctaagatctcttccccttgtccatagcctagatcgagctccctgtgtgcaccgcgcgctgcccgaggcgcgtaagtgggggaggagagcggcttcccccggggtggttctagccgtgggtgtggagcgtgggaaggctcagcttccgggtcgagaacctggggctgcggtggacctgatcctgaggtctcagcgtagagatgctgagtccagaggcctgttctagttcaccagtgcagtgaggggctcagtatccgggcctcccgagaggtgggtaggaaggcggggtacaggaaacttggcaccaacgcgccgggaccccaccgcggtgcggacagccaggtgtccgtggtggcgcttccttggagatgctgcctgcagacaggcgtggggaatctgaagtttgtgttaatagctaaacgaagttgagttgcagggagcgggggacgctgggaagaaatgattgatttaaaaggaatttgacgccgggcatggtggcggcatgcccccatgttccctggaggtcaagcctgcatgagccgagatcgcacccgtaccacgacactccgtcccgggcgacagagcgagaccctgtcacgggggaaaaaataaaaataaaaatttgacgctcactttagctgagtattgagccttgttataacattgagatagaggtctggcgcggcgtctcacacctgtaatcccagaactttggaaggccgatgcgggaggatcgcttgaggccaggagttctacgccagcctggct

SEQ ID NO: 48050 - DNA, 869 bp, Homo sapiens
cccttcccattctcctctgcgcggcctccatctaagatctcttccccttgtccatagcctagatcgagctccctgtgtgcaccgcgcgctgcccgaggcgcaggtcaaccagaatcaagatgtctgggactgaggaagcaattcttggaggacgtgacagccatcctgctgctggcggcggctcagtgttatgctttggacagtgccagtacacagcagaagagtaccaggccatccagaaggccctgaggcagaggctgggcccagaatacataagtagccgcatggctggcggaggccagaaggtgtgctacattgagggtcatcgggtaattaatctggccaatgagatgtttggttacaatggctgggcacactccatcacgcagcagaatgtggattttgttgacctcaacaatggcaagttctacgtgggagtctgtgcatttgtgagggtccagctgaaggatggttcatatcatgaagatgttggttatggtgttagtgagggcctcaagtccaaggctttatctttggagaaggcaaggaaggaggcggtgacagacgggctgaagcgagccctcaggagttttgggaatgcacttggaaactgtattctggacaaagactacctgagatcactaaataagcttccacgccagttgcctcttgaagtggatttaactaaagcgaagagacaagatcttgaaccgtctgtggaggaggcaagatacaacagctgccgaccgaacatggccctgggacacccacagctgcagcaggtgacctccccttccagacccagccatgctgtgataccggcggaccaggactgcagctcccggtatgcggcctaagtcccctccttt

SEQ ID NO: 48051 - DNA, 3031 bp, Homo sapiens
cccttcccattctcctctgcgcggcctccatctaagatctcttccccttgtccatagcctagatcgagctccctgtgtgcaccgcgcgctgcccgaggcgcaggtcaaccagaatcaagatgtctgggactgaggaagcaattcttggaggacgtgacagccatcctgctgctggcggcggctcagtgttatgctttggacagtgccagtacacagcagaagagtaccaggccatccagaaggccctgaggcagaggctgggcccagaatacataagtagccgcatggctggcggaggccagaaggtgtgctacattgagggtcatcgggtaattaatctggccaatgagatgtttggttacaatggctgggcacactccatcacgcagcagaatgtggattttgttgacctcaacaatggcaagttctacgtgggagtctgtgcatttgtgagggtccagctgaaggatggttcatatcatgaagatgttggttatggtgttagtgagggcctcaagtccaaggctttatctttggagaaggcaaggaaggaggcggtgacagacgggctgaagcgagccctcaggagttttgggaatgcacttggaaactgtattctggacaaagactacctgagatcactaaataagcttccacgccagttgcctcttgaagtggatttaactaaagcgaagagacaagatcttgaaccgtctgtggaggaggcaagatacaacagctgccgaccgaacatggccctgggacacccacagctgcagcaggtgacctccccttccagacccagccatgctgtgataccggcggaccaggactgcagctcccgaagcctgagctcatccgccgtggagagcgaggccacgcaccagcggaagctccggcagaagcagctgcagcagcagttccgggagcggatggagaagcagcaggttcgagtctccacgccgtcagctgagaagagtgaggcagcgcctccggcccctcctgtgacgcacagcactcctgtaactgtctcagaaccactcctggagaaagacttccttgcaggagtgactcaagaattaatcaagactcttgaagacaactctgaaaagtgggctgtgactcccgatgcaggggatggtgtggtcaagccctcgtctagagcagacccagcccagacctctgacacattagccttgaacaaccagatggtgacccagaacaggactccacacagcgtttgccaccagaaaccacaagcaaaatctggatcttgggacctccaaacttatagcgctgaccaacgcacaacaggaaactgggaatctcataggaagagccaggacatgaagaaaaggaaatatgatccatcttaactgaggctcaggccacataattggactctgtcacaaagggactttggaaaactactttttggtcatgaaattgttcatcgctgctggagaatgaacgtcattgcgatttatcttgcttcattctgaaccttatcaagaggatctgactgagagcccactgcagttagagctgagcacttttgaaaagcttgtccatcactctagtagggagaggctctggacagatgaataccttttcttcggcttgtgaggcttcccactatttattactgaactattatgttaatgaagatggacattttaggaatcaccaatggctccttgccctcaagcaatataggccagacttggtcctaagcacctgcctcagcaattgtctacattcagttgttttgcataacgtctgccttctttcctttacggtccatgcctttaatgttgcccacattaagcactgtggatcacgacaggaaaaaggttggagcagtgcttttcactactttgtatcaatccaggctacaatcttcatttaatataaataatttatggatttatgacattacaatcctgcattgtttcaagactgacattttttcctaaggaaggaaataatcatctaagaccacgaaaaaaggctgttttttgtttttttttttttttttttttgagacggggtctggctgtgttgccctgactggagttcagtggtgcaaacacagctctctccacaacctcttgggcccaagtgatactcccacctctgccttacaaaatacagggattactggtgtgagccactgtgtctggccagaaaaggcatttttgagaaagcaaatcgtataccttattaacaaaatagaatatatatatatattgcttatctgaaatgcttgaaaccagaattgttttgcattttttgaatatttgtatacacataatgagaccttggggatgggacccaagtctgaacgtggaattcacctgtgtttcgtgtatatgcctcatacacataattttgtgcatgaaacagagtttttgtataagaagatacactgcagctgaagagggctgggtttttttttctcttagggtcgctgcataaactgttgtatgcctggtgctttgcgacttgtcacacgaggtcacgtgtggaattttccacttctggcatcacgtcagtgctcagaaattttctgatctcagagcatttcaattagggatgctcaaacgcaactgtttctacttccccatttcaggtgtgagatgtaacccaccttgaccataaattggcttttcatagtgctcagatgtttcataattcttcccccaaaataatgaagtttgcagtttaacaactttttttttgagagggggggtctggctctgtagcgcaggctggagtgcagcggtgccatcttgactcattgcagcctccgcctgccaggattcaagcaattctcctgcctcaggctcccgagtagctgggattacagacacccaccacgacgcccgactaatttttgtatttttagtagaggagacggggtttctccatgttggccaggctggtctcaaactgacctcaagtgatctgcccacctcggcctcccaaagtaaaaagtactagaattataggcatgagccattgcgcccag

SEQ ID NO: 48052 - DNA, 3205 bp, Homo sapiens
cgcggcggccgggggcctccgggcgccttccggggcacgcgggatcgacatgcacttggatcattgcagtttctgggcctgctgtcatctcccccttcagtacttcccacatatgactaccaactgttagacgatgtgctgctgccagaccagcctttcatttcttggacatccggctatttacccaggaaaagtcatcctttgactatttttcatgacctttctcatctgactcgtgatctgcccatcttgttactccctagcagtgtggtaagaggtcaaccagaatcaagatgtctgggactgaggaagcaattcttggaggacgtgacagccatcctgctgctggcggcggctcagtgttatgctttggacagtgccagtacacagcagaagagtaccaggccatccagaaggccctgaggcagaggctgggcccagaatacataagtagccgcatggctggcggaggccagaaggtgtgctacattgagggtcatcgggtaattaatctggccaatgagatgtttggttacaatggctgggcacactccatcacgcagcagaatgtggattttgttgacctcaacaatggcaagttctacgtgggagtctgtgcatttgtgagggtccagctgaaggatggttcatatcatgaagatgttggttatggtgttagtgagggcctcaagtccaaggctttatctttggagaaggcaaggaaggaggcggtgacagacgggctgaagcgagccctcaggagttttgggaatgcacttggaaactgtattctggacaaagactacctgagatcactaaataagcttccacgccagttgcctcttgaagtggatttaactaaagcgaagagacaagatcttgaaccgtctgtggaggaggcaagatacaacagctgccgaccgaacatggccctgggacacccacagctgcagcaggtgacctccccttccagacccagccatgctgtgataccggcggaccaggactgcagctcccgaagcctgagctcatccgccgtggagagcgaggccacgcaccagcggaagctccggcagaagcagctgcagcagcagttccgggagcggatggagaagcagcaggttcgagtctccacgccgtcagctgagaagagtgaggcagcgcctccggcccctcctgtgacgcacagcactcctgtaactgtctcagaaccactcctggagaaagacttccttgcaggagtgactcaagaattaatcaagactcttgaagacaactctgaaaagtgggctgtgactcccgatgcaggggatggtgtggtcaagccctcgtctagagcagacccagcccagacctctgacacattagccttgaacaaccagatggtgacccagaacaggactccacacagcgtttgccaccagaaaccacaagcaaaatctggatcttgggacctccaaacttatagcgctgaccaacgcacaacaggaaactgggaatctcataggaagagccaggacatgaagaaaaggaaatatgatccatcttaactgaggctcaggccacataattggactctgtcacaaagggactttggaaaactactttttggtcatgaaattgttcatcgctgctggagaatgaacgtcattgcgatttatcttgcttcattctgaaccttatcaagaggatctgactgagagcccactgcagttagagctgagcacttttgaaaagcttgtccatcactctagtagggagaggctctggacagatgaataccttttcttcggcttgtgaggcttcccactatttattactgaactattatgttaatgaagatggacattttaggaatcaccaatggctccttgccctcaagcaatataggccagacttggtcctaagcacctgcctcagcaattgtctacattcagttgttttgcataacgtctgccttctttcctttacggtccatgcctttaatgttgcccacattaagcactgtggatcacgacaggaaaaaggttggagcagtgcttttcactactttgtatcaatccaggctacaatcttcatttaatataaataatttatggatttatgacattacaatcctgcattgtttcaagactgacattttttcctaaggaaggaaataatcatctaagaccacgaaaaaaggctgttttttgtttttttttttttttttttttgagacggggtctggctgtgttgccctgactggagttcagtggtgcaaacacagctctctccacaacctcttgggcccaagtgatactcccacctctgccttacaaaatacagggattactggtgtgagccactgtgtctggccagaaaaggcatttttgagaaagcaaatcgtataccttattaacaaaatagaatatatatatatattgcttatctgaaatgcttgaaaccagaattgttttgcattttttgaatatttgtatacacataatgagaccttggggatgggacccaagtctgaacgtggaattcacctgtgtttcgtgtatatgcctcatacacataattttgtgcatgaaacagagtttttgtataagaagatacactgcagctgaagagggctgggtttttttttctcttagggtcgctgcataaactgttgtatgcctggtgctttgcgacttgtcacacgaggtcacgtgtggaattttccacttctggcatcacgtcagtgctcagaaattttctgatctcagagcatttcaattagggatgctcaaacgcaactgtttctacttccccatttcaggtgtgagatgtaacccaccttgaccataaattggcttttcatagtgctcagatgtttcataattcttcccccaaaataatgaagtttgcagtttaacaactttttttttgagagggggggtctggctctgtagcgcaggctggagtgcagcggtgccatcttgactcattgcagcctccgcctgccaggattcaagcaattctcctgcctcaggctcccgagtagctgggattacagacacccaccacgacgcccgactaatttttgtatttttagtagaggagacggggtttctccatgttggccaggctggtctcaaactgacctcaagtgatctgcccacctcggcctcccaaagtaaaaagtactagaattataggcatgagccattgcgcccag

SEQ ID NO: 48053 - DNA, 2443 bp, Homo sapiens
cgcggcggccgggggcctccgggcgccttccggggcacgcgggatcgacatgcacttggatcattgcagtttctgggcctgctgtcatctcccccttcagtacttcccacatatgactaccaactgttagacgatgtgctgctgccagaccagcctttcatttcttggacatccggctatttacccaggaaaagtcatcctttgactatttttcatgacctttctcatctgactcgtgatctgcccatcttgttactccctagcagtgtggtaagaggtcaaccagaatcaagatgtctgggactgaggaagcaattcttggaggacgtgacagccatcctgctgctggcggcggctcagtgttatgctttggacagtgccagtacacagcagaagagtaccaggccatccagaaggccctgaggcagaggctgggcccagaatacataagtagccgcatggctggcggaggccagaaggtgtgctacattgagggtcatcgggtaattaatctggccaatgagatgtttggttacaatggctgggcacactccatcacgcagcagaatgtggattttgttgacctcaacaatggcaagttctacgtgggagtctgtgcatttgtgagggtccagctgaaggatggttcatatcatgaagatgttggttatggtgttagtgagggcctcaagtccaaggctttatctttggagaaggcaaggaaggaggcggtgacagacgggctgaagcgagccctcaggagttttgggaatgcacttggaaactgtattctggacaaagactacctgagatcactaaataagcttccacgccagttgcctcttgaagtggatttaactaaagcgaagagacaagatcttgaaccgtctgtggaggaggcaagatacaacagctgccgaccgaacatggccctgggacacccacagctgcagcaggtgacctccccttccagacccagccatgctgtgataccggcggaccaggactgcagctcccgaagcctgagctcatccgccgtggagagcgaggccacgcaccagcggaagctccggcagaagcagctgcagcagcagttccgggagcggatggagaagcagcaggttcgagtctccacgccgtcagctgagaagagtgaggcagcgcctccggcccctcctgtgacgcacagcactcctgtaactgtctcagaaccactcctggagaaagacttccttgcaggagtgactcaagaattaatcaagactcttgaagacaactctgaaaagtgggctgtgactcccgatgcaggggatggtgtggtcaagccctcgtctagagcagacccagcccagacctctgacacattagccttgaacaaccagatggtgacccagaacaggactccacacagcgtttgccaccagaaaccacaagcaaaatctggatcttgggacctccaaacttatagcgctgaccaacgcacaacaggaaactgggaatctcataggaagagccaggacatgaagaaaaggaaatatgatccatcttaactgaggctcaggccacataattggactctgtcacaaagggactttggaaaactactttttggtcatgaaattgttcatcgctgctggagaatgaacgtcattgcgatttatcttgcttcattctgaaccttatcaagaggatctgactgagagcccactgcagttagagctgagcacttttgaaaagcttgtccatcactctagtagggagaggctctggacagatgaataccttttcttcggcttgtgaggcttcccactatttattactgaactattatgttaatgaagatggacattttaggaatcaccaatggctccttgccctcaagcaatataggccagacttggtcctaagcacctgcctcagcaattgtctacattcagttgttttgcataacgtctgccttctttcctttacggtccatgcctttaatgttgcccacattaagcactgtggatcacgacaggaaaaaggttggagcagtgcttttcactactttgtatcaatccaggctacaatcttcatttaatataaataatttatggatttatgacattacaatcctgcattgtttcaagactgacattttttcctaaggaaggaaataatcatctaagaccacgaaaaaaggctgttttttgtttttttttttttttttttttgagacggggtctggctgtgttgccctgactggagttcagtggtgcaaacacagctctctccacaacctcttgggcccaagtgatactcccacctctgccttacaaaatacagggattactggtgtgagccactgtgtctggccagaaaaggcatttttgagaaagcaaatcgtataccttattaacaaaatagaatatatatatatattgcttatctgaaatgcttg

SEQ ID NO: 48054 - DNA, 3182 bp, Homo sapiens
cccttcccattctcctctgcgcggcctccatctaagatctcttccccttgtccatagcctagatcgagctccctgtgtgcaccgcgcgctgcccgaggcgcaggtcaaccagaatcaagatgtctgggactgaggaagcaattcttggaggacgtgacagccatcctgctgctggcggcggctcagtgttatgctttggacagtgccagtacacagcagaagagtaccaggccatccagaaggccctgaggcagaggctgggcccagaatacataagtagccgcatggctggcggaggccagaaggtgtgctacattgagggtcatcgggtaattaatctggccaatgagatgtttggttacaatggctgggcacactccatcacgcagcagaatgtggattttgttgacctcaacaatggcaagttctacgtgggagtctgtgcatttgtgagggtccagctgaaggatggttcatatcatgaagatgttggttatggtgttagtgagggcctcaagtccaaggctttatctttggagaaggcaaggaaggaggcggtgacagacgggctgaagcgagccctcaggcttcccttgctgggagtaagtggtagaatcctgtactctctcttctccgtgcactcagtcatgtgtgccggaggccttcccactcctactgcgagtgcacagacagcaccctcctctccgtgctcctcagcagtcctccgctacgcacaggagttttgggaatgcacttggaaactgtattctggacaaagactacctgagatcactaaataagcttccacgccagttgcctcttgaagtggatttaactaaagcgaagagacaagatcttgaaccgtctgtggaggaggcaagatacaacagctgccgaccgaacatggccctgggacacccacagctgcagcaggtgacctccccttccagacccagccatgctgtgataccggcggaccaggactgcagctcccgaagcctgagctcatccgccgtggagagcgaggccacgcaccagcggaagctccggcagaagcagctgcagcagcagttccgggagcggatggagaagcagcaggttcgagtctccacgccgtcagctgagaagagtgaggcagcgcctccggcccctcctgtgacgcacagcactcctgtaactgtctcagaaccactcctggagaaagacttccttgcaggagtgactcaagaattaatcaagactcttgaagacaactctgaaaagtgggctgtgactcccgatgcaggggatggtgtggtcaagccctcgtctagagcagacccagcccagacctctgacacattagccttgaacaaccagatggtgacccagaacaggactccacacagcgtttgccaccagaaaccacaagcaaaatctggatcttgggacctccaaacttatagcgctgaccaacgcacaacaggaaactgggaatctcataggaagagccaggacatgaagaaaaggaaatatgatccatcttaactgaggctcaggccacataattggactctgtcacaaagggactttggaaaactactttttggtcatgaaattgttcatcgctgctggagaatgaacgtcattgcgatttatcttgcttcattctgaaccttatcaagaggatctgactgagagcccactgcagttagagctgagcacttttgaaaagcttgtccatcactctagtagggagaggctctggacagatgaataccttttcttcggcttgtgaggcttcccactatttattactgaactattatgttaatgaagatggacattttaggaatcaccaatggctccttgccctcaagcaatataggccagacttggtcctaagcacctgcctcagcaattgtctacattcagttgttttgcataacgtctgccttctttcctttacggtccatgcctttaatgttgcccacattaagcactgtggatcacgacaggaaaaaggttggagcagtgcttttcactactttgtatcaatccaggctacaatcttcatttaatataaataatttatggatttatgacattacaatcctgcattgtttcaagactgacattttttcctaaggaaggaaataatcatctaagaccacgaaaaaaggctgttttttgtttttttttttttttttttttgagacggggtctggctgtgttgccctgactggagttcagtggtgcaaacacagctctctccacaacctcttgggcccaagtgatactcccacctctgccttacaaaatacagggattactggtgtgagccactgtgtctggccagaaaaggcatttttgagaaagcaaatcgtataccttattaacaaaatagaatatatatatatattgcttatctgaaatgcttgaaaccagaattgttttgcattttttgaatatttgtatacacataatgagaccttggggatgggacccaagtctgaacgtggaattcacctgtgtttcgtgtatatgcctcatacacataattttgtgcatgaaacagagtttttgtataagaagatacactgcagctgaagagggctgggtttttttttctcttagggtcgctgcataaactgttgtatgcctggtgctttgcgacttgtcacacgaggtcacgtgtggaattttccacttctggcatcacgtcagtgctcagaaattttctgatctcagagcatttcaattagggatgctcaaacgcaactgtttctacttccccatttcaggtgtgagatgtaacccaccttgaccataaattggcttttcatagtgctcagatgtttcataattcttcccccaaaataatgaagtttgcagtttaacaactttttttttgagagggggggtctggctctgtagcgcaggctggagtgcagcggtgccatcttgactcattgcagcctccgcctgccaggattcaagcaattctcctgcctcaggctcccgagtagctgggattacagacacccaccacgacgcccgactaatttttgtatttttagtagaggagacggggtttctccatgttggccaggctggtctcaaactgacctcaagtgatctgcccacctcggcctcccaaagtaaaaagtactagaattataggcatgagccattgcgcccag

SEQ ID NO: 48055 - DNA, 2306 bp, Homo sapiens
cctccactcaggcctccagagccagccagccgtgcgtgtcctcccagcagccgcggctgttgctcaggagcccgtcctcgccgccgccctctcatgcagaagcctgagctcatccgccgtggagagcgaggccacgcaccagcggaagctccggcagaagcagctgcagcagcagttccgggagcggatggagaagcagcaggttcgagtctccacgccgtcagctgagaagagtgaggcagcgcctccggcccctcctgtgacgcacagcactcctgtaactgtctcagaaccactcctggagaaagacttccttgcaggagtgactcaagaattaatcagtaaataccttgaaatgcttagactcttgaagacaactctgaaaagtgggctgtgactcccgatgcaggggatggtgtggtcaagccctcgtctagagcagacccagcccagacctctgacacattagccttgaacaaccagatggtgacccagaacaggactccacacagcgtttgccaccagaaaccacaagcaaaatctggatcttgggacctccaaacttatagcgctgaccaacgcacaacaggaaactgggaatctcataggaagagccaggacatgaagaaaaggaaatatgatccatcttaactgaggctcaggccacataattggactctgtcacaaagggactttggaaaactactttttggtcatgaaattgttcatcgctgctggagaatgaacgtcattgcgatttatcttgcttcattctgaaccttatcaagaggatctgactgagagcccactgcagttagagctgagcacttttgaaaagcttgtccatcactctagtagggagaggctctggacagatgaataccttttcttcggcttgtgaggcttcccactatttattactgaactattatgttaatgaagatggacattttaggaatcaccaatggctccttgccctcaagcaatataggccagacttggtcctaagcacctgcctcagcaattgtctacattcagttgttttgcataacgtctgccttctttcctttacggtccatgcctttaatgttgcccacattaagcactgtggatcacgacaggaaaaaggttggagcagtgcttttcactactttgtatcaatccaggctacaatcttcatttaatataaataatttatggatttatgacattacaatcctgcattgtttcaagactgacattttttcctaaggaaggaaataatcatctaagaccacgaaaaaaggctgttttttgtttttttttttttttttttttgagacggggtctggctgtgttgccctgactggagttcagtggtgcaaacacagctctctccacaacctcttgggcccaagtgatactcccacctctgccttacaaaatacagggattactggtgtgagccactgtgtctggccagaaaaggcatttttgagaaagcaaatcgtataccttattaacaaaatagaatatatatatatattgcttatctgaaatgcttgaaaccagaattgttttgcattttttgaatatttgtatacacataatgagaccttggggatgggacccaagtctgaacgtggaattcacctgtgtttcgtgtatatgcctcatacacataattttgtgcatgaaacagagtttttgtataagaagatacactgcagctgaagagggctgggtttttttttctcttagggtcgctgcataaactgttgtatgcctggtgctttgcgacttgtcacacgaggtcacgtgtggaattttccacttctggcatcacgtcagtgctcagaaattttctgatctcagagcatttcaattagggatgctcaaacgcaactgtttctacttccccatttcaggtgtgagatgtaacccaccttgaccataaattggcttttcatagtgctcagatgtttcataattcttcccccaaaataatgaagtttgcagtttaacaactttttttttgagagggggggtctggctctgtagcgcaggctggagtgcagcggtgccatcttgactcattgcagcctccgcctgccaggattcaagcaattctcctgcctcaggctcccgagtagctgggattacagacacccaccacgacgcccgactaatttttgtatttttagtagaggagacggggtttctccatgttggccaggctggtctcaaactgacctcaagtgatctgcccacctcggcctcccaaagtaaaaagtactagaattataggcatgagccattgcgcccag

SEQ ID NO: 48056 - DNA, 1265 bp, Homo sapiens
ctcgtccgaggattcctgcttcagaaatcgcggtccatgcctttaatgttgcccacattaagcactgtggatcacgacaggaaaaaggttggagcagtgcttttcactactttgtatcaatccaggctacaatcttcatttaatataaataatttatggatttatgacattacaatcctgcattgtttcaagactgacattttttcctaaggaaggaaataatcatctaagaccacgaaaaaaggctgttttttgtttttttttttttttttttttgagacggggtctggctgtgttgccctgactggagttcagtggtgcaaacacagctctctccacaacctcttgggcccaagtgatactcccacctctgccttacaaaatacagggattactggtgtgagccactgtgtctggccagaaaaggcatttttgagaaagcaaatcgtataccttattaacaaaatagaatatatatatatattgcttatctgaaatgcttgaaaccagaattgttttgcattttttgaatatttgtatacacataatgagaccttggggatgggacccaagtctgaacgtggaattcacctgtgtttcgtgtatatgcctcatacacataattttgtgcatgaaacagagtttttgtataagaagatacactgcagctgaagagggctgggtttttttttctcttagggtcgctgcataaactgttgtatgcctggtgctttgcgacttgtcacacgaggtcacgtgtggaattttccacttctggcatcacgtcagtgctcagaaattttctgatctcagagcatttcaattagggatgctcaaacgcaactgtttctacttccccatttcaggtgtgagatgtaacccaccttgaccataaattggcttttcatagtgctcagatgtttcataattcttcccccaaaataatgaagtttgcagtttaacaactttttttttgagagggggggtctggctctgtagcgcaggctggagtgcagcggtgccatcttgactcattgcagcctccgcctgccaggattcaagcaattctcctgcctcaggctcccgagtagctgggattacagacacccaccacgacgcccgactaatttttgtatttttagtagaggagacggggtttctccatgttggccaggctggtctcaaactgacctcaagtgatctgcccacctcggcctcccaaagtaaaaagtactagaattataggcatgagccattgcgcccag

SEQ ID NO: 48057 - DNA, 313 bp, Homo sapiens
ccttcctctgggggcactagaccaataagggaaaattgccctaagagagcatgcacgtaacttcagtatggcacatgtgcccctcccagatactagcaagacattgcacatgcagcaattagccaacagcctgccaagggggagggacaagaggaagagacgggaaaagtcagaaaatagcaaatctgcgagtcctgagccagcaatcaggcagagtactgaatttttgagttgcctgcttggttccttacatgtgtgcttttatttgcttcagtgaattcttgtttctgccttaaatctacttctgtctcag

SEQ ID NO: 48058 - DNA, 574 bp, Homo sapiens
atcaatggggaatgcatgttagggtccacttcctctgctgctcctgagaagcaacctgtacaaaagttgtaattctattctctgatattcatgtgtaacaattcttaaccctgtttcacctttttttctcttgcccttaggagttttgggaatgcacttggaaactgtattctggacaaagactacctgagatcactaaataagcttccacgccaggtatatcagacatggatgagtggagtgaagataatgcggcaaactcttgtgtgtcatgggttgagtatttggaggatgcaaggagaaaaagtgaggactcagctctttagagggtcgggaatgttgatttcagatttcgaatgttagagacagcaggaactaatcccaacattttccttttttctaaagtacatcatgtgggccggggaccgtggctcacgcctggaatcccagcactttgggaggtggaggcaggtggatcacaaggtcaggagatcgagaccatcctggctaacacggtgaaaccctgtctctactaaaaatacaaaaaattagccgggcgaggtggtgggcgcct

SEQ ID NO: 48059 - DNA, 2525 bp, Homo sapiens
cccttcccattctcctctgcgcggcctccatctaagatctcttccccttgtccatagcctagatcgagctccctgtgtgcaccgcgcgctgcccgaggcgcaggtcaaccagaatcaagatgtctgggactgaggaagcaattcttggaggacgtgacagccatcctgctgctggcggcggctcagtgttatgctttggacagtgccagtacacagcagaagagtaccaggccatccagaaggccctgaggcagaggctgggcccagaatacataagtagccgcatggctggcggaggccagaaggtgtgctacattgagggtcatcgggtaattaatctggccaatgagatgtttggttacaatggctgggcacactccatcacgcagcagaatgtgggtgagtatgctctccagcagtggggacttctgcactgtccagctcctgctgaaagtctgctgtgggtgaggaggtaaggtaggtggactcagctgccagcaggaggaatggttgtggcccagcggtcagtgtcctcttcaacttgctctctttcccactcctagattttgttgacctcaacaatggcaagttctacgtgggagtctgtgcatttgtgagggtccagctgaaggtgaggggatggagtagacctgctgcccggaaggatcagtgggtggtaggagaaggatggttcatatcatgaagatgttggttatggtgttagtgagggcctcaagtccaaggctttatctttggagaaggcaaggaaggaggcggtgacagacgggctgaagcgagccctcaggagttttgggaatgcacttggaaactgtattctggacaaagactacctgagatcactaaataagcttccacgccagttgcctcttgaagtggatttaactaaagcgaagagacaagatcttgaaccgtctgtggaggaggcaagatacaacagctgccgaccgaacatggccctgggacacccacagctgcagcaggtgacctccccttccagacccagccatgctgtgataccggcggaccaggactgcagctcccgccgcggctgttgctcaggagcccgtcctcgccgccgccctctcatgcagaagcctgagctcatccgccgtggagagcgaggccacgcaccagcggaagctccggcagaagcagctgcagcagcagttccgggagcggatggagaagcagcaggttcgagtctccacgccgtcagctgagaagagtgaggcagcgcctccggcccctcctgtgacgcacagcactcctgtaactgtctcagaaccactcctggagaaagacttccttgcaggagtgactcaagaattaatcaagactcttgaagacaactctgaaaagtgggctgtgactcccgatgcaggggatggtgtggtcaagccctcgtctagagcagacccagcccagacctctgacacattagccttgaacaaccagatggtgacccagaacaggactccacacagcgtttgccaccagaaaccacaagcaaaatctggatcttgggacctccaaacttatagcgctgaccaacgcacaacaggaaactgggaatctcataggaagagccaggacatgaagaaaaggaaatatgatccatcttaactgaggctcaggccacataattggactctgtcacaaagggactttggaaaactactttttggtcatgaaattgttcatcgctgctggagaatgaacgtcattgcgatttatcttgcttcattctgaaccttatcaagaggatctgactgagagcccactgcagttagagctgagcacttttgaaaagcttgtccatcactctagtagggagaggctctggacagatgaataccttttcttcggcttgtgaggcttcccactatttattactgaactattatgttaatgaagatggacattttaggaatcaccaatggctccttgccctcaagcaatataggccagacttggtcctaagcacctgcctcagcaattgtctacattcagttgttttgcataacgtctgccttctttcctttacggtccatgcctttaatgttgcccacattaagcactgtggatcacgacaggaaaaaggttggagcagtgcttttcactactttgtatcaatccaggctacaatcttcatttaatataaataatttatggatttatgacattacaatcctgcattgtttcaagactgacattttttcctaaggaaggaaataatcatctaagaccacgaaaaaaggctgttttttttttttttttgagacggggtctggctgtgttgccctgactggagttcagtggtgcaaacacagctctctccacaacctcttgggcccaagtgatactcccacctctgccttacaaaatacagggattactggtgtgagccactgtgtctggccagaaaaggcatttttgagaaagcaaatcgtataccttattaacaaaatagaatatatatatatattgcttatctgaaatgcttg

SEQ ID NO: 48060 - DNA, 816 bp, Homo sapiens
cgcggcggccgggggcctccgggcgccttccggggcacgcgggatcgacatgcacttggatcattgcagtttctgggcctgctgtcatctcccccttcagtacttcccacatatgactaccaactgttagacgatgtgctgctgccagaccagcctttcatttcttggacatccggctatttacccaggaaaagtcatcctttgactatttttcatgacctttctcatctgactcgtgatctgcccatcttgttactccctagcagtgtggtaagtgaattcttgtttctgccttaaatctacttctgtctcagccaaattcattctcccaagaagacaaggatcgaggactgtggagccaactcagactcgccacggctaacaatgtttcctgggatcgcctcccaaataaactgcttgtacttgaacccttgtctcagagttgactactggaagaaccccagataagacaatctgcgagtagacatgtcagataatgcagttagatatgaatctggaattcagaggagaggctcatgcaatttgcaagtcatcatcaaaaagatgtcatttgttctgtttgtctactgcaggaagacagattaccctaaaatttagtggctgaaaacaactctattttatcgtagcttacaattttgtggattgggaattagagcctgtctcatctgggcaactcttctgttccccatggcatcacctgaggtcactccatggtattcagctaccagacgaactcatctggagtatccaagtattcattcacgctcatatctggcaccttggcagggatgactg

SEQ ID NO: 48061 - DNA, 2916 bp, Homo sapiens
cccttcccattctcctctgcgcggcctccatctaagatctcttccccttgtccatagcctagatcgagctccctgtgtgcaccgcgcgctgcccgaggcgcaggtcaaccagaatcaagatgtctgggactgaggaagcaattcttggaggacgtgacagccatcctgctgctggcggcggctcagtgttatgctttggacagtgccagtacacagcagaagagtaccaggccatccagaaggccctgaggcagaggctgggcccagaatacataagtagccgcatggctggcggaggccagaaggtgtgctacattgagggtcatcgggtaattaatctggccaatgagatgtttggttacaatggctgggcacactccatcacgcagcagaatgtggattttgttgacctcaacaatggcaagttctacgtgggagtctgtgcatttgtgagggtccagctgaaggatggttcatatcatgaagatgttggttatggtgttagtgagggcctcaagtccaaggctttatctttggagaaggcaaggaaggaggcggtgacagacgggctgaagcgagccctcaggagttttgggaatgcacttggaaactgtattctggacaaagactacctgagatcactaaataagcttccacgccagttgcctcttgaagtggatttaactaaagcgaagagacaagatcttgaaccgtctgtggaggaggcaagatacaacagctgccgaccgaacatggccctgggacacccacagctgcagcaggtgacctccccttccagacccagccatgctgtgataccggcggaccaggactgcagctcccgaagcctgagctcatccgccgtggagagcgaggccacgcaccagcggaagctccggcagaagcagctgcagcagcagttccgggagcggatggagaagcagcaggttcgagtctccacgccgtcagctgagaagagtgaggcagcgcctccggcccctcctgtgacgcacagcactcctgtaactgtctcagaaccactcctggagaaagacttccttgcaggagtgactcaagaattaatcaagactcttgaagacaactctgaaaagtgggctgtgactcccgatgcaggggatggtgtggtcaagccctcgtctagagcagacccagcccagacctctgacacattagccttgaacaaccagatggtgacccagaacaggactccacacagcgtttgccaccagaaaccacaagcaaaatctggatcttgggacctccaaacttatagcgctgaccaacgcacaacaggaaactgggaatctcataggaagagccaggacatgaagaaaaggaaatatgatccatcttaactgaggctcaggccacataattggactctgtcacaaagggactttggaaaactactttttggtcatgaaattgttcatcgctgctggagaatgaacgtcattgcgatttatcttgcttcattctgaaccttatcaagaggatctgactgagagcccactgcagttagagctgagcacttttgaaaagcttgtccatcactctagtagggagaggctctggacagatgaataccttttcttcggcttgtgaggcttcccactatttattactgaactattatgttaatgaagatggacattttaggaatcaccaatggctccttgccctcaagcaatataggccagacttggtcctaagcacctgcctcagcaattgtctacattcagttgttttgcataacgtctgccttctttcctttacggtccatgcctttaatgttgcccacattaagcactgtggatcacgacaggaaaaaggttggagcagtgcttttcactactttgtatcaatccaggctacaatcttcatttaatataaataatttatggatttatgacattacaatcctgcattgtttcaagactgacattttttcctaaggaaggaaataatcatctaagaccacgaaaaaaggctgttttttgtttttttttttttttttttttgagacggggtctggctgtgttgccctgactggagttcagtggtgcaaacacagctctctccacaacctcttgggcccaagtgatactcccacctctgccttacaaaatacagggattactggtgtgagccactgtgtctggccagaaaaggcatttttgagaaagcaaatcgtataccttattaacaaaatagaatatatatatatattgcttatctgaaatgcttgaaaccagaattgttttgcattttttgaatatttgtatacacataatgagaccttggggatgggacccaagtctgaacgtggaattcacctgtgtttcgtgtatatgcctcatacacataattttgtgcatgaaacagagtttttgtataagaagatacactgcagctgaagagggctgggtttttttttctcttagggtcgctgcataaactgttgtatgcctggtgctttgcgacttgtcacacgaggtcacgtgtggaattttccacttctggcatcacgtcagtgctcagaaattttctgatctcagagcatttcaattagggatgctcaaacgcaactgtttctacttccccatttcaggtgtgagatgtaacccaccttgaccataaattggcttttcatagtgctcagatgtttcataattcttcccccaaaataatgaagtttgcagtttaacaactttttttttgagagggggggtctggctctgtagcgcaggctggagtgcagcggtgccatcttgactcattgcagcctccgcctgccaggagaatcgcttggacccaggaggtggaggttgcagtgagctgagatcacgccattgcactccagcctgggcaacaagagcaaaactccatctcaaa

SEQ ID NO: 48062 - DNA, 3455 bp, Homo sapiens
cccttcccattctcctctgcgcggcctccatctaagatctcttccccttgtccatagcctagatcgagctccctgtgtgcaccgcgcgctgcccgaggcgcaggtcaaccagaatcaagatgtctgggactgaggaagcaattcttggaggacgtgacagccatcctgctgctggcggcggctcagtgttatgctttggacagtgccagtacacagcagaagagtaccaggccatccagaaggccctgaggcagaggctgggcccagaatacataagtagccgcatggctggcggaggccagaaggtgtgctacattgagggtcatcgggtaattaatctggccaatgagatgtttggttacaatggctgggcacactccatcacgcagcagaatgtggattttgttgacctcaacaatggcaagttctacgtgggagtctgtgcatttgtgagggtccagctgaaggtgaggggatggagtagacctgctgcccggaaggatcagtgggtggtaggagaaggatggttcatatcatgaagatgttggttatggtgttagtgagggcctcaagtccaaggctttatctttggagaaggcaaggaaggaggcggtgacagacgggctgaagcgagccctcaggtgagcgcggggctgggagtctaacctgcgtcatttcagctcttgcttcagagcagatttcgattttttttggaagaggtaacacatccacatggttcaaaaatccaagcagcgtggaaggtaattctcacccctgccctggttcctgtctgccgttttcccactttcgttagtattttttcaatgtttctgtttcaggcttcccttgctgggagtaagtggtagaatcctgtactctctcttctccgtgcactcagtcatgtgtgccggaggccttcccactcctactgcgagtgcacagacagcaccctcctctccgtgctcctcagcagtcctccgctacgcacaggagttttgggaatgcacttggaaactgtattctggacaaagactacctgagatcactaaataagcttccacgccagttgcctcttgaagtggatttaactaaagcgaagagacaagatcttgaaccgtctgtggaggaggcaagatacaacagctgccgaccgaacatggccctgggacacccacagctgcagcaggtgacctccccttccagacccagccatgctgtgataccggcggaccaggactgcagctcccgaagcctgagctcatccgccgtggagagcgaggccacgcaccagcggaagctccggcagaagcagctgcagcagcagttccgggagcggatggagaagcagcaggttcgagtctccacgccgtcagctgagaagagtgaggcagcgcctccggcccctcctgtgacgcacagcactcctgtaactgtctcagaaccactcctggagaaagacttccttgcaggagtgactcaagaattaatcagtaaataccttgaaatgcttagactcttgaagacaactctgaaaagtgggctgtgactcccgatgcaggggatggtgtggtcaagccctcgtctagagcagacccagcccagacctctgacacattagccttgaacaaccagatggtgacccagaacaggactccacacagcgtttgccaccagaaaccacaagcaaaatctggatcttgggacctccaaacttatagcgctgaccaacgcacaacaggaaactgggaatctcataggaagagccaggacatgaagaaaaggaaatatgatccatcttaactgaggctcaggccacataattggactctgtcacaaagggactttggaaaactactttttggtcatgaaattgttcatcgctgctggagaatgaacgtcattgcgatttatcttgcttcattctgaaccttatcaagaggatctgactgagagcccactgcagttagagctgagcacttttgaaaagcttgtccatcactctagtagggagaggctctggacagatgaataccttttcttcggcttgtgaggcttcccactatttattactgaactattatgttaatgaagatggacattttaggaatcaccaatggctccttgccctcaagcaatataggccagacttggtcctaagcacctgcctcagcaattgtctacattcagttgttttgcataacgtctgccttctttcctttacggtccatgcctttaatgttgcccacattaagcactgtggatcacgacaggaaaaaggttggagcagtgcttttcactactttgtatcaatccaggctacaatcttcatttaatataaataatttatggatttatgacattacaatcctgcattgtttcaagactgacattttttcctaaggaaggaaataatcatctaagaccacgaaaaaaggctgttttttgtttttttttttttttttttttgagacggggtctggctgtgttgccctgactggagttcagtggtgcaaacacagctctctccacaacctcttgggcccaagtgatactcccacctctgccttacaaaatacagggattactggtgtgagccactgtgtctggccagaaaaggcatttttgagaaagcaaatcgtataccttattaacaaaatagaatatatatatatattgcttatctgaaatgcttgaaaccagaattgttttgcattttttgaatatttgtatacacataatgagaccttggggatgggacccaagtctgaacgtggaattcacctgtgtttcgtgtatatgcctcatacacataattttgtgcatgaaacagagtttttgtataagaagatacactgcagctgaagagggctgggtttttttttctcttagggtcgctgcataaactgttgtatgcctggtgctttgcgacttgtcacacgaggtcacgtgtggaattttccacttctggcatcacgtcagtgctcagaaattttctgatctcagagcatttcaattagggatgctcaaacgcaactgtttctacttccccatttcaggtgtgagatgtaacccaccttgaccataaattggcttttcatagtgctcagatgtttcataattcttcccccaaaataatgaagtttgcagtttaacaactttttttttgagagggggggtctggctctgtagcgcaggctggagtgcagcggtgccatcttgactcattgcagcctccgcctgccaggattcaagcaattctcctgcctcaggctcccgagtagctgggattacagacacccaccacgacgcccgactaatttttgtatttttagtagaggagacggggtttctccatgttggccaggctggtctcaaactgacctcaagtgatctgcccacctcggcctcccaaagtaaaaagtactagaattataggcatgagccattgcgcccag

SEQ ID NO: 48063 - DNA, 3532 bp, Homo sapiens
cccttcccattctcctctgcgcggcctccatctaagatctcttccccttgtccatagcctagatcgagctccctgtgtgcaccgcgcgctgcccgaggcgcgtaagtgggggaggagagcggcttcccccggggtggttctagccgtgggtgtggagcgtgggaaggctcagcttccgggtcgagaacctggggctgcggtggacctgatcctgaggtctcagcgtagagatgctgagtccagaggcctgttctagttcaccagtgcagtgaggggctcagtatccgggcctcccgagagtgccagtacacagcagaagagtaccaggccatccagaaggccctgaggcagaggctgggcccagaatacataagtagccgcatggctggcggaggccagaaggtgtgctacattgagggtcatcgggtaattaatctggccaatgagatgtttggttacaatggctgggcacactccatcacgcagcagaatgtggattttgttgacctcaacaatggcaagttctacgtgggagtctgtgcatttgtgagggtccagctgaaggtgaggggatggagtagacctgctgcccggaaggatcagtgggtggtaggagaaggatggttcatatcatgaagatgttggttatggtgttagtgagggcctcaagtccaaggctttatctttggagaaggcaaggaaggaggcggtgacagacgggctgaagcgagccctcaggtgagcgcggggctgggagtctaacctgcgtcatttcagctcttgcttcagagcagatttcgattttttttggaagaggtaacacatccacatggttcaaaaatccaagcagcgtggaaggtaattctcacccctgccctggttcctgtctgccgttttcccactttcgttagtattttttcaatgtttctgtttcaggcttcccttgctgggagtaagtggtagaatcctgtactctctcttctccgtgcactcagtcatgtgtgccggaggccttcccactcctactgcgagtgcacagacagcaccctcctctccgtgctcctcagcagtcctccgctacgcacaggagttttgggaatgcacttggaaactgtattctggacaaagactacctgagatcactaaataagcttccacgccagttgcctcttgaagtggatttaactaaagcgaagagacaagatcttgaaccgtctgtggaggaggcaagatacaacagctgccgaccgaacatggccctgggacacccacagctgcagcaggtgacctccccttccagacccagccatgctgtgataccggcggaccaggactgcagctcccgaagcctgagctcatccgccgtggagagcgaggccacgcaccagcggaagctccggcagaagcagctgcagcagcagttccgggagcggatggagaagcagcaggttcgagtctccacgccgtcagctgagaagagtgaggcagcgcctccggcccctcctgtgacgcacagcactcctgtaactgtctcagaaccactcctggagaaagacttccttgcaggagtgactcaagaattaatcaagactcttgaagacaactctgaaaagtgggctgtgactcccgatgcaggggatggtgtggtcaagccctcgtctagagcagacccagcccagacctctgacacattagccttgaacaaccagatggtgacccagaacaggactccacacagcgtttgccaccagaaaccacaagcaaaatctggatcttgggacctccaaacttatagcgctgaccaacgcacaacaggaaactgggaatctcataggaagagccaggacatgaagaaaaggaaatatgatccatcttaactgaggctcaggccacataattggactctgtcacaaagggactttggaaaactactttttggtcatgaaattgttcatcgctgctggagaatgaacgtcattgcgatttatcttgcttcattctgaaccttatcaagaggatctgactgagagcccactgcagttagagctgagcacttttgaaaagcttgtccatcactctagtagggagaggctctggacagatgaataccttttcttcggcttgtgaggcttcccactatttattactgaactattatgttaatgaagatggacattttaggaatcaccaatggctccttgccctcaagcaatataggccagacttggtcctaagcacctgcctcagcaattgtctacattcagttgttttgcataacgtctgccttctttcctttacggtccatgcctttaatgttgcccacattaagcactgtggatcacgacaggaaaaaggttggagcagtgcttttcactactttgtatcaatccaggctacaatcttcatttaatataaataatttatggatttatgacattacaatcctgcattgtttcaagactgacattttttcctaaggaaggaaataatcatctaagaccacgaaaaaaggctgttttttgtttttttttttttttttttttgagacggggtctggctgtgttgccctgactggagttcagtggtgcaaacacagctctctccacaacctcttgggcccaagtgatactcccacctctgccttacaaaatacagggattactggtgtgagccactgtgtctggccagaaaaggcatttttgagaaagcaaatcgtataccttattaacaaaatagaatatatatatatattgcttatctgaaatgcttgaaaccagaattgttttgcattttttgaatatttgtatacacataatgagaccttggggatgggacccaagtctgaacgtggaattcacctgtgtttcgtgtatatgcctcatacacataattttgtgcatgaaacagagtttttgtataagaagatacactgcagctgaagagggctgggtttttttttctcttagggtcgctgcataaactgttgtatgcctggtgctttgcgacttgtcacacgaggtcacgtgtggaattttccacttctggcatcacgtcagtgctcagaaattttctgatctcagagcatttcaattagggatgctcaaacgcaactgtttctacttccccatttcaggtgtgagatgtaacccaccttgaccataaattggcttttcatagtgctcagatgtttcataattcttcccccaaaataatgaagtttgcagtttaacaactttttttttgagagggggggtctggctctgtagcgcaggctggagtgcagcggtgccatcttgactcattgcagcctccgcctgccaggattcaagcaattctcctgcctcaggctcccgagtagctgggattacagacacccaccacgacgcccgactaatttttgtatttttagtagaggagacggggtttctccatgttggccaggctggtctcaaactgacctcaagtgatctgcccacctcggcctcccaaagtaaaaagtactagaattataggcatgagccattgcgcccag

SEQ ID NO: 48064 - DNA, 2096 bp, Homo sapiens
cattgttaaataatgtaaggaaaacatttaaattccaaaaactttcagaaggtactgaagacatggaatttctgagggccagtttttccagtgctttctgtgagaatacttcattatttgctgatgacgcacttttccttgacctctgtagagactcttgaagacaactctgaaaagtgggctgtgactcccgatgcaggggatggtgtggtcaagccctcgtctagagcagacccagcccagacctctgacacattagccttgaacaaccagatggtgacccagaacaggactccacacagcgtttgccaccagaaaccacaagcaaaatctggatcttgggacctccaaacttatagcgctgaccaacgcacaacaggaaactgggaatctcataggaagagccaggacatgaagaaaaggaaatatgatccatcttaactgaggctcaggccacataattggactctgtcacaaagggactttggaaaactactttttggtcatgaaattgttcatcgctgctggagaatgaacgtcattgcgatttatcttgcttcattctgaaccttatcaagaggatctgactgagagcccactgcagttagagctgagcacttttgaaaagcttgtccatcactctagtagggagaggctctggacagatgaataccttttcttcggcttgtgaggcttcccactatttattactgaactattatgttaatgaagatggacattttaggaatcaccaatggctccttgccctcaagcaatataggccagacttggtcctaagcacctgcctcagcaattgtctacattcagttgttttgcataacgtctgccttctttcctttacggtccatgcctttaatgttgcccacattaagcactgtggatcacgacaggaaaaaggttggagcagtgcttttcactactttgtatcaatccaggctacaatcttcatttaatataaataatttatggatttatgacattacaatcctgcattgtttcaagactgacattttttcctaaggaaggaaataatcatctaagaccacgaaaaaaggctgttttttgtttttttttttttttttttttgagacggggtctggctgtgttgccctgactggagttcagtggtgcaaacacagctctctccacaacctcttgggcccaagtgatactcccacctctgccttacaaaatacagggattactggtgtgagccactgtgtctggccagaaaaggcatttttgagaaagcaaatcgtataccttattaacaaaatagaatatatatatatattgcttatctgaaatgcttgaaaccagaattgttttgcattttttgaatatttgtatacacataatgagaccttggggatgggacccaagtctgaacgtggaattcacctgtgtttcgtgtatatgcctcatacacataattttgtgcatgaaacagagtttttgtataagaagatacactgcagctgaagagggctgggtttttttttctcttagggtcgctgcataaactgttgtatgcctggtgctttgcgacttgtcacacgaggtcacgtgtggaattttccacttctggcatcacgtcagtgctcagaaattttctgatctcagagcatttcaattagggatgctcaaacgcaactgtttctacttccccatttcaggtgtgagatgtaacccaccttgaccataaattggcttttcatagtgctcagatgtttcataattcttcccccaaaataatgaagtttgcagtttaacaactttttttttgagagggggggtctggctctgtagcgcaggctggagtgcagcggtgccatcttgactcattgcagcctccgcctgccaggattcaagcaattctcctgcctcaggctcccgagtagctgggattacagacacccaccacgacgcccgactaatttttgtatttttagtagaggagacggggtttctccatgttggccaggctggtctcaaactgacctcaagtgatctgcccacctcggcctcccaaagtaaaaagtactagaattataggcatgagccattgcgcccag

SEQ ID NO: 48065 - DNA, 419 bp, Homo sapiens
tccatcttttttcttttggtaaatgaaactcactgagaaatttgacttctgataatgggaaacagtgctgcttatgtgttctccttgtacaaaggtgtctgggaccattatacttagaggtgatctgagaaatcggaggggctctgattgttttgaaaactctcctttgaggtcgggcacagtggctcatgcctgtaatcccagcactttgggaggccgaggcgggtggatcacttgagaccagcttggccaacatgatgaaacctgtctctactaaaaatacaaaaattagccgggcttggtagcatgcatttgtaatcccagctacttggggggctgaggaaagagaattgcttgaacctggaaggtggaggttgcggtgagccaagatcacaccattgcactccagcctgggtgac

SEQ ID NO: 48066 - DNA, 713 bp, Homo sapiens
aatgcacttgagaaagcggtagttttgtggggaggcggaaaaagcaactgctttcctgatctgcaacttggctggatgctaagatgtccagtggacatgaatagccaggggtctgacagcaatgaagaggactatgacccaaattgtgaggaagaggaagaagaagaagaagacgaccctggggacatagaggactattacgtgggagtagccagcgatgtggagcagcagggggctgatgcctttgatcccgaggagtaccagttcacttgcttgacctacaaggaatctgagggtgccctcaatgagcacatgaccagcttagcttctgtcctaaaggtatctcattcagttgctaaacttatattagttaatttccactggcaagtttcagagatattggacagatacaagtccaattctgctcaactgcttgttgaggctcgagttcagcctaatccatcaaaacatgttcccacatcccatccccctcaccactgtgcagtgtgtatgcagtttgtgcgaaaggaaaacctactctctctggcctgtcagcaccagttttgccgcagctgctgggagcagcactgctcagttctcgtcaaggacggtcgtgggcgtgggagtctcttgcatggctcaggactgtccactccgtacaccagaggactttgtgtttccattgcttcccaatgaagaattgagggagaaat

SEQ ID NO: 48067 - DNA, 406 bp, Homo sapiens
agaaagggtctcactttgttgctcaggcatgtctcaaactcctggcctcaagtgatcctcctgccttggcctcccaaagtgagccaccaagcccagcctgaattttacttcagaaacaaacaaacaaaaattgatctcagctttgaagagacagcagcagacctggcttattattcctagttcaatatcttaagtgtgtcttgggaagccaaggccctgaaatgattttgaattatcaatagctagtcattttcaaaggctcgtgcttcggttctgacagctttggtttaagctgagagctaattgtgtggggcgtgtaattctgctgagctcatccatttcatccatctccagtgagatgatgctggtgcggcctggggtgggtgggcaggccaaaagctaggat

SEQ ID NO: 48068 - DNA, 525 bp, Homo sapiens
acagggtatgtccacagcttcctctgatagaggagtgaccaggaagcagtttgttttctcattctcatctcttggcagctttcgtcctcttccaagggctcaagccaaggagataatctgttcctgtgcattaagcagttcagccttaactagtttaattgattagctcaaccagtcagtgagtagagatctagccccactgggttgagacacagggcaggtaagttttaacagtgagccaaggaaagaactggaacagtcataaaggaaagggaaggttaaaaaaaggaagcaggtaaggtaaggtggtggctgacacactgccctagccaaagagagtaccatcccggcaccccccgattgctgccatgtgggaagatggactcattctttttagatcttttaagagaagctagaaatctggatttgtatgtgacagttgattcatatataaaacaatagcaacaggctagattttgcaatgcattctagagcacagaatctcagttaacagataagtattag

SEQ ID NO: 48069 - DNA, 719 bp, Homo sapiens
gccttctttgagaccagacacaaagtgtcacaccctctttgcatgcacaatctcccgtaggaggaagggaaccaatcctcagggaacacccaggtgcagagccttactctaaggcacttggcatgtgagctctcttaggacaggggaacttgtttctcctcaaagccactctgagaagtcacttcaccctcttttcagaggaggaaactgagttcagagatttaagcaaattgaccagagtaacagtgactaaatggcagagtaagatttggtccacctaactccaaaagcccatgggggcttatttatgatgcccacactgcctcctgtccagaccataactccttaagagcagggcctgattctctgtccatctgcaaggccaacaagtgctttgctgtagatagaagcatcccccctttgcctctcctaacataggacaggccccacaaggagtagaataaacatttgtttattgcaatcaagacatgctgtggcaccatggtatgaaggtgagcaggagaaatgaagctctgagctcccaacaactcctaggagccaccagggctttagtgagtcccaatgccactggtgcccaattcctttgcccctgactgaaggctgtgaagcctagaactgcaaaaagcaagtattaaaccaaagaaggtgacacagttgaaagcattaagaatgttattaaactgcactgtaatattcaa

SEQ ID NO: 48070 - DNA, 626 bp, Homo sapiens
agggagacggttgagagcacacaagccgctttaggagcgaggttcggagccatcgctgctgcctgctgatccgcgcctagagtttgaccagccactctccagctcggctttcgcggcgccgagatgctgtcctgccgcctccagtgcgcgctggctgcgctgtccatcgtcctggccctgggctgtgtcaccggcgctccctcggaccccagactccgtcagtttctgcagaagtccctggctgctgccgcggggaagcaggaactggccaagtacttcttggcagagctgctgtctgaacccaaccagacggagaatgatgccctggaacctgaagatctgtcccaggctgctgagcaggatgaaatgaggcttgagctgcagagatctgctaactcaaacccggctatggcaccccgagaacgcaaagctggctgcaagaatttcttctggaagactttcacatcctgttagctttcttaactagtattgtccatatcagacctctgatccctcgcccccacaccccatctctcttccctaatcctccaagtcttcagcgagacccttgcattagaaactgaaaactgtaaatacaaaataaaattatggtgaaattatgaaaa

SEQ ID NO: 48071 - DNA, 702 bp, Homo sapiens
agggagacggttgagagcacacaagccgctttaggagcgaggttcggagccatcgctgctgcctgctgatccgcgcctagagtttgaccagccactctccagctcggctttcgcggcgccgagatgctgtcctgccgcctccagtgcgcgctggctgcgctgtccatcgtcctggccctgggctgtgtcaccggcgctccctcggaccccagactccgtcagtttctgcagaagtccctggctgctgccgcggggaagcaggaactggccaagtacttcttggcagagctgctgtctgaacccaaccagacggagaatgatgccctggaacctgaagatctgtcccaggctgctgagcaggatgaaatgaggcttgagctgcagagatctgctaactcaaacccggctatggcaccccgagaacgcaaagctggctgcaagaatttcttctggaagactttcacatcctgttagctttcttaactagtattgtccatatcagacctctgatccctcgcccccacaccccatctctcttccctaatcctccaagtcttcagcgagacccttgcattagaaactgaaaactgtaaatacaaaataaaattatggtgaaattatgaaaacaaaaaatcataaataaataaatctaaaataaaaaaaaaaacacaacaacaacacaccaacacccctaccaccaca

SEQ ID NO: 48072 - DNA, 433 bp, Homo sapiens
ttcaaattttttccattgtcctccccacttctctttctctctttttctatcccttctgccctatacaggaactggccaagtacttcttggcagagctgctgtctgaacccaaccagacggagaatgatgccctggaacctgaagatctgtcccaggctgctgagcaggatgaaatgaggcttgagctgcagagatctgctaactcaaacccggctatggcaccccgagaacgcaaagctggctgcaagaatttcttctggaagactttcacatcctgttagctttcttaactagtattgtccatatcagacctctgatccctcgcccccacaccccatctctcttccctaatcctccaagtcttcagcgagacccttgcattagaaactgaaaactgtaaatacaaaataaaattatggtgaaattatgaaaa

SEQ ID NO: 48073 - DNA, 414 bp, Homo sapiens
tcaccactcgcctccccccgatctgccatcatacacccgacccccttcggaactggccaagtacttcttggcagagctgctgtctgaacccaaccagacggagaatgatgccctggaacctgaagatctgtcccaggctgctgagcaggatgaaatgaggcttgagctgcagagatctgctaactcaaacccggctatggcaccccgagaacgcaaagctggctgcaagaatttcttctggaagactttcacatcctgttagctttcttaactagtattgtccatatcagacctctgatccctcgcccccacaccccatctctcttccctaatcctccaagtcttcagcgagacccttgcattagaaactgaaaactgtaaatacaaaataaaattatggtgaaattatgaaaa

SEQ ID NO: 48074 - DNA, 845 bp, Homo sapiens
agggagacggttgagagcacacaagccgctttaggagcgaggttcggagccatcgctgctgcctgctgatccgcgcctagagtttgaccagccactctccagctcggctttcgcggcgccgagatgctgtcctgccgcctccagtgcgcgctggctgcgctgtccatcgtcctggccctgggctgtgtcaccggcgctccctcggaccccagactccgtcagtttctgcagaagtccctggctgctgccgcggggaagcaggtaaggagactccctcgacgtctcccggattctccagccctccctaagccttgctcctgccccattggtttggacgtaagggatgctcagtccttctaaagagttttggtgcttttctgggtccctcagctcccgaagctcttgagaaaactatcaaaggctagaatccccttctaactctttttttcccccatgataagcgcagtcggtcacagttcaggtgagttcttacttggcattcaagaaaattacaaaatctgggtagttgtctgggcacgaagcgacaatggcgtctatccctggtgctgaccctgggaagcgctgacccaggtgctgaaacgcagacctctgaagctgctacctcttagcgtacctcacttccaaacgtcgggactagggcaaaggggcaatctaaagaccgaacgccgtatgtttgagattgtgagaagtctcgttcccctacagtttacttggtaaaaatggtaaaacaattctactttgtagctcgtgatgtgaaaattgaattaaactgttggcacacactttatcttaccagaacggtctttatgtgtgtgtgtgtgtgt

SEQ ID NO: 48075 - DNA, 372 bp, Homo sapiens
ggccacggagatcttccaggttcccagggctgctgagcaaggatgaaatgaaggcttgagctgcagagatctgctaacttcaaacccggctatggcaccccgagaacgcaaagctgggcttgagctgcagagatctgctaactcaaacccggctatggcaccccgagaacgcaaagctggctgcaagaatttcttctggaagactttcacatcctgttagctttcttaactagtattgtccatatcagacctctgatccctcgcccccacaccccatctctcttccctaatcctccaagtcttcagcgagacccttgcattagaaactgaaaactgtaaatacaaaataaaattatggtgaaattatgaaaa

SEQ ID NO: 48076 - DNA, 257 bp, Homo sapiens
atcagtagaaacccaagggacatcattatctgtggcacaggaccaccttcccagaagcagcctcaggtattcaagacttacttaaccacagagccactaacaagttttgcaagaggataggtttattacatacgcttcaattcaagcaattcttttactgatgacaagcagagtaaaataatttttgaatttatggtaatagtcaatgtaggtttccttcgaacagcaactttcagtggcccctttaaagttagctc

SEQ ID NO: 48077 - DNA, 620 bp, Homo sapiens
gcagaggttgcagtgagccaaaatcgtgccactgcattccagcctgggcgagagtgagactctgcctcaaaaaaaaaaaaaaaaaaaaatgcagaagtagaatcatggggtcaaagtacccttgctttaacttctggttcagataattttaacaacttacattgtcaccagcaaggtctttgactatatgagcaagtctcacgttaaagcatttctcatttgacattagctgcccagctttccgctgatacgttgactccaggaggctccttgagttctgagtgtttggctggcctctggtggccccattattattttctgccaggtgaaggtcagtcacctgcacacagatctcatcactcatgatatgctgcagctggaatcaaaggcaagctgttagtgaacacaaaacatttctccattacacagtcaacgttcctttgactcaactcaaaaaaggttttgttttttttttggctggcaattttagaaaattcatcacacaaaccactgtatcattttctcggacaataatcaatccaagattttcaaccatatctgtggtccattgtaaaactttcatctctatttaaaataaaaatcatagagaactcaggtta

SEQ ID NO: 48078 - DNA, 504 bp, Homo sapiens
gcagaggttgcagtgagccaaaatcgtgccactgcattccagcctgggcgagagtgagactctgcctcaaaaaaaaaaaaaaaaaaaaatgcagaagtagaatcatggggtcaaagtacccttgctttaacttctggttcagataattttaacaacttacattgtcaccagcaaggtctttgactatatgagcaagtctcacgttaaagcatttctcatttgacattagctgcccagctttccgctgatacgttgactccaggaggctccttgagttctgagtgtttggctggcctctggtggccccattattattttctgccaggtgaaggtcagtcacctgcacacagatctcatcactcatgatatgctgcagctggaatcaaaggcaagctgttagtgaaccgagattgtgccattgcactacagcctggtcaacagagcaagactctgtctcaaaacaaacaaaaattgtcaatgaccaaacattctaaaagaaatgcc

SEQ ID NO: 48079 - DNA, 596 bp, Homo sapiens
gggaactgaaatcaacaaatgctaaaatgaaactatagaatgacttctacaaaagaagacaaatatatagtttgtcaaaattacttatattaataatgtataacagggcttagagactctgttgtacaattcattttggatgtttgagattaaaaatatccttttagaatttggagaaaatgaaattgttgcatttgagaggagagggagctgcagaacagagcacagtggagagagcatattaaggattctgtatattttatttcacaagtcctttgtaaagtgaatttctcacattaggattaaaacactaatttttctaggaaccaaataagtaccaaactccgaatttacttgcagaacagattacaatttatacctgcttttattcaaaagatggccattttctaatgaagagaatgaattgaggagcaaatttaaaaaattacagcaccgaatttgccatgttttagtcgaatttttatttgattatagttctaagagctgtcaaattacctaaaggaagcaatgagtttctcaataggaaaaaaaaaggaaaaagaaagggaaatgatccaaaaatgctgcaactaaat

SEQ ID NO: 48080 - DNA, 797 bp, Homo sapiens
aactctgggctcaagcaaccctcctgcctcagcctcccaagtagctaagactacaggtacatgccaccatgcctggctaatatttaaatttttgtagataaggggtcttgctatgttgcccaggctagtctcaaactcctggcttcaagtgttcctactgtcatgacctgccaacatgctggggttacaggcatgagccaccatgccccaaacaggtttgaacacaaatctttcggatgaaaattagagaacctaattttagctttttgatagttacctagtttgcaaaagatttgggtgacttgtgagctgtttttaaatgctgattgttgaacatcacaacccaaaatacttagcatgattttatagagttttgatagctttattaaaaagagtgaaaataaaatgcatatgtaaataaagcagttctaaatagctatttcagagaaatgttaatagaagtgctgaaagaagggccaactaaattaggatggccagggaattggcctgggtttaggacctatgtatgaaggccaccaattttttaaaaatatctgtggtttattatgttattatcttcttgaggaaaacaatcaagaattgcttcatgaaaataaataaatagccatgaatatcataaagctgtttacataggattctttacaaatttcatagatctatgaatgctcaaaatgtttgagtttgccataaattatattgtagttatattgtagttatacttgagactgacacattgtaatataatctaagaataaaagttatacaaaataaaatta

SEQ ID NO: 48081 - DNA, 509 bp, Homo sapiens
gatgccgcggcgttactagaggatccccatgatgctgattgttgaacatcacaacccaaaatacttagcatgattttatagagttttgatagctttattaaaaagagtgaaaataaaatgcatatgtaaataaagcagttctaaatagctatttcagagaaatgttaatagaagtgctgaaagaagggccaactaaattaggatggccagggaattggcctgggtttaggacctatgtatgaaggccaccaattttttaaaaatatctgtggtttattatgttattatcttcttgaggaaaacaatcaagaattgcttcatgaaaataaataaatagccatgaatatcataaagctgtttacataggattctttacaaatttcatagatctatgaatgctcaaaatgtttgagtttgccataaattatattgtagttatattgtagttatacttgagactgacacattgtaatataatctaagaataaaagttatacaaaataaaatta

SEQ ID NO: 48082 - DNA, 400 bp, Homo sapiens
ggtcaggtcctaacccctggaacagtaagtgttacctaacctggcaatgtattcgcaaatgtgattaagttaacgatcttgggctggaaagattctcttggaaggtcctaaatgtaatcacatagatccttctgagagaggcagagggaaatttgaccgagacatggcaaagaaagtgatgtaaagatagaccagatgtgaaggggctggccttggagactgtggtgatgcagccacaagtcaaggaatgctgcaggcagcaggagctggaaaaggcaagggtcagattgtcccctacagcctctggagataatatattccagaggcactgatttcagacttctagtctccaggactgtggggaaatgaatttttgttgttttaagccaccaattttgtg

SEQ ID NO: 48083 - DNA, 490 bp, Homo sapiens
aacttccagtttttttagcttcgtaaatatagtatacatttcatgcaaatttttgcttgcctgtggatatattaaatttttcctctttggtaaacatgtaaacttgtttctagagcactgattttcaaacctagtaattgtcatttgactgacctcccccatgaattagtgtatgaattgatactgcatttaattttaaagaggaattagtaagaagcctcagatgaatcatagatttattattactatcttaaaacataattattagttcatattagttcataatgtcactgaaggaaaaaatctgttgcctttccatacagtttgactagaattaactctagtactctagcagtacttccaggtgtttagagagcaatgttgctgttagattgcatcatacttagcttatataagaagtcaacttagagtaagaataattcttctgaaaatgtctttgactgagacttgacagttttcatttactgat

SEQ ID NO: 48084 - DNA, 412 bp, Homo sapiens
gggtgacagagcgagactctgtctcaaacaaaaacaaaaacaaaaccaaaacaaatcaatgaagagttaaggttctttgaaaaagggaccaggagtgccttcctttggtcttgctgcagggatacttgccctgctgccttcaaggagtccagtccctgtggttctgagctggtaagtaggaaagagaactaggaaacagctgtaaccacaatttgtcgattcccttaccatatgctgaacattgcttggcgtgctttgtgatcccacctgcaacccactcaagtgatcattgtatctccacttagagctaggaaaatgagggcccacaggggttaatagtttgcccaaggctgtatgcgagtccatggcagagctggggtggtctgaccattgccttatctggcctgggggc

SEQ ID NO: 48085 - DNA, 451 bp, Homo sapiens
tgagatgactttagccccaaattgacagagtaagatcaggtaccccctactcaggccacgcagtgggagctgtcccacaggtgaggccctctcacactgaggcccacagttgctccccaggcttggcaaagcaatggaaccccctgctttcagaatcaggcacagctacagctgcggacggcggagtgccagctgggctctcttgctctttcctggcctcctcccctcaccctcattgttgcctctctgagcttcctgttgagttcaggttctaaggggactggtgctgacttgtgaggatagaatgtagaagagttggccaggtgtggtggctcatgtctgtaatcccagcactttgggagccaaggcaggcggattacctaaggtcaggagttcaagaccagcctggccaacatggtgaaaccctgtctctactaaaaatacaaaaaaa

SEQ ID NO: 48086 - DNA, 463 bp, Homo sapiens
atggggtccctaaccataggcgcccaaaaatgagctgggaacacaagctggccttgctgaacagcactttctatccaagagactgcagaaattgcaggtggaccagctgctgcgggtgaggcacaggaaacagctgtgcttctgaactactgttgtcaggggctgtgcagtgtcccctccaggtgcctgaagtttgtctcctgtgccacacaacagagatacagtcaggggaccatactgccaggtacacagcctccccactcctgacttgcaggcgagcacctaaggacactgactgtctcctttcgcctctgcaggctctggctgccgagtgcacataaatactgtaaaaggagaagctggttcagggaggggaatggtaagaagggttcttttagcaaaatgcaatgttattgatctgtgactgcatttaagacctgaaagctgttgttttaaaaaaaaa

SEQ ID NO: 48087 - DNA, 1802 bp, Homo sapiens
gaatcccacttctcaggccccttccactaggacacactatgagcttaacactgctaagaactcactgaggaatggtgacatttgggggcggctccttcagtgctttgtttggcttcttttttaaattataaatggtggtttgaaagttgttggaggggaaaatcagatgaaatcagggatgtggctgaagcagtcagtgtagcagcgtagcagagaagcagagaagctgtcagcagcctacccaggccccgaaatgggcacagccctgcatttctggcctgaggcttgccgaggtcttaggtgaacttcagctctttctacagcaccccagtctcagcactctttggtggatgtcctgattggctgggagattgttgcttcctgatacagtggtgattacttctgaaagatggggtaataccaacagctatcgtttctgaccatttactgtgcagcatcactgtgcaaagtatttttatacatatcctattgactcctctcaaaactcctgtgaggcaagcaggcaccccagtggcctcatcctagttctggccctggtgacattatgattgcctccattctccatttgataggtacagaaactgaggttcagagaagtgaagtaaattcccccagatcacgcagctagcaaacagctgagcttctatgctcatcctaaggctcggttgaaatggattttttaaaagatgtattttgggctctttactatatagaaaaccgaatctgtttatcactaaggttactaataggccttacatctgtgaaaacttatctgtcagctggccctgaaatgttctgaaatgagtctgagcacaggatgcctgtgacaaccgaatagtttaaaaaaattctccatgggagccgaaaccctattaagacaggtctttatttttgttcctgaatgccacatttagaaacaaaatgtcatatttttgtatatgaatgtcacaagtgacaaagcatatgttgcaacttggcttctaatggttgaaaaaaaaagagaggtaaattatcataatgttgggatcttctcaattatatttgcattttcatttctatcagaagtccattttagcaaaggaatgtaaccttagtcacttgaaactgctgttcccttagaaaacaattgtaaatgtaataagcaaaaaggatagaaaatgcccacaggggaaaaaaatgatccatctggggtcagagccatcgtgtagattgattcattcttcttctagcattcttattcaggaaggaaaacttgaacattttctagattttaggatatttaagatttgcaaggaattgggggaaagggaaaaggaatgaaatttcagtcccactggcagggatcaaatagagattttctcaacttttaaaagaaccgttttacatgtcccaatcacctcatagttcctgagtctctcttctgcataaggcatgtactagttgttaagggaggatacaataaggtcatgattgctttaaaattattcataataaaaacacattttgagacttgattctaaatgttaaacttaaatttgagcaatttaattgcccgttgaataggaatgaaatcccaccggtaggcagttatttcttacaaccactgtgtgtgaaattgaaatcttaagataccatttcaaatattcaccttctctaaggaagttctccccaaagagttgtgaaagataagaaactgacccaaagtcatatgcagtaatctctttttctttacacactcaggtcaaagtagaagcatattattaaaaagaaacgttatgccc

SEQ ID NO: 48088 - DNA, 295 bp, Homo sapiens
tcctgtaaaggatggccattgcattaatggagaagaagatcccttctcaagccttggagaaaacctaactctttctgcctgtaggtttgagagaagagaattgtcatatctttatatatcctcatgaatttttcttttgtaggtacatcccaagcaaataacaatgacttaaatgtgttcaggaaatggcacatatgtgctatatgtttgttatggactcggttggaataaaatgacattaaagaaaatcaaacattaaaaataccttctttataaagatcataagaatcattta

SEQ ID NO: 48089 - DNA, 376 bp, Homo sapiens
actgttaatgccattctcattttgtggcccacttaaaatgtttacgtttgctttgatgtactctggaagagcagcagaactaattttgctcactgataggtggatgtgtttgtggtggggatagttttgaaatcacttgataatgacaatgaactgctgccagggatgggggtttacagattgactgaattaaagcaagcagttaaccttcatgtgtaacagtggtagtgtgtgggctggtaggatagatgagggtgggtggtatcacaagttgatgagttatgaggaaactcctagacacagagaaagactcagacatgaagcttttagggaaactcaactaatgggtctcttgttttgtatttgtagtaaaatg

SEQ ID NO: 48090 - DNA, 737 bp, Homo sapiens
gcacgagggagcagcaagtgcagagtctctgtggtcagagcacacagggctggggctgaggggtgggcagttaacaggacatgcccaggagattgcaggagctagacttgcagagcctttggcccttgtgcacactagaattgtgctctgagcaagggtctgagcacgggccgggcgtaagctaagccccttcaccaggatcgctctagatgctgtgttaaccatagcagggccaggtggaggcaggggaccagtctggaattggaggctggctcctggccaggatgatcgtggacaggatgcgtagcctccctgttgatggttcttcccaggtttttatattcagtgctcacacatctctgagcacataaataagcacttctctgcaatggattcctggaggtgggaagagtatgcagattataaatgttgctgggaactcaaatttctctccagaaataccctattactacaccaccacacacaagagccactcttctccacctgagcaacgctgagtgtgatcagtcctgttaatttttggcaacctgatgggcaagataacctcgtcctttgcattttcctgatgctaatgaggttgagcctctttctacaagttcacaaatcttttggtgtctctctttgtgggaatggcctaggcagtcttcttgcttagtctctctgttcccaaaaggtattaccattcatctttcattgaatttgctagaactgccatt

SEQ ID NO: 48091 - DNA, 385 bp, Homo sapiens
aaaacctcaagagatagcttggagggggtcagctgactctggccatggactaaatgtaaagtcggtgaattttggcctctgtacatttagtgcactctctggggaggtctgctatgtgtctgacagtgtgcaagaaatgggggatatgtccctaggattcctccacttagcgccactgggccctcccactcctgccatctcaagtgaccatcgaccttacccacggctgctgcacctcaccctgctctggtgcacattccccactgcagcatttgcacgtggacagctgttcccgggtggctgtttccagatcttcaccacaggctgcctctggctgttgtgggcaccagagtgggacagggtgttttagacagggcaccactgc

SEQ ID NO: 48092 - DNA, 272 bp, Homo sapiens
catgaatcttttagtcaacctacattggtttctgtgttctatttcttaccagctgtgttaatttgcacaaattatttattctaagtcatcataaaaggggctaaaaatacctacctcacagaattcttgtgaagattttagattaggcatatatggttcatcacagagcctgatactagtgagcactcagttaacatcaactattaattttgttttctagtacttatttacatacatgtaaatttaataaatactattttatcttatgtatg

SEQ ID NO: 48093 - DNA, 628 bp, Homo sapiens
aaatcatcacaatttgacttatctggcatttccctggaaaaactcacacaaagggtactctttttgtgtgtatgtatgttttgttttgttttgttttgagacaagatctcgttctgtcacccatgctggagtgcagtggtgctataacagctcactacagcctccaacctccaggacttaagcaatccttccacctcagcttcctgagtagctgggactacacacagccatgcaccaccacacccagctaatttttgtatttttctgtagagatggtgggggaagggggatctccctatgttgtccaggctggtcttgaactcctgggctcaagtgatccacctacctgagcctcccaaagtgctgggattataagcatgagccacagtgcctgcccctcatccctacttttttttttgcaacagggtctcactctgtcaacccagactggagtgcagtggtgtcataaggactttcttgaccttacttggaaatcacttgcttaaaacagcctcttcacactccccactgcacccacccaccatcactatgtgtgcttgtcaaaaacaatcagaagcaattgtttaaacactataactgcttaaggtggcaataacagaatggggca

SEQ ID NO: 48094 - DNA, 409 bp, Homo sapiens
gaagtttcatgttggctttggaatggtagcaaaagcctttcttggctgagatgatgcttaaaacacacccccactccctgggcacagagtcacacccactcatccttccgccaacagtccaggtcacacagcagcagtcactgtaacagactgccacatacacactcggtctcacactcacctgtgggttttggttccgttcaatttgggtttttaactttacagggtcagttccgcttcacctccttttgtatggagttccatccggggggtttcaccccctgctccagtcctgaggcctcctgaccctgacgttgtgatacgccccacagagatctatgtttcttatattattattattgataataattattataatattattatgtaataaatttataagaaatga

SEQ ID NO: 48095 - DNA, 3978 bp, Homo sapiens
aggatcccgatgctctctcttgtgtggggactctgggcttgttgacgctctctcctggggaccggccccaccgccggccgcgacctgctgctgccctccccggtgtctgccctgaagccgttggtcagcggcccgagcctggggccctcgggttccaccttcatccacccactcaccggcaaacccctggaccccagctcacccctggcccttgccctggctgcccgagagcgagctctggcctcccaggcgccctcccggtcccccacacccgtgcacagtcccgacgccgaccgccccggacccctgtttgtggatgtacaggcccgggacccagagcgagggtccctggcttccccggctttctccccacggagcccagcctggattcctgtgcctgctcgcagggaggcagagaaggtcccccgggaggagcggaagtcacccgaggacaagaagtccatgatcctcagcgtcctggacacatccctgcagcggccagctggcctcatcgttgtgcacgccaccagcaacgggcaggagcccagcaggctggggggggccgaagaggagcgcccgggcaccccggagttggccccggcccccatgcagtcagcggctgtggcagagcccctgcccagcccccgggcccagccccctggtggcaccccggcagacgccgggccaggccagggcagctcagaggaagagccagagctggtgtttgctgtgaacctgccacctgcccagctgtcgtccagcgatgaggagaccagggaggagctggcccgaattgggttggtgccaccccctgaagagtttgccaacggggtcctgctggccaccccactcgctggcccgggcccctcgcccaccacggtgcccagcccggcctcagggaagcccagcagtgagccaccccctgcccctgagtctgcagccgactctggggtggaggaggctgacacacgcagctccagcgacccccacctggagaccacaagcaccatctccacggtgtccagcatgtccaccttgagctcggagagcggggaactcactgacacccacacctccttcgctgacggacacacttttctactcgagaagccaccagtgcctcccaagcccaagctcaagtccccgctggggaaggggccggtgaccttcagggacccgctgctgaagcagtcctcggacagcgagctcatggcccagcagcaccacgccgcctctgccgggctggcctctgccgccgggcctgcccgccctcgctacctcttccagagaaggtccaagctatggggggaccccgtggagagccgggggctccctgggcctgaagacgacaaaccaactgtgatcagtgagctcagctcccgcctgcagcagctgaacaaggacacgcgttccctgggggaggaaccagttggtggcctgggcagcctgctggaccctgccaagaagtcgcccatcgcagcagctcggctcttcagcagcctcggtgagctgagctccatttcagcgcagcgcagccccgggggcccgggcggcggggcctcgtactcggtgaggcccagtggccgctaccccgtggcgagacgcgccccgagcccggtgaagcccgcgtcgctggagcgggtggaggggctgggggcgggcgcggggggcgcagggcggcccttcggcctcacgccccccaccatcctcaagtcgtccagcctctccatcccgcacgagcccaaggaggtgcgcttcgtggtgcgcagcgtgagcgcgcgcagtcgctccccctcgccgtcgccgctgccctcgcccgcgtccggccccggccccggcgcccccggcccacgccgacccttccagcagaagccgctgcagctctggagcaagttcgacgtgggcgactggctggagagcatccacctaggcgagcaccgcgaccgcttcgaggaccatgagatagaaggcgcgcacctacccgcgcttaccaaggacgacttcgtggagctgggcgtcacgcgcgtgggccaccgcatgaacatcgagcgcgcgctcaggcagctggacggcagctgacgccccacccccactcccgccccggccgtgccctgccggcagggccccccacccccaccccgggccgcgggctcggcctgccccttacgacggcgcccgggccaggaatgttgcatgaatcgtcctgtttgctgttgctcggagactcgccctgtacattgcttagtgccctcaccggccgcccagcccacccagcgcacagtcaggaagggcgtggaccagggaggctggggcgggaggtgccgggggtggggtgccctagcgtgaccacctccttcgcagctcctggtggccattctcccagagggggaacctagtccagcatgcgaggtcaggacccgccttggtgactcggggggaggggggagacattgggattctcgatgggggccaaggagcccccctgttttgcatattttaatccactctatatttggaacgagaaaaggaacaaatatctctgtccgtaatagtttcctctcccctcccttctacttccactggtcccactgcagctgcccagtcttccatctccggcccctcactgccactgccaccccacaacggggcaggggacgctccagctggtctggggttggccagggccctagtggcccgccctggggccccagctcggcccctcgcctcgctgagctctagtgtgccccaccgacccttcaggtgctgctcgtggtgggaggggcggcaggccgcgggtcctgctgtgcacccgcgggaccagccggcctgggagaccatcggccgggggggatgagggcagggccctgccgctccaccgcagccatcttcctcacagggtctctccccaaggagggggctagcttggtccccatgctcttgggcaactacagcagagaagcctccctgccttggaccccaaagtctcctgtcctgccctttatgtgtgtgggtgaaactgggtgcgtctgagcacgtgggagccgtgtgtgtgcctgattactgagtggccaccaggggccgctctggactagcgcggggccgtggaggcgtgcaccgtgtgcatgcgtggggtgtacctgtgagagcaccctgtctcctcttccaaagaaagtcagaggccatcctgcaccctgggtccagctgtttgcccagcctgtccttccagagcctcacccagcctgagcggggttccctggtgaatccctgctgcttggggaggccccaagggccccttggaggcagcgcccccaccttgggcttctgagggcatcatagggggacccctagagtcagttcaccacaggccctggggagagtcaaagacccccgagggtgcccagccccccacactgtgactcctcacactcagcgatgacctgtggggtggggggccctgggacgtttttaaacctagggtttggagtctggactaagctccatccacgtcactcacaagtttctgtttatatttctagctttttttaataaaataaaaaaaaaaagaaaacagaagttttcacaacccaggggcctggcacgccggtctgtgcctgcccgccccgccctggcccaccggccccactccctgggcacagagtcacacccactcatccttccgccaacagtccaggtcacacagcagcagtcactgtaacagactgccacatacacactcggtctcacactcacctgtgggttttggttccgttcaatttgggtttttaactttacagggtcagttccgcttcacctccttttgtatggagttccatccggggggtttcaccccctgctccagtcctgaggcctcctgaccctgacgttgtgatacgccccacagagatctatgtttcttatattattattattgataataattattataatattattatgtaataaatttataagaaatga

SEQ ID NO: 48096 - DNA, 4166 bp, Homo sapiens
gcccggccccgacagcccctacgccaacctgggcgccttcagcgccagcctcttcgctccgtccaagccgcagcgccgcaagagccccctggtgaagcagctgcaggtggaggacgcgcaggagcgcgcggccctggccgtgggcagccccggtcccggcggcggcagcttcgcccgcgagccctccccgacccaccgcggtccgcgcccgggtggcctcgactacggcgcgggcgatggcccggggctcgcgttcggcggcccgggcccggccaaggaccggcggctggaggagcggcgccgctccactgtgttcctgtccgtgggggccatcgagggcagcgcccccggcgcggatctgccatccctacagccctcccgctccatcgacgagcgcctcctggggaccggccccaccgccggccgcgacctgctgctgccctccccggtgtctgccctgaagccgttggtcagcggcccgagcctggggccctcgggttccaccttcatccacccactcaccggcaaacccctggaccccagctcacccctggcccttgccctggctgcccgagagcgagctctggcctcccaggcgccctcccggtcccccacacccgtgcacagtcccgacgccgaccgccccggacccctgtttgtggatgtacaggcccgggacccagagcgagggtccctggcttccccggctttctccccacggagcccagcctggattcctgtgcctgctcgcagggaggcagagaaggtcccccgggaggagcggaagtcacccgaggacaagaagtccatgatcctcagcgtcctggacacatccctgcagcggccagctggcctcatcgttgtgcacgccaccagcaacgggcaggagcccagcaggctggggggggccgaagaggagcgcccgggcaccccggagttggccccggcccccatgcagtcagcggctgtggcagagcccctgcccagcccccgggcccagccccctggtggcaccccggcagacgccgggccaggccagggcagctcagaggaagagccagagctggtgtttgctgtgaacctgccacctgcccagctgtcgtccagcgatgaggagaccagggaggagctggcccgaattgggttggtgccaccccctgaagagtttgccaacggggtcctgctggccaccccactcgctggcccgggcccctcgcccaccacggtgcccagcccggcctcagggaagcccagcagtgagccaccccctgcccctgagtctgcagccgactctggggtggaggaggctgacacacgcagctccagcgacccccacctggagaccacaagcaccatctccacggtgtccagcatgtccaccttgagctcggagagcggggaactcactgacacccacacctccttcgctgacggacacacttttctactcgagaagccaccagtgcctcccaagcccaagctcaagtccccgctggggaaggggccggtgaccttcagggacccgctgctgaagcagtcctcggacagcgagctcatggcccagcagcaccacgccgcctctgccgggctggcctctgccgccgggcctgcccgccctcgctacctcttccagagaaggtccaagctatggggggaccccgtggagagccgggggctccctgggcctgaagacgacaaaccaactgtgatcagtgagctcagctcccgcctgcagcagctgaacaaggacacgcgttccctgggggaggaaccagttggtggcctgggcagcctgctggaccctgccaagaagtcgcccatcgcagcagctcggtgagcagggcggtgcggggagggatccgtgccttgtccgtggccccgtctgtcattcctcttgtctgttctctggctctcctgttcctccttgttctgttccattccttctgtggcaacccccaacccgcccccgccatccacctctgaatctggtcttgcttggcctgcccgagagaggaggttcttctgggcgtctgacacgtcagggttgctgctcactgtgtccctgttggtgccagaagtgggagctgggctcccctcagagactcaggttgggcatgaggcgcctccatggccctcctggaggctcttggccccagggattcctgtgagttctctctctccctcccgacacaggctgtctttaccattaagggttgttttgtgttttactttggaggtacgcctccctcctcccatcctctctgtggccatgtggctgcccagtgtggctgataccctctgccttacagctgcctcctgccttgcttcctctggcggcttggagcacactgactccttttcttttgggggatctgccactaactccctatttcccatcccagaaacatttgtctcttggcaccaccttagaatcccttaaacatggattcccgtgtgtcatttctaaagtgcagtaagaagatagatggaagtcacgccatctccctgcactccatctgccctcttgccttctccccaccacttccccgtctgtcctgcccctgcccagaaggatctgagcaggggcctggcttgctgctgaggctgtcacagctgccagagccctgggctgatcccataggtctttccttgaggacccgactcccaaggctccttccaaagaggagcccttcgggcccgtgggctgcatggatgctggcggcagagctggtcatcccccacccgcccccttgtctgcctttttaaagctgcttttgccttctgtgcccctaggtctcccctctcctctttgggtctgggggggtggtatgtggatgccacctcttgactcctgcttcttgctgcctggaagaccaacctagtgggccccgtactgtcagccttggaggacagagttcacagcgtgcaacggtgttcagaacttaaggactttgcaggtcttacaaaggcctggcattctaccttctttagttcaggattcaaaagacaggtaggagcttgggaagctcatgaggcctctcctaaggtcccgggatgctgcctccagctcctgtcatcctggggaattgctctggggtcctctccccttttagccttttccaactctcagccaaactggaaagccctcttcccagcagtgcagtgttgaaggtgcccgtagaatgggtgttataatcagagtgagcagcctggtcctaggcctctgtacaggaccagacccctgaggctggggtctcctgacccacacctgaccagcccccatcttccctctctgcttctccctccgctcttctctgcctcttggtcttgatgaaaatcaaagccattttaaaaagtgcatagcacagtgcctggcctggttcgggccctcaataaacatttcttaaatggatgaaagaacaaagcaaaatgcaaatgctgtgttttgtgatttgagatctagggaggtggcttaggacaaaaacccacagaaggacttactcagcgttcagactcatcaggtgtcgatcccccatggtcgggctcaggtgggcccaggtctcgtcattggctctgtcctctcctgtgaggcagctgcagcagttgcagggcagggtcaggggattcctcagccggaacctctggcacttccccttctctgagttcatcctcccacggtgctctttagcattctgtcttgatcagggtacggttctcttagcccttggctctggctttcaccaggaccctgtttgtttttctttctcagatgtgggatggggaaggacaagaccagcagccctgacccttacgtgatgtctgttcttttactcagtagttcctgcaaaattctgatctctgattgggttcatgtgggtcctctgcttttccctgactgatcactggggtctggggacatagggctgtcatcggccaagcttgagtcctctgttctcccaggagccagggggatgggtccgcccacctagcaagcaggtgctgagagtgaggggagggggctctccagatggaagtccagtgctgtcccttgagtaagtagatgctggacagcctgtagcaaccaatgttctgtgacacggcccccactggcatcagcaactcacttccttgccggtcattggcttggagccatcagagggccctga

SEQ ID NO: 48097 - DNA, 1170 bp, Homo sapiens
cgtggggccgtggggggctcagtgtgatctggactcagcctcttcagcgtggctgctggaggtgttcgtgggtgacggtgcctggtgaagtatcatgtgttagagggggctagcttggtccccatgctcttgggcaactacagcagagaagcctccctgccttggaccccaaagtctcctgtcctgccctttatgtgtgtgggtgaaactgggtgcgtctgagcacgtgggagccgtgtgtgtgcctgattactgagtggccaccaggggccgctctggactagcgcggggccgtggaggcgtgcaccgtgtgcatgcgtggggtgtacctgtgagagcaccctgtctcctcttccaaagaaagtcagaggccatcctgcaccctgggtccagctgtttgcccagcctgtccttccagagcctcacccagcctgagcggggttccctggtgaatccctgctgcttggggaggccccaagggccccttggaggcagcgcccccaccttgggcttctgagggcatcatagggggacccctagagtcagttcaccacaggccctggggagagtcaaagacccccgagggtgcccagccccccacactgtgactcctcacactcagcgatgacctgtggggtggggggccctgggacgtttttaaacctagggtttggagtctggactaagctccatccacgtcactcacaagtttctgtttatatttctagctttttttaataaaataaaaaaaaaaagaaaacagaagttttcacaacccaggggcctggcacgccggtctgtgcctgcccgccccgccctggcccaccggccccactccctgggcacagagtcacacccactcatccttccgccaacagtccaggtcacacagcagcagtcactgtaacagactgccacatacacactcggtctcacactcacctgtgggttttggttccgttcaatttgggtttttaactttacagggtcagttccgcttcacctccttttgtatggagttccatccggggggtttcaccccctgctccagtcctgaggcctcctgaccctgacgttgtgatacgccccacagagatctatgtttcttatattattattattgataataattattataatattattatgtaataaatttataagaaatga

SEQ ID NO: 48098 - DNA, 4324 bp, Homo sapiens
gcccggccccgacagcccctacgccaacctgggcgccttcagcgccagcctcttcgctccgtccaagccgcagcgccgcaagagccccctggtgaagcagctgcaggtggaggacgcgcaggagcgcgcggccctggccgtgggcagccccggtcccggcggcggcagcttcgcccgcgagccctccccgacccaccgcggtccgcgcccgggtggcctcgactacggcgcgggcgatggcccggggctcgcgttcggcggcccgggcccggccaaggaccggcggctggaggagcggcgccgctccactgtgttcctgtccgtgggggccatcgagggcagcgcccccggcgcggatctgccatccctacagccctcccgctccatcgacgagcgcctcctggggaccggccccaccgccggccgcgacctgctgctgccctccccggtgtctgccctgaagccgttggtcagcggcccgagcctggggccctcgggttccaccttcatccacccactcaccggcaaacccctggaccccagctcacccctggcccttgccctggctgcccgagagcgagctctggcctcccaggcgccctcccggtcccccacacccgtgcacagtcccgacgccgaccgccccggacccctgtttgtggatgtacaggcccgggacccagagcgagggtccctggcttccccggctttctccccacggagcccagcctggattcctgtgcctgctcgcagggaggcagagaaggtcccccgggaggagcggaagtcacccgaggacaagaagtccatgatcctcagcgtcctggacacatccctgcagcggccagctggcctcatcgttgtgcacgccaccagcaacgggcaggagcccagcaggctggggggggccgaagaggagcgcccgggcaccccggagttggccccggcccccatgcagtcagcggctgtggcagagcccctgcccagcccccgggcccagccccctggtggcaccccggcagacgccgggccaggccagggcagctcagaggaagagccagagctggtgtttgctgtgaacctgccacctgcccagctgtcgtccagcgatgaggagaccagggaggagctggcccgaattgggttggtgccaccccctgaagagtttgccaacggggtcctgctggccaccccactcgctggcccgggcccctcgcccaccacggtgcccagcccggcctcagggaagcccagcagtgagccaccccctgcccctgagtctgcagccgactctggggtggaggaggctgacacacgcagctccagcgacccccacctggagaccacaagcaccatctccacggtgtccagcatgtccaccttgagctcggagagcggggaactcactgacacccacacctccttcgctgacggacacacttttctactcgagaagccaccagtgcctcccaagcccaagctcaagtccccgctggggaaggggccggtgaccttcagggacccgctgctgaagcagtcctcggacagcgagctcatggcccagcagcaccacgccgcctctgccgggctggcctctgccgccgggcctgcccgccctcgctacctcttccagagaaggtccaagctatggggggaccccgtggagagccgggggctccctgggcctgaagacgacaaaccaactgtgatcagtgagctcagctcccgcctgcagcagctgaacaaggacacgcgttccctgggggaggaaccagttggtggcctgggcagcctgctggaccctgccaagaagtcgcccatcgcagcagctcggctcttcagcagcctcggtgagctgagctccatttcagcgcagcgcagccccgggggcccgggcggcggggcctcgtactcggtgaggcccagtggccgctaccccgtggcgagacgcgccccgagcccggtgaagcccgcgtcgctggagcgggtggaggggctgggggcgggcgcggggggcgcagggcggcccttcggcctcacgccccccaccatcctcaagtcgtccagcctctccatcccgcacgagcccaaggaggtgcgcttcgtggtgcgcagcgtgagcgcgcgcagtcgctccccctcgccgtcgccgctgccctcgcccgcgtccggccccggccccggcgcccccggcccacgccgacccttccagcagaagccgctgcagctctggagcaagttcgacgtgggcgactggctggagagcatccacctaggcgagcaccgcgaccgcttcgaggaccatgagatagaaggcgcgcacctacccgcgcttaccaaggacgacttcgtggagctgggcgtcacgcgcgtgggccaccgcatgaacatcgagcgcgcgctcaggcagctggacggcagctgacgccccacccccactcccgccccggccgtgccctgccggcagggccccccacccccaccccgggccgcgggctcggcctgccccttacgacggcgcccgggccaggaatgttgcatgaatcgtcctgtttgctgttgctcggagactcgccctgtacattgcttagtgccctcaccggccgcccagcccacccagcgcacagtcaggaagggcgtggaccagggaggctggggcgggaggtgccgggggtggggtgccctagcgtgaccacctccttcgcagctcctggtggccattctcccagagggggaacctagtccagcatgcgaggtcaggacccgccttggtgactcggggggaggggggagacattgggattctcgatgggggccaaggagcccccctgttttgcatattttaatccactctatatttggaacgagaaaaggaacaaatatctctgtccgtaatagtttcctctcccctcccttctacttccactggtcccactgcagctgcccagtcttccatctccggcccctcactgccactgccaccccacaacggggcaggggacgctccagctggtctggggttggccagggccctagtggcccgccctggggccccagctcggcccctcgcctcgctgagctctagtgtgccccaccgacccttcaggtgctgctcgtggtgggaggggcggcaggccgcgggtcctgctgtgcacccgcgggaccagccggcctgggagaccatcggccgggggggatgagggcagggccctgccgctccaccgcagccatcttcctcacagggtctctccccaaggagggggctagcttggtccccatgctcttgggcaactacagcagagaagcctccctgccttggaccccaaagtctcctgtcctgccctttatgtgtgtgggtgaaactgggtgcgtctgagcacgtgggagccgtgtgtgtgcctgattactgagtggccaccaggggccgctctggactagcgcggggccgtggaggcgtgcaccgtgtgcatgcgtggggtgtacctgtgagagcaccctgtctcctcttccaaagaaagtcagaggccatcctgcaccctgggtccagctgtttgcccagcctgtccttccagagcctcacccagcctgagcggggttccctggtgaatccctgctgcttggggaggccccaagggccccttggaggcagcgcccccaccttgggcttctgagggcatcatagggggacccctagagtcagttcaccacaggccctggggagagtcaaagacccccgagggtgcccagccccccacactgtgactcctcacactcagcgatgacctgtggggtggggggccctgggacgtttttaaacctagggtttggagtctggactaagctccatccacgtcactcacaagtttctgtttatatttctagctttttttaataaaataaaaaaaaaaagaaaacagaagttttcacaacccaggggcctggcacgccggtctgtgcctgcccgccccgccctggcccaccggccccactccctgggcacagagtcacacccactcatccttccgccaacagtccaggtcacacagcagcagtcactgtaacagactgccacatacacactcggtctcacactcacctgtgggttttggttccgttcaatttgggtttttaactttacagggtcagttccgcttcacctccttttgtatggagttccatccggggggtttcaccccctgctccagtcctgaggcctcctgaccctgacgttgtgatacgccccacagagatctatgtttcttatattattattattgataataattattataatattattatgtaataaatttataagaaatga

SEQ ID NO: 48099 - DNA, 3092 bp, Homo sapiens
gcccggccccgacagcccctacgccaacctgggcgccttcagcgccagcctcttcgctccgtccaagccgcagcgccgcaagagccccctggtgaagcagctgcaggtggaggacgcgcaggagcgcgcggccctggccgtgggcagccccggtcccggcggcggcagcttcgcccgcgagccctccccgacccaccgcggtccgcgcccgggtggcctcgactacggcgcgggcgatggcccggggctcgcgttcggcggcccgggcccggccaaggaccggcggctggaggagcggcgccgctccactgtgttcctgtccgtgggggccatcgagggcagcgcccccggcgcggatctgccatccctacagccctcccgctccatcgacgagcgcctcctggggaccggccccaccgccggccgcgacctgctgctgccctccccggtgtctgccctgaagccgttggtcagcggcccgagcctggggccctcgggttccaccttcatccacccactcaccggcaaacccctggaccccagctcacccctggcccttgccctggctgcccgagagcgagctctggcctcccaggcgccctcccggtcccccacacccgtgcacagtcccgacgccgaccgccccggacccctgtttgtggatgtacaggcccgggacccagagcgagggtccctggcttccccggctttctccccacggagcccagcctggattcctgtgcctgctcgcagggaggcagagaaggtcccccgggaggagcggaagtcacccgaggacaagaagtccatgatcctcagcgtcctggacacatccctgcagcggccagctggcctcatcgttgtgcacgccaccagcaacgggcaggagcccagcaggctggggggggccgaagaggagcgcccgggcaccccggagttggccccggcccccatgcagtcagcggctgtggcagagcccctgcccagcccccgggcccagccccctggtggcaccccggcagacgccgggccaggccagggcagctcagaggaagagccagagctggtgtttgctgtgaacctgccacctgcccagctgtcgtccagcgatgaggagaccagggaggagctggcccgaattgggttggtgccaccccctgaagagtttgccaacggggtcctgctggccaccccactcgctggcccgggcccctcgcccaccacggtgcccagcccggcctcagggaagcccagcagtgagccaccccctgcccctgagtctgcagccgactctggggtggaggaggctgacacacgcagctccagcgacccccacctggagaccacaagcaccatctccacggtgtccagcatgtccaccttgagctcggagagcggggaactcactgacacccacacctccttcgctgacggacacacttttctactcgagaagccaccagtgcctcccaagcccaagctcaagtccccgctggggaaggggccggtgaccttcagggacccgctgctgaagcagtcctcggacagcgagctcatggcccagcagcaccacgccgcctctgccgggctggcctctgccgccgggcctgcccgccctcgctacctcttccagagaaggtccaagctatggggggaccccgtggagagccgggggctccctgggcctgaagacgacaaaccaactgtgatcagtgagctcagctcccgcctgcagcagctgaacaaggacacgcgttccctgggggaggaaccagttggtggcctgggcagcctgctggaccctgccaagaagtcgcccatcgcagcagctcggtgagcagggcggtgcggggagggatccgtgccttgtccgtggccccgtctgtcattcctcttgtctgttctctggctctcctgttcctccttgttctgttccattccttctgtggcaacccccaacccgcccccgccatccacctctgaatctggtcttgcttggcctgcccgagagaggaggttcttctgggcgtctgacacgtcagggttgctgctcactgtgtccctgttggtgccagaagtgggagctgggctcccctcagagactcaggttgggcatgaggcgcctccatggccctcctggaggctcttggccccagggattcctgtgagttctctctctccctcccgacacaggctgtctttaccattaagggttgttttgtgttttactttggaggtacgcctccctcctcccatcctctctgtggccatgtggctgcccagtgtggctgataccctctgccttacagctgcctcctgccttgcttcctctggcggcttggagcacactgactccttttcttttgggggatctgccactaactccctatttcccatcccagaaacatttgtctcttggcaccaccttagaatcccttaaacatggattcccgtgtgtcatttctaaagtgcagtaagaagatagatggaagtcacgccatctccctgcactccatctgccctcttgccttctccccaccacttccccgtctgtcctgcccctgcccagaaggatctgagcaggggcctggcttgctgctgaggctgtcacagctgccagagccctgggctgatcccataggtctttccttgaggacccgactcccaaggctccttccaaagaggagcccttcgggcccgtgggctgcatggatgctggcggcagagctggtcatcccccacccgcccccttgtctgcctttttaaagctgcttttgccttctgtgcccctaggtctcccctctcctctttgggtctgggggggtggtatgtggatgccacctcttgactcctgcttcttgctgcctggaagaccaacctagtgggccccgtactgtcagccttggaggacagagttcacagcgacgccgcgagtccgaggacggagcccacacctcaacttgcccttttgtcacaaccaggcgtttagagtccactgctccctgatgcattccacctgctcctgcatgggccccagacctcggggctcagcagtgccccacaagccttcctgccagagaggggcggagcag

SEQ ID NO: 48100 - DNA, 1379 bp, Homo sapiens
ggcacgagggaagcaactccaaggacacagttcacagaaatttggttctcagccccaaaatactgattgaattggagacaattacaaggactctctggccaaaaacccttgaagaggccccgtgaaggaggcagtgaggagcttttgattgctgacctgtgtcgtaccaccccagaatgtgcactgggggctgtgccagatgcctgggggggaccctcattccccttgctttttttggcttcctggctaacatcctgttattttttcctggaggaaaagtgatagatgacaacgaccacctttcccaagagatctggtttttcggaggaatattaggaagcggtgtcttgatgatcttccctgcgctggtgttcttgggcctgaagaacaatgactgctgtgggtgctgcggcaacgagggctgtgggaagcgatttgcgatgttcacctccacgatatttgctgtggttggattcttgggagctggatactcgtttatcatctcagccatttcaatcaacaagggtcctaaatgcctcatggccaatagtacatggggctaccccttccacgacggggattatctcaatgatgaggccttatggaacaagtgccgagagcctctcaatgtggttccctggaatctgaccctcttctccatcctgctggtcgtaggaggaatccagatggttctctgcgccatccaggtggtcaatggcctcctggggaccctctgtggggactgccagtgttgtggctgctgtgggggagatggacccgtttaaacctccgagatgagctgctcagactctacagcatgacgactacaatttcttttcataaaacttcttctcttcttggaattattaattcctatctgcttcctagctgataaagcttagaaaaggcagttattccttctttccaaccagctttgctcgagttagaattttgttattttcaaataaaaaatagtttggccacttaacaaatttgatttataaatctttcaaattagttcctttttagaatttaccaacaggttcaaagcatacttttcatgatttttttattacaaatgtaaaatgtataaagtcacatgtactgccatactacttctttgtatataaagatgtttatatctttggaagttttacataaatcaaaggaagaaagcacatttaaaatgagaaactaagaccaatttctgtttttaagaggaaaaagaatgattgatgtatcctaagtattgttatttgttgtctttttttgctgccttgcttgagttgcttgtgactgatcttttgaggctgtcatcatggctagggttcttttatgtatgttaaattaaaacctgaattcagaggtaacgtaaaaaa

SEQ ID NO: 48101 - DNA, 1749 bp, Homo sapiens
ggcacgagggaagcaactccaaggacacagttcacagaaatttggttctcagccccaaaatactgattgaattggagacaattacaaggactctctggccaaaaacccttgaagaggccccgtgaaggaggcagtgaggagcttttgattgctgacctgtgtcgtaccaccccagaatgtgcactgggggctgtgccagatgcctgggggggaccctcattccccttgctttttttggcttcctggctaacatcctgttattttttcctggaggaaaagtgatagatgacaacgaccacctttcccaagagatctggtttttcggaggaatattaggaagcggtgtcttgatgatcttccctgcgctggtgttcttgggcctgaagaacaatgactgctgtgggtgctgcggcaacgagggctgtgggaagcgatttgcgatgttcacctccacgatatttgctgtggttggattcttgggagctggatactcgtttatcatctcagccatttcaatcaacaagggtcctaaatgcctcatggccaatagtacatggggctaccccttccacgacggggattatctcaatgatgaggccttatggaacaagtgccgagagcctctcaatgtggttccctggaatctgaccctcttctccatcctgctggtcgtaggaggaatccagatggttctctgcgccatccaggtggtcaatggcctcctggggaccctctgtggggactgccagtgttgtggctgctgtgggggagatggacccgtttaaacctccgagatgagctgctcagactctacagcatgacgactacaatttcttttcataaaacttcttctcttcttggaattattaattcctatctgcttcctagctgataaagcttagaaaaggcagttattccttctttccaaccagctttgctcgagttagaattttgttattttcaaataaaaaatagtttggccacttaacaaatttgatttataaatctttcaaattagttcctttttagaatttaccaacaggttcaaagcatacttttcatgatttttttattacaaatgtaaaatgtataaagtcacatgtactgccatactacttctttgtatataaagatgtttatatctttggaagttttacataaatcaaaggaagaaagcacatttaaaatgagaaactaagaccaatttctgtttttaagaggaaaaagaatgattgatgtatcctaagtattgttatttgttgtctttttttgctgccttgcttgagttgcttgtgactgatcttttgaggctgtcatcatggctagggttcttttatgtatgttaaattaaaacctgaattcagaggtaacgtaaaaaaaaaaaaaaaaaaaaaaaaaaaaaaaaaaaaaaaaaaaaaggggggggcgcaaaaatttccccgggggggccaaattttgggggcccccctttttttggaaaagggggccccaaaaggagagcccatataaataaccaacaggccacggggccccgcgcgtaacacaaagccgcgtagccggcggaacccacgctagccggggggaccctggggggaaggaacccacactcgcgcgggcgcccctaggtggccaaccccctaagagataaacgggcctagcgcacatttaaaatccaggcgcatccgcgcgctacccacggccataccggcgccgaaaatggtcaggatatcataggaatcttccgagctc

SEQ ID NO: 48102 - DNA, 811 bp, Homo sapiens
  misc_feature (25)..(25): n is a, c, g, or t
  misc_feature (27)..(27): n is a, c, g, or t
gcttggcggggcatatctcatgttngnggccttatggaacaagtgccgagagcctctcaatgtggttccctggaatctgaccctcttctccatcctgctggtcgtaggaggaatccagatggttctctgcgccatccaggtggtcaatggcctcctggggaccctctgtggggactgccagtgttgtggctgctgtgggggagatggacccgtttaaacctccgagatgagctgctcagactctacagcatgacgactacaatttcttttcataaaacttcttctcttcttggaattattaattcctatctgcttcctagctgataaagcttagaaaaggcagttattccttctttccaaccagctttgctcgagttagaattttgttattttcaaataaaaaatagtttggccacttaacaaatttgatttataaatctttcaaattagttcctttttagaatttaccaacaggttcaaagcatacttttcatgatttttttattacaaatgtaaaatgtataaagtcacatgtactgccatactacttctttgtatataaagatgtttatatctttggaagttttacataaatcaaaggaagaaagcacatttaaaatgagaaactaagaccaatttctgtttttaagaggaaaaagaatgattgatgtatcctaagtattgttatttgttgtctttttttgctgccttgcttgagttgcttgtgactgatcttttgaggctgtcatcatggctagggttcttttatgtatgttaaattaaaacctgaattcagaggtaacgtaaaaaa

SEQ ID NO: 48103 - DNA, 816 bp, Homo sapiens
  misc_feature (1)..(1): n is a, c, g, or t
  misc_feature (12)..(12): n is a, c, g, or t
  misc_feature (22)..(22): n is a, c, g, or t
  misc_feature (27)..(27): n is a, c, g, or t
ncttgcccaggncttcatcctncatgnatcagggccttatggaacaagtgccgagagcctctcaatgtggttccctggaatctgaccctcttctccatcctgctggtcgtaggaggaatccagatggttctctgcgccatccaggtggtcaatggcctcctggggaccctctgtggggactgccagtgttgtggctgctgtgggggagatggacccgtttaaacctccgagatgagctgctcagactctacagcatgacgactacaatttcttttcataaaacttcttctcttcttggaattattaattcctatctgcttcctagctgataaagcttagaaaaggcagttattccttctttccaaccagctttgctcgagttagaattttgttattttcaaataaaaaatagtttggccacttaacaaatttgatttataaatctttcaaattagttcctttttagaatttaccaacaggttcaaagcatacttttcatgatttttttattacaaatgtaaaatgtataaagtcacatgtactgccatactacttctttgtatataaagatgtttatatctttggaagttttacataaatcaaaggaagaaagcacatttaaaatgagaaactaagaccaatttctgtttttaagaggaaaaagaatgattgatgtatcctaagtattgttatttgttgtctttttttgctgccttgcttgagttgcttgtgactgatcttttgaggctgtcatcatggctagggttcttttatgtatgttaaattaaaacctgaattcagaggtaacgtaaaaaa

SEQ ID NO: 48104 - DNA, 804 bp, Homo sapiens
cgggttattgctcatgcagtggccttatggaacaagtgccgagagcctctcaatgtggttccctggaatctgaccctcttctccatcctgctggtcgtaggaggaatccagatggttctctgcgccatccaggtggtcaatggcctcctggggaccctctgtggggactgccagtgttgtggctgctgtgggggagatggacccgtttaaacctccgagatgagctgctcagactctacagcatgacgactacaatttcttttcataaaacttcttctcttcttggaattattaattcctatctgcttcctagctgataaagcttagaaaaggcagttattccttctttccaaccagctttgctcgagttagaattttgttattttcaaataaaaaatagtttggccacttaacaaatttgatttataaatctttcaaattagttcctttttagaatttaccaacaggttcaaagcatacttttcatgatttttttattacaaatgtaaaatgtataaagtcacatgtactgccatactacttctttgtatataaagatgtttatatctttggaagttttacataaatcaaaggaagaaagcacatttaaaatgagaaactaagaccaatttctgtttttaagaggaaaaagaatgattgatgtatcctaagtattgttatttgttgtctttttttgctgccttgcttgagttgcttgtgactgatcttttgaggctgtcatcatggctagggttcttttatgtatgttaaattaaaacctgaattcagaggtaacgtaaaaaa

SEQ ID NO: 48105 - DNA, 1089 bp, Homo sapiens
tttaactcgcggaattatttgtggttttgggctggcccttctaataaagtgtaattggaattttcttaaaaccagtgtatgagaccctgtttggaatgtcacctgtgtggtcttgcccaggtcagtaggcctcaacttggtcctgtcctgtaaaatggggcttttaatacctacttctacggtttgtcaatggagtgctttagtacagggtgaacagagcatgaattcatttgaatccttagaaggctcagtaaatggcattgaatgttaaatactaaccttatgaaagtcagtgaggtagcatagcttcaagtttccctttaacacaatctctgggttcggcctccttggttcaaatcccagctctcttacttgttagtggtggctttccacatagcacttggtctctcagcacctcttaccaaattatttttttaaataaatgatgcatattgtatacaatgtattctcctcaggggagatggacccgtttaaacctccgagatgagctgctcagactctacagcatgacgactacaatttcttttcataaaacttcttctcttcttggaattattaattcctatctgcttcctagctgataaagcttagaaaaggcagttattccttctttccaaccagctttgctcgagttagaattttgttattttcaaataaaaaatagtttggccacttaacaaatttgatttataaatctttcaaattagttcctttttagaatttaccaacaggttcaaagcatacttttcatgatttttttattacaaatgtaaaatgtataaagtcacatgtactgccatactacttctttgtatataaagatgtttatatctttggaagttttacataaatcaaaggaagaaagcacatttaaaatgagaaactaagaccaatttctgtttttaagaggaaaaagaatgattgatgtatcctaagtattgttatttgttgtctttttttgctgccttgcttgagttgcttgtgactgatcttttgaggctgtcatcatggctagggttcttttatgtatgttaaattaaaacctgaattcagaggtaacgtaaaaaa

SEQ ID NO: 48106 - DNA, 742 bp, Homo sapiens
  misc_feature (25)..(25): n is a, c, g, or t
  misc_feature (27)..(27): n is a, c, g, or t
gcttggcggggcatatctcatgttngnggccttatggaacaagtgccgagagcctctcaatgtggttccctggaatctgaccctcttctccatcctgctggtcgtaggaggaatccagatggttctctgcgccatccaggtggtcaatggcctcctggggaccctctgtggggactgccagtgttgtggctgctgtggtttcataaaacttcttctcttcttggaattattaattcctatctgcttcctagctgataaagcttagaaaaggcagttattccttctttccaaccagctttgctcgagttagaattttgttattttcaaataaaaaatagtttggccacttaacaaatttgatttataaatctttcaaattagttcctttttagaatttaccaacaggttcaaagcatacttttcatgatttttttattacaaatgtaaaatgtataaagtcacatgtactgccatactacttctttgtatataaagatgtttatatctttggaagttttacataaatcaaaggaagaaagcacatttaaaatgagaaactaagaccaatttctgtttttaagaggaaaaagaatgattgatgtatcctaagtattgttatttgttgtctttttttgctgccttgcttgagttgcttgtgactgatcttttgaggctgtcatcatggctagggttcttttatgtatgttaaattaaaacctgaattcagaggtaacgtaaaaaa

SEQ ID NO: 48107 - DNA, 1449 bp, Homo sapiens
ggcacgagggaagcaactccaaggacacagttcacagaaatttggttctcagccccaaaatactgattgaattggagacaattacaaggactctctggccaaaaacccttgaagaggccccgtgaaggaggcagtgaggagcttttgattgctgacctgtgtcgtaccaccccagaatgtgcactgggggctgtgccagatgcctgggggggaccctcattccccttgctttttttggcttcctggctaacatcctgttattttttcctggaggaaaagtgatagatgacaacgaccacctttcccaagagatctggtttttcggaggaatattaggaagcggtgtcttgatgatcttccctgcgctggtgttcttgggcctgaagaacaatgactgctgtgggtgctgcggcaacgagggctgtgggaagcgatttgcgatgttcacctccacgatatttgctgtggttggattcttgggagctggatactcgtttatcatctcagccatttcaatcaacaagggtcctaaatgcctcatggccaatagtacatggggctaccccttccacgacggggattatctcaatgatgaggccttatggaacaagtgccgagagcctctcaatgtggttccctggaatctgaccctcttctccatcctgctggtcgtaggaggaatccagatggttctctgcgccatccaggtggtcaatggcctcctggggaccctctgtggggactgccagtgttgtggctgctgtgggggagatggacccgtttaaacctccgagatgagctgctcagactctacagcatgacgactacaatttcttttcataaaacttcttctcttcttggaattattaattcctatctgcttcctagctgataaagcttagaaaaggcagttattccttctttccaaccagctttgctcgagttagaattttgttattttcaaataaaaaatagtttggccacttaacaaatttgatttataaatctttcaaattagttcctttttagaatttaccaacaggttcaaagcatacttttcatgatttttttattacaaatgtaaaatgtataaagtcacatgtactgccatactacttctttgtatataaagatgtttatatctttggaagttttacataaatcaaaggaagaaagcacatttaaaatgagaaactaagaccaatttctgtttttaagaggaaaaagaatgattgatgtatcctaagtattgttatttgttgtctttttttgctgccttgcttgagttgcttgtgactgatcttttgaggctgtcatcatggctagggttcttttatgtatgttaaattaaaacctgaattcagaggtaacgtaaaaaaaaaaaactggcctctctgcctcaccgggggagttctggggccgttcctttatgggggttacttctgaccc

SEQ ID NO: 48108 - DNA, 1495 bp, Homo sapiens
ggcacgagggaagcaactccaaggacacagttcacagaaatttggttctcagccccaaaatactgattgaattggagacaattacaaggactctctggccaaaaacccttgaagaggccccgtgaaggaggcagtgaggagcttttgattgctgacctgtgtcgtaccaccccagaatgtgcactgggggctgtgccagatgcctgggggggaccctcattccccttgctttttttggcttcctggctaacatcctgttattttttcctggaggaaaagtgatagatgacaacgaccacctttcccaagagatctggtttttcggaggaatattaggaagcggtgtcttgatgatcttccctgcgctggtgttcttgggcctgaagaacaatgactgctgtgggtgctgcggcaacgagggctgtgggaagcgatttgcgatgttcacctccacgatatttgctgtggttggattcttgggagctggatactcgtttatcatctcagccatttcaatcaacaagggtcctaaatgcctcatggccaatagtacatggggctaccccttccacgacggggattatctcaatgatgaggccttatggaacaagtgccgagagcctctcaatgtggttccctggaatctgaccctcttctccatcctgctggtcgtaggaggaatccagatggttctctgcgccatccaggtggtcaatggcctcctggggaccctctgtggggactgccagtgttgtggctgctgtgggggagatggacccgtttaaacctccgagatgagctgctcagactctacagcatgacgactacaatttcttttcataaaacttcttctcttcttggaattattaattcctatctgcttcctagctgataaagcttagaaaaggcagttattccttctttccaaccagctttgctcgagttagaattttgttattttcaaataaaaaatagtttggccacttaacaaatttgatttataaatctttcaaattagttcctttttagaatttaccaacaggttcaaagcatacttttcatgatttttttattacaaatgtaaaatgtataaagtcacatgtactgccatactacttctttgtatataaagatgtttatatctttggaagttttacataaatcaaaggaagaaagcacatttaaaatgagaaactaagaccaatttctgtttttaagaggaaaaagaatgattgatgtatcctaagtattgttatttgttgtctttttttgctgccttgcttgagttgcttgtgactgatcttttgaggctgtcatcatggctagggttcttttatgtatgttaaattaaaacctgaattcagaggtaacgtaaaaaagattgtgtgtgttttaggaggggggacaaaacgttgaatgaataacaactcatcttttctacaaatgcttcctttgatcaaacaaaaaaaagtttttaaaaaattgatttaagtaa

SEQ ID NO: 48109 - DNA, 818 bp, Homo sapiens
  misc_feature (6)..(6): n is a, c, g, or t
  misc_feature (15)..(15): n is a, c, g, or t
  misc_feature (21)..(21): n is a, c, g, or t
gttctnctgctaggnaatccnctccctagagtgaggccttatggaacaagtgccgagagcctctcaatgtggttccctggaatctgaccctcttctccatcctgctggtcgtaggaggaatccagatggttctctgcgccatccaggtggtcaatggcctcctggggaccctctgtggggactgccagtgttgtggctgctgtgggggagatggacccgtttaaacctccgagatgagctgctcagactctacagcatgacgactacaatttcttttcataaaacttcttctcttcttggaattattaattcctatctgcttcctagctgataaagcttagaaaaggcagttattccttctttccaaccagctttgctcgagttagaattttgttattttcaaataaaaaatagtttggccacttaacaaatttgatttataaatctttcaaattagttcctttttagaatttaccaacaggttcaaagcatacttttcatgatttttttattacaaatgtaaaatgtataaagtcacatgtactgccatactacttctttgtatataaagatgtttatatctttggaagttttacataaatcaaaggaagaaagcacatttaaaatgagaaactaagaccaatttctgtttttaagaggaaaaagaatgattgatgtatcctaagtattgttatttgttgtctttttttgctgccttgcttgagttgcttgtgactgatcttttgaggctgtcatcatggctagggttcttttatgtatgttaaattaaaacctgaattcagaggtaacgtaaaaaa

SEQ ID NO: 48110 - DNA, 1248 bp, Homo sapiens
ggcacgagggaagcaactccaaggacacagttcacagaaatttggttctcagccccaaaatactgattgaattggagacaattacaaggactctctggccaaaaacccttgaagaggccccgtgaaggaggcagtgaggagcttttgattgctgacctgtgtcgtaccaccccagaatgtgcactgggggctgtgccagatgcctgggggggaccctcattccccttgctttttttggcttcctggctaacatcctgttattttttcctggaggaaaagtgatagatgacaacgaccacctttcccaagagatctggtttttcggaggaatattaggaagcggtgtcttgatgatcttccctgcgctggtgttcttgggcctgaagaacaatgactgctgtgggtgctgcggcaacgagggctgtgggaagcgatttgcgatgttcacctccacgatatttgctgtggttggattcttgggagctggatactcgtttatcatctcagccatttcaatcaacaagggtcctaaatgcctcatggccaatagtacatggggctaccccttccacgacggggattatctcaatgatgaggccttatggaacaagtgccgagagcctctcaatgtggttccctggaatctgaccctcttctccatcctgctggtcgtaggaggaatccagatggttctctgcgccatccaggtggtcaatggcctcctggggaccctctgtggggactgccagtgttgtggctgctgtgggggagatggacccgtttaaacctccgagatgagctgctcagactctacagcatgacgactacaatttcttttcataaaacttcttctcttcttggaattattaattcctatctgcttcctagctgataaagcttagaaaaggcagttattccttctttccaaccagctttgctcgagttagaattttgttattttcaaataaaaaatagtttggccacttaacaaatttgatttataaatctttcaaattagttcctttttagaatttaccaacaggttcaaagcatacttttcatgatttttttattacaaatgtaaaatgtataaagtcacatgtactgccatactacttctttgtatataaagatgtttatatctttggaagttttacataaatcaaaggaagaaagcacatttaaaatgagaaactaagaccaatttctgtttttaaatgtgctttcttcctttgatttatgtcgacg

SEQ ID NO: 48111 - DNA, 1044 bp, Homo sapiens
ggcacgagggaagcaactccaaggacacagttcacagaaatttggttctcagccccaaaatactgattgaattggagacaattacaaggactctctggccaaaaacccttgaagaggccccgtgaaggaggcagtgaggagcttttgattgctgacctgtgtcgtaccaccccagaatgtgcactgggggctgtgccagatgcctgggggggaccctcattccccttgctttttttggcttcctggctaacatcctgttattttttcctggaggaaaagtgatagatgacaacgaccacctttcccaagagatctggtttttcggaggaatattaggaagcggtgtcttgatgatcttccctgcgctggtgttcttgggcctgaagaacaatgactgctgtgggtgctgcggcaacgagggctgtgggaagcgatttgcgatgttcacctccacgatatttgctgtggttggattcttgggagctggatactcgtttatcatctcagccatttcaatcaacaagggtcctaaatgcctcatggccaatagtacatggggctaccccttccacgacggggattatctcaatgatgaggccttatggaacaagtgccgagagcctctcaatgtggttccctggaatctgaccctcttctccatcctgctggtcgtaggaggaatccagatggttctctgcgccatccaggtggtcaatggcctcctggggaccctctgtggggactgccagtgttgtggctgctgtgggggagatggacccgtttaaacctccgagatgagctgctcagactctacagcatgacgactacaatttcttttcataaaacttcttctcttcttggaattattaattcctatctgcttcctagctgataaagcttagaaaaggcagttattccttctttccaaccagctttgctcgagttagaattttgttattttcaaataaaaaatagttgtttgcacgcgccaagcgatccttcctcattcgtgcgcaagatcacggatattcgtaagtatttaac

SEQ ID NO: 48112 - DNA, 411 bp, Homo sapiens
gtgaaacaagtattttggctagtctcctgccagacacatagaaagtattgtgtgagcgtgtgttgagttgtgttaaagggggcaggtctgtgttgtggttgcatacggattgtactgctgggaaggccgccacacctttcctgttgatgtgtctacttaacagtcattgggaaagtagaattgagctgtcaaatcttaaaattttgtggagagatgcttgtttttggactgattttcttttctggtcagctagtaaactagtaggcaactctatgaggttaatgcagccaggaaagaagcctttggaacacagtgccgtccaaaaaaaatgtttgtcttctctttccgtttgctggtgagtggaaacctcacttggttaaacctactcagtgtttgtgcctttgtatctcc

SEQ ID NO: 48113 - DNA, 313 bp, Homo sapiens
atcccagtcattagcgcatggcattgtcttatctcctattgctgtcacttgaccgctgatgtgggagtgactgaaattagctttagcaaaacttggggcatcactctaaagagtgaggttaactgaagcaccgtcctaaggctaggtgttctggaagcatctgtagccaaaatcaagagtatgggaagttccaagccttcctcctagtaagtaagctaagtattgtgggtaaaaacacttatttacagctaataagatgatctcactgacatgtttttattgctaaagtcttttacttgggctaaaaggaaga

SEQ ID NO: 48114 - DNA, 656 bp, Homo sapiens
acacgcatggtttcccattattttagactggaatttcagatgcctttttaaggaatgcttaattatgattcttatcttgggaaacctttaaaaaattaaaaatgcttcgtatgtttattaaaaaaattcaaaagcgtagattattttaagtaaaacttgatattccccaaatagcactcttttctggccagtttagtgtgattccatacatacaagtaaatgtgacatgaagatgtagataccatgttgatatgtgtgtgcacgtgtgtgtatgtatataaacatgtaaaatacaggaaatacctttacatatttatgtgtaaccttttttcaaaatgtaacatgggtgttaattggaagcatttgaaacattgagtacggagaaggatttggtgacgcctgtaatcccagcattctgggaggccgactggggtggatcgcttgaggtcaggagttcaagaccagccttcatggcgactccctgtctctactataaacccaaaaattagccgggatcgtggtatcatgcgcttgtaatcccagccacttgtgaggctgaagcaggagaatcatttgaacccaggagacggagggtatagtgagccgagatgacgccactgcactccagcctgggtgacagagtgagactgtgtctc

SEQ ID NO: 48115 - DNA, 281 bp, Homo sapiens
tgttttccacttgtaaaataaggataagtagaacacctgacttataaagttgctgtgagggttaagtgggtgaacacttgtaaaatgcttagagcagtgcccagcacctcctaaaatgctattgattcctgtcttttctttttttcttttgttcctccaccagtgcctctaactgcttgtcccatgggcatcaaactagaggctgagcacagtggctcatgcctgtaatcccagcagtttgggagcccaaggcaagaagatcacttgaggccaggagtttg

SEQ ID NO: 48116 - DNA, 804 bp, Homo sapiens
cctccccacgtgctgggattataggcgtgagtcaccatgcccagtcgtttatacacatttatcaaaactcactgcatcataaattgcaagagtaaattttactgtatgtaaatatcttaattttttaaaggaaaaaaaaagtccaaaataagtagctataattaccttttccttttagaaaaaggcattcatattttctgagcatgagagaactacaggctcattgtagacatttgggaaaatgtacaaaggatgtacattcatcacgtgcagaaaaataatatttccttgctgtgagctttattggcacagaatacacacaaagctgggaccatgctatgcattttttaaatgaaattatacattttgctttctgaaatatattgtgcatatttttcatgtcattaattttcaaaatcatgattttatgaatcaataatattctatgtttacttaagagacagagtctccctttgtggcccaggctggagtgcagtggcgcaaaggaatcattgctcactgcagcctcaaactcctgggctcaagcgatcctcagtggtgggatgagatctagacccctgatattcaatctcagaaagtcaataattccctgcctcagcctcctgagtagctggggctgcaggcctgtgccactgcaccaggttcaatgtatattttattttgtcttttttttctttttttaatgtatattttttagcattcctttgttgttagaaattacattgtttatataattattatttgtcaattaaaaataaaagaaaaaatcatactgctcctatt

SEQ ID NO: 48117 - DNA, 370 bp, Homo sapiens
gctggatgacaagctttcagttgtcatgtcaaggagttggaattttattcacgtgggcaatgtgaagccatggtaggctttttagtgggcagatgatgggactgaaactgtagatagcagcagtgtacacagtggtccaaagtagggagaggctagggatcaggggcttattattttttgagacaaggtctctgtcacctaggctggagtgcagtggcgtgatcatggcttactgcagccttgacctcctggacgcaagtgatcctcccaccttagcctcctgagtagctaagaccacaggtgcacaccaccatacctagctaatcgttaaattatttgtagagatagggtcttgccatgttgcccaggc

SEQ ID NO: 48118 - DNA, 391 bp, Homo sapiens
tgacccttgtacgagtcctgtgtgttgggatggaagggcatggaggctgccccttctgctcattttttaaaaatacatgtttttataaaaattctaaaacagttgtgtacgaatgaaatctgtcaattgacccaagcagtttttttcatttatttgagatagggttcctgtcacccaggctggagtgcagtggtgtgatctcagttcactgcagccttgacctttcaagctcaagcgatgttcctgcctcagtctcctgagtagctgggaccacaggtacatgccactgtttccagctaatatatatatatatatttgagacagggtcgcattatgttgcccaggagttcgagacctgcctgggcaatatagcgagaccccgttctccaga

SEQ ID NO: 48119 - DNA, 184 bp, Homo sapiens
cccccgcgcttggcctaggatggaaattcaaacctagatttgtgaatcttcaaagatcaccaatgctcttgagcagtgctagcctgcatctctgtgatttgccattctgaggaagtgcaatttctggtattcaataagaaccttgtgaaatgttattttgatgtaattgcaaaggcttgtctcg

SEQ ID NO: 48120 - DNA, 818 bp, Homo sapiens
tacagactccaaaaaaatctggctgtttccaaagttccccgatgacaacaacatccaagtggcgctgggaagtaattggagcaggaaagggatgtggaggggagaggagatgaagccagaggtctggctgttcctgagaagtacaaaagaacattcccagagcttcaggtacattgagatgaggtgggagagtgaggaagatttaagatgtaaaatgtgcactaccagaaaattatttaacacctccagtctctcaagagaatttaaatcttccctgttagtgtcagaatctacttgcttaatactttaaaaattagctgatggaaagaaaaattagattgaacacttcagcccacatcccatgtgtacttccatcaacacaggctcaaatccaatctggtttcaattatccggtaccttttttaatagcaaaaaaaaaagttttaatggaaattgtatttcataaggatcaaaaacagaagttttccttcctgaaataaggaaactcagataaagactgaggaaatttatggagagagatttgcagatgatactaatatggaagcaaagtggttaatggcaattgttctggaatctcagttcaaatcccagctccaccacttactagttctgtgacactgggtaagtcacttaacctctctgaacctcagttttcaacatggcaatatctatttcaatggactattaggaggtttaaataaaataatccatataaaagtgtttaccacagttcttagcatacagtaatcactccacaaatatgacctgctattattgctactgctcacaggaattgc

SEQ ID NO: 48121 - DNA, 1527 bp, Homo sapiens
atccgcccacctcagcctccctaaagcttatatattttatctctggatagtccgccctggctcagacttatacctttatataatagatatttttctagttttgaagtggatgagaaggaggcaacacatgtaatagaggtaagtacagtagcagggtctaccagtgagagctgagaagataacaatgaaaatataagcaggaaagctataactaactgataaaattgctgcagaaagcataaaaaggtctatttagtgtaggtgaaaactggtcaccacaacttaaaaatctacaagctatcattttaattaaatggtatgcaatattaatgttcatgattattatgactctgaattactgtgaggttaaattatagtaatccccccttatctgcagtttcactttccagttttagttactcttggtctgaaaatattaaattgaaaacttcagtaataaataattcataagatttaagttgtgtgccattctgggtagcgtgatgagatcctacaccttccctctctgtcctgcccaggacgtgaatcatcccttggtcctgtagatcctcacagtatatgctgcccacccatgtaatggcctaagtcatcagattaactgttgttattgactgtcaaaactattgcagtgtttgtgttattttacttaataatgacctcaaagtgcaggagtagtgatgccggcacgttgttataaatgttccattattagttattgttgttaatctcttattgtgcctaatttatacattattgatcataggtgtgtatgtaaggcacacctcattttgttgcacttttattgcacttttcagataacttttttttttacaaactgacagtttatggcaactctgttgagcaagtctgttggtgccatttttttttaacagcatgtgctcacttcttgcctctatatcacactttggtagttcttgcaatatttcaagctttgtaaattattgttatatctgttatggtgatctgtgatcagtgatctttgatgttactattgtaattattttagggcaccacaaactgcgcccatataagacaacagacttaattgataagtgttacgtgtgttctgactgctccaccaactggctgttttccagtctctctccctctgttcggcccccccatctcctaagacacaaaaatattcaagttacaccaataataaccctccagtggcctctgagtgttcaagagtaaggaggagtcgcatgtctcactttaaatcaaaagctagaaatgattgagcttagtgaggaaggcatgtcaaaatgcaagactggctgaaggctaggtctcttgtgctaaacacttagtcacattgtgaatgcaaaggtaaagttcttgaaggaaattgaaagtgctgggctgtgcgtggtggctcttacctgtaactgcaacactttgggaggctaagatgggaggatcacctgaggccatgagtttgagaccagtcctggtaacatagcaagacctccatctctacaa

SEQ ID NO: 48122 - DNA, 342 bp, Homo sapiens
gggaagatcgcttgagtccaggaggcaaacattgcttctcctccaaatgctgtactttaacatgtttggaaactcctgcaaaggaatttcaacataagcgaagtcaatgggttataaaggactgaatgccattttgtaaatgtcagaaatcaaagtcacaaccaagttaagttctagattagggccaggaagagaaatgtattatctggtcaaccatatcaaatctgtattttggtggaagagcattttcttatattggttctgattggtttgatacggacagggaactgttttctttattccagttatttgttttgttttgtttctgagacagagtctcgc

SEQ ID NO: 48123 - DNA, 421 bp, Homo sapiens
gatcacctgaggtcaggagtttgagaccagcctggccaacatggtgaaaccccttccctactaaaaatccaaaaattagctgggcgtgggggtgggcacctgtagttccagctacttgggaggctgaggcaggagaatctcttgaacccaggaggcagaggttgcagtgagccgagattgcaccattgcactccagcctgggtgacaagagcgaaactgcatgtctctctctctctctacctatctatctatctatatacctatatcattgtttattcattgttttggctatctttatgatggggaggagcactagcgggttccagtcttgttctcctcccgagtgtgatagcatttttaatggacaatcctttagggcatctttccaaagctttcaacttagtttttgtttctgtactta

SEQ ID NO: 48124 - DNA, 550 bp, Homo sapiens
ctgtgtggccttgggcaagtcacttaacctctctgtgcctcagtttccccatctgtaaaatggggataataatactgacctacctcacaggggtgttgtgaggctttaactaaatgttttgtaaagcgttttgagatacagaggcaaaggcgctagggaagggcaaagtattattggacttaaggaagctgaaatggtaccataaatgctgctattctgagagccattttaaactgcactgctccaaccacccccgcttctcatcaccaggacagcaggtcgagaaaatgtctttcctttcacttgcttctggggtttgtgattattcaagacaattttttccccttgctgtatctccttccctcacctcctcgacttgttccctgttctgtttatgcggaaatggcagaaatgcttgagaaatgagaatgtgtaagtggattggaagtttatagtatgaaatttcaattttactttgtactgtacatctttttactttagaatttgcaataaagggttacgtcaatcttgttttcaactctcacttgga

SEQ ID NO: 48125 - DNA, 639 bp, Homo sapiens
ggcttcaataccctgtattattgtttaggcatgtgagagctgttcattgtgtggcttgatggaaataaaagtctctaccatcacttatgttgaatgtttgttttccttatatcactcaggcccctctaccacaaaggtggattctatcaactcattaagtggtttttgataatattttctaggtcattgttaatatgttgtaaatcagtagaaaaggagacatataaatttaatcaagattttgtaattattccaaggaatatgaccttatattcttttctttgtagagacacttttgctacattgcccaggctgatctccgaactcatgggctcaaatgatctacctgcctcagcctccctaagtgctgagattgcaagcatgagtccctacaccctgctgatcttatattcatattgttgtaaaacaaccttttgtgaatcagttataaaaagcaacataattaaatggttaattatgtacttataataaatagcaaatatgtacttatggcttggaataaaatttctggtaagcagcacatacaaaattaaaaataattatctctcaatttggacagaacagaagataatatactctggaaatatgtgtaagaaggctcaaaaaaatgggaccggt

SEQ ID NO: 48126 - DNA, 663 bp, Homo sapiens
tgctgttccgcaaaggctctgaaacattcccttacctggaatactttaccaccagacatacacatggcagaccccttatgctttctccccatcaaattgacagtaaatacctaaaaaagggtataaacacaaggacaaagggatcagaaaaagcaacaatagtgaacaagagataatcatgaacatctggaatgcagaggcagatagggtgtaagctccagaagatgggaattttgttcacctcattcaaagtatcctgcatttggcatatagtagtcatcatttttgtggataaatgaatagctatacccatgtgaataaactatatcttagcaattcatcccttacaaatgaattcaaagttacagaagttcttctggatggaatatatgaaaaggcagaattaaaacaatcatgttttgtttactaagctgtcaaagagacacttttgctacattgcccaggctgatctccgaactcatgggctcaaatgatctacctgcctcagcctccctaagtgctgagattgcaagcatgagtccctacaccctgctgatcttatattcatattgttgtaaaacaaccttttgtgaatcagttataaaaagcaacataattaaatggttaattatgtacttataataaatagcaaatatgtactta

SEQ ID NO: 48127 - DNA, 734 bp, Homo sapiens
tgctgttccgcaaaggctctgaaacattcccttacctggaatactttaccaccagacatacacatggcagaccccttatgctttctccccatcaaattgacagtaaatacctaaaaaagggtataaacacaaggacaaagggatcagaaaaagcaacaatagtgaacaagagataatcatgaacatctggaatgcagaggcagatagaaaaattattagggaagacactaaatgagtctttcgactttgaagaaaagcaagtggacttgaattccatgggtgtaagctccagaagatgggaattttgttcacctcattcaaagtatcctgcatttggcatatagtagtcatcatttttgtggataaatgaatagctatacccatgtgaataaactatatcttagcaattcatcccttacaaatgaattcaaagttacagaagttcttctggatggaatatatgaaaaggcagaattaaaacaatcatgttttgtttactaagctgtcaaagagacacttttgctacattgcccaggctgatctccgaactcatgggctcaaatgatctacctgcctcagcctccctaagtgctgagattgcaagcatgagtccctacaccctgctgatcttatattcatattgttgtaaaacaaccttttgtgaatcagttataaaaagcaacataattaaatggttaattatgtacttataataaatagcaaatatgtactta

SEQ ID NO: 48128 - DNA, 335 bp, Homo sapiens
tttctgacgtcacttcctacttaacttggctctagccacattcgctcccctgctgttccgcaaaggctctgaaacattcccttacctggaatactttaccaccagacatacacatggcagaccccttatgctttctcgtgagtagtcttctctcctaaactacattgttagtcatgtattgtattaagatgtttgggtataactatacattctgtaaataccaagtccctgtatctgtcttagtgcctagaacagatccaaggacacagtagataagacttaaggactacctgataaattaatgaataaatctgctgccatttcatccaaataca

SEQ ID NO: 48129 - DNA, 736 bp, Homo sapiens
gaaaacaggactagaccaatgctgaccaaaagaagggttccacatacatgatgtgtagtgtggtcattctgagtgtctcatccatcctgaccaggtggggacctgccagacagaattccgagaggaatccctggctgcatccaacagcgaagcgtggctgtgcttcctgattgggcatcgtgtgctctgcgcccactccctacctgcttagaaggccccttggtgctgggtttgaatgtgggccatggacccccaggaaggccctggggccttctaaccgcccatggacacctacgcagaagaacaaagtggagaaattaaggactggggcagctgtcataattcatgtgttctgttctctctccagacatccaagaaaaagccagtgactgttcctgagggcgcctgttaagagctggctttttggctgtggtgaccagtcagtcacgaccactcttccgagagcaacaccaagtggaaaccccgccaagtgggcttttcaggaaccctctcaccacccaaggcctttggatcttatatctaacaaattacatgttacattattttttaaaaaacaggttagtgacaactaagatagtctctccagaattagagtctgatgtcagattcagaaaatcccccgttccttgggaattcccatgtcactcattctgcattaatgatatttattctctctcattgttttattcttaaaaaatagctcccctggttgcaa

SEQ ID NO: 48130 - DNA, 297 bp, Homo sapiens
atatacatttagtcatagaaatgtgtgtccttacttacattaaacaaccttacgactctgtcccatgcagtctatgctgcaatgggatgtgcatgtcttgctttggtatatttactacaaaatcttagtctctgtttccatatatttcaaagttttgtccaggcattttcaactagggatgtgagaggtcaaggagaatgggcatgatttttaggaaagagcatccaaatttctaggatgaagaaagggacttttaaaagtatattaaatatgattatattgtgtttaaaaaataaa

SEQ ID NO: 48131 - DNA, 823 bp, Homo sapiens
  misc_feature (633)..(633): n is a, c, g, or t
  misc_feature (686)..(686): n is a, c, g, or t
  misc_feature (699)..(699): n is a, c, g, or t
agcggggtttccgggatttggcggcgcctttgtctctcgctgcagccggagctccaggtctcgctttcactgctctgtgtcctctgctcctagaggtccagcctctgtgggcctgtgacctgcagaaattgagagatccacagctaagactccaggaccccctggaagcctagaaatgggactgttgacatttagggatgtggccatagaattctctctggaagaatggcaatgcctggacactgcacagcggaatttatataaaaatgtgattttagagaactacagaaacctggtcttcctgggtattgctgtctctaagcaagacctgatcacctgtctggagcaagaaaaagagcctttgactgtgaagagacatgagatggtgaatgaacccccagtaatgtgttctcattttgcccaagagttttggccagagcagaacataaaagattcttttgaaaaagtgacactgagaagatatgaaaaatgtggaaatgataattttcagttaaaaggctgtaaaagtgtggatgaatgtaaggtgcacaagggaggttataatggacttaaccaatgtttaccaactatgcagagcaaaatgtttcaatgtgataaatatgtgaaagtctnttaataaattttcacattccagatagacataagataaaaatatggaaaataanctttcaatgtaanaaaaaaaaaaaaaactggggatctatgtggggggggggaaaggggtttggaggggcatggtcatggggttcggcccggttttggtcagggggaacgggggcccaaggggggaaaatgagccgta

SEQ ID NO: 48132 - DNA, 969 bp, Homo sapiens
agcggggtttccgggatttggcggcgcctttgtctctcgctgcagccggagctccaggtctcgctttcactgctctgtgtcctctgctcctagaggtccagcctctgtgggcctgtgacctgcagaaattgagagatccacagctaagactccaggaccccctggaagcctagaaatgggactgttgacatttagggatgtggccatagaattctctctggaagaatggcaatgcctggacactgcacagcggaatttatataaaaatgtgattttagagaactacagaaacctggtcttcctgggtattgctgtctctaagcaagacctgatcacctgtctggagcaagaaaaagagcctttgactgtgaagagacatgagatggtgaatgaacccccagagtctcgccctgtcgtccagcctgaagttcagtggtacaatctctgcttactgcaacctccacctcccaggttcaagtgattctcctgtctcaccctcctgagtagctgggactataggcacatgccaccatgcctggctaattttgtacttttagtagagatggggtttcaccatgttggccaagctggtcttgaactcctgacctcgtgatccatcttccttggctcccaaagttctggtacaggtgtgagccacagagcctggcccaaaatgtcttgttttgggtgttctttcactttcgagatggagtttgcgcctggttccaggctggagtgcctggtgcatcctgatctctccaactctggctactgggttaaggatttctatttcacctcctggtttttgggtcccgggtggccccccccgggggattttgcgcgttgaaaacgggtgcccggtgcgcgtggtgtaccgcatgtggttgcgcgccccttgtgggagcagggcggctctgcgcccatgggacggcgcgagaaagttcatgtggaagagttgcgtcgtgcaac

SEQ ID NO: 48133 - DNA, 243 bp, Homo sapiens
ggactgttgacatttagggatgtggccatagaattctctctggaagaatggcaatgcctggacactgcacagcggaatttatataaaaatgtgattttagagaactacagaaacctggtcttcctgggtaaggataacttaaacacacagtttctttttttttttgtttttcttttgagacggagtctggctctgtcaccaggctagagtgcagtggtgcgatcttggctcactgcaacctcc

SEQ ID NO: 48134 - DNA, 482 bp, Homo sapiens
agcggggtttccgggatttggcggcgcctttgtctctcgctgcagccggagctccaggtctcgctttcactgctctgtgtcctctgctcctagaggtccagcctctgtgggcctgtgacctgcagaaattgagagatccacagctaagactccaggaccccctggaagcctagaaatgggactgttgacatttagggatgtggccatagaattctctctggaagaatggcaatgcctggacactgcacagcggaatttatataaaaatgtgattttagagaactacagaaacctggtcttcctgggtattgctgtctctaagcaagacctgatcacctgtctggagcaagaaaaagagcctttgactgtgaagagacatgagatggtgaatgaacccccagatctgtgggacagacccagcaggtggtgccccatgtaagaagcaatgaaatgcatcatgatggaaccctcaaaaacgaaag

SEQ ID NO: 48135 - DNA, 309 bp, Homo sapiens
ccctcaccacacctgtagttgcatcccaaggaagtgcccttcctagaattcttacccttggaccaagggccactgtttgagatgtggatatgctgtctccctctgtgaccctgggaaggtccctcctcattctagacctcagtttcctcatctttaaaccaaggagcacaaatgatatgagagtcaggctttccagacttaatattcattgcttctgattggcctttcaggttaaagctccgtatgtggcctgggaatggtagttggctttctgccttggtcctcaacccaaagagatgctggcgtctg

SEQ ID NO: 48136 - DNA, 105 bp, Homo sapiens
cgcaatggactctgcttgaattccctgcctcaaggatggaattctgggctttcctcaaggccagctgctgcatcaccacctcctcccaaaactgccctgatcaag

SEQ ID NO: 48137 - DNA, 604 bp, Homo sapiens
ggaagagtctcttggcattcttgaatcaagcatatttcttaacctcactgaggctcagtttcctcttatataatatggggtaaagagccctcaccctgcctgccacacactggtagtgtcagataacattgaagggtgttagtttaaaggcttcatggactctataatgtcaacaaaagtgctgttaactttcttctgggtctcaggctcctgatgtagagtcagtggagcaaccctgccatctgctgttatgctgttgatgttgctgccacacttactaacctaaacctttgattctggctgtggccttctccagaaggtgtttactcatttgtccattttatcttttaggaaacagccagcccgtagatcattaaggctggctattggacagggggctggggcctgcctgacagaggaaggaagggcagacatctggttcttcctctacccctacaagagactccagcctgacacagagtggtactcctaggatgtagcagcagcatatgagcttgaatgtgccttaatcctgctctttactttgagaagagagaactaaggacccacagatgtttcacagcttctataggaggcagaggta

SEQ ID NO: 48138 - DNA, 252 bp, Homo sapiens
ccatggggccaagagctctggaagcctggccggaaagaccaaggttcatgcagcccaacaaatgattgttgagcacctctcggagccaaagtccttaggcgagtgtggtgacttcctggaaggaggatgcagacttccagagagcccccccaacggacgtgctgagaagggagagggaggcgggggctgtagtcaggaaggagccagagaagaacagggtttgggtgcatccagaaatatgcctgcagtagg

SEQ ID NO: 48139 - DNA, 490 bp, Homo sapiens
tgccattcacctgcctgtgtttggactgttctcactttgtgtattaaagcttccttaagctacatgtttctgagcctcagtctcccaatctttattgcatttttcctaatgcttgtcagtcaacttaatctgaattctaatttctatatattgtgttccaatctctagctctccttttctaaaaaatgggcactttccaatgtaatgtttagtgtattaaaaaatattaacttggccaggtgcggtggctcacacctgtaattgcagcactttgggaggccaaggtgggcggatgacttgaggtcaggagttccagaacagcctggccaacatggtgaaaccctgtctctactaaaaatacagaaattagctgggcatggtggtgggcacctgtaatcccagctactcaggaggctgagtcaggagaatcacttgaaccaggaggcggaggttgcagtgagcctcggcaagagagcaagactttgtctca

SEQ ID NO: 48140 - DNA, 438 bp, Homo sapiens
ctctgttgcccaggctgctcttgaactcctggactcaagtgacccttcctcctcggcttcccaaagtgctgagatgaaaggcgtgagccaccgcacctggcctggagctgcctttaaagctgacccagaacctccaccatgcctgtccccacactggtctgagtccctggcctcatgcactggaatccacacaccagcctgtctggtctctctgcttccacccttcttcccatagcagcacgtgcggtcctgttagacacgaaaccagacatgggtcccctctgcccagaccctccgccggcatgaatatcttgctcagagtgaatacctgagtccttgtgtggtctctgcattcctgtgtgatctgtcccctcctctagcacctcccgccccctttttttcctcctctgccctttgctcactcagctgcagccacac

SEQ ID NO: 48141 - DNA, 356 bp, Homo sapiens
aacacctaggcagtgttttacaaagtatatgcatcaaccatgcatcagaatcacctgagatacactacaaactactacacagccataaaaaaaaatgaaatcacgtccttttcagcaacgtagacatagctggaggccattatcctaagtgaattaatgcagggacaaaaccaaataccacatgtacatctcacttagagctaaacactgggtacacgtgaacatacttatgggaacaaacactggtgactactagaggggagacaggaggaggggaacaagggctgaaaatctatctactgagtactatgcttgccacctgggtgacaggctcactcgtaccccaaacctcagag

SEQ ID NO: 48142 - DNA, 279 bp, Homo sapiens
aaaattaaaaaataaaaaatgctttaaattaaaaaaagaaagaaaattagggtgtttctgaccagatgacagggcagcagatgcaaaaatcattgtggtgtggcagcaggagcatcacaatttggaccagatcatctgcgtgtccttgaacaaggtgctgtcacttctctgagccttggtttccccatgagtcaaaggaagcaagtaaactccagctgatgagactgtgtatggcaagaatgtcgcatgtgctcagggcagggtcagtgctcaataaaa

SEQ ID NO: 48143 - DNA, 126 bp, Homo sapiens
tgattgtcctgaagaatcagagaggagtactcagggtgttgcaagtcctgattaggcagaggcattaatcacatttcatgcatctccaatcatcatgttctatctgccctccaaaacgaggaacag

SEQ ID NO: 48144 - DNA, 884 bp, Homo sapiens
ttaaaaaaatcttcaatcacctgacacctgctaagggaaacagaggcattcctttgttccttgaaagtaatcatccctttcttcttacttcctgctatggtttgaatatttgtccctttccaaaacacatggtgaaacttaattcccaatgtggcagtactgagaggtgaagcctttaagaggtgattggatcaggagggctctgctctcatgaatggattaatccattaatggattaatgggttatcatgggattggaactggtggctttataagaagaggaagagagacctgagctaacacattcagctccctctggcatgtgatgctctgtgctgcctagggactctggcagagagtccccactgggcaagaagggtcctcactagatgcagccccttgaacctgggacttcttatactccataactgtaaggaaataaattccttttcataataaattacccagtttcaggtattcagttataaccaagagaaaacagactaagacacttccagatacttttcttctaggttttcttcaaggctttcaaaatctttaccagatttacttctcaaacaccctcccctatgcctgagttttctgtatcttccaggttgtgctctggtattataggacaatgattacttcgggtaattcaatcatagtccacttactcaacaatctcattgatttcccatagcttgacaagattcacgtgtataactctcaccacccttcctatgggtctatacttctatttccaattgcccactggatgtcataacctgaatgtcccctatgaaactcaaatcaacatataatcacaacctgaatccatggtccttcttacccttggtcttttatttttttatttttttcac

SEQ ID NO: 48145 - DNA, 402 bp, Homo sapiens
ttaacttacacatacacacatgcgtgcacacaacaacacttaatgcttttggacccaaaatatcttcaaactaccatattattactctccttgatttcactgccaaatttatgttaggaagcatctgtaaggggttcacagtgaccagtcctgtaatcccagcacttaaggccgtggcaagtggatcagttgagcccgggagtttgagatgagccttggcaacatggcgaaaccctgtctctacaaaaagtagaaaaattggctaggtgcggtagtgcatgcctgtagtcccagctactctggaggcagaggtgggaggatcacataagcccagagaggtcaaggctgcagtgagctgtgattgcaccactgcacaccagcctgggtgacagaatgagacac

SEQ ID NO: 48146 - DNA, 257 bp, Homo sapiens
caaaagacttgagagaataggccaagtgaagaccaaactgagttggtctagttggggctggagctaagtaactaaaccacagagattggttttgcttgctgggggtatagaggggattttcaggaaagtaagaggtaggctgggcatggtggctcatgcctgtaatcccagcactttaggaggccaaggcaggtagattgcttgtgcccagcagttcaagaccagcctggggcaactggcaaaaccttgtctctaca

SEQ ID NO: 48147 - DNA, 335 bp, Homo sapiens
aatagttatactctttcatcaaacatgtgttcagagccagtgaagtgctggtcagcctaacagaattggaggcaggaaagtatgatttagctgtgtgcccagaaagaaaatgaaacagatttggctgaatacttattaatctctgcctcaacaactaggattatattcccatttcataggaaatggaggcactgagagaatgagtaacaagcctaaggccacataggtagaaaaaatgatataatcataatgtagttgtgtttcaaactcagtcctgttcagttcaataaacatttgtccagtcctcattctatgatatgtcctgtgaattggca

SEQ ID NO: 48148 - DNA, 426 bp, Homo sapiens
ctctgagcctttgaacacttgccgtttctattcctcacagcagccctttcagacggaacgggtgttaccagattaggaggagagtggccactgtattctcagtgcccagcccagggaggcagatctgagtggagttgctaatgaaacatggaaggtgcttgagagctaactggaagggagggaaggtgtgcattcctgcaccagggcctttgcatgtacttgttactttctcctgctggccagctggagtgtctggaaagatctgccttactcagggaagccttctcactcgcactctgcccagttaggaccactgccctctagagaccctatagaattacagaggaggccgggcgtgatagctcacacctggaatcccagcactccagcctgggcgacagagtgagactccatctcaaaaaaaaa

SEQ ID NO: 48149 - DNA, 461 bp, Homo sapiens
ctaagcctttgatccaggctggaggccctgaaactgggattgataggatgggcttattactgtggccctgaactgaagcccagttgagggcggcctgggaagcaaggcatgaacacagccttgataaacaaaatgagtaaaggatgcacagttaagagccaaaaagagaatagcctgaacgtgtagaaggaaactaaagctacaagggagttaaaagctggttgaagtgagtgttttgggggttttctgtgaattaataattttgaagaggaaacagccctggtgcgtggggcacattttcgtagagaacacaaagaaaagaaaacctctttggtacatattttctttcagtatttttgggcaaggagaatgatgtactttttactgacaagagtataactaaagttgccattaacagaaataaagcccagttatcataaaggaactgaagtccaagatta

SEQ ID NO: 48150 - DNA, 470 bp, Homo sapiens
gtacaatgccttagttaaattgacacataaaattaaccaattaagtgattaatttcagtgggaagattcagcattctcgtaaatgaaattagctataaaaaattgaaattattataaggaatagtcacaagttataaaagaaacattcattgctatggccaggaatatattgctatattggaatctttaagggcagaatggaaaaaaaatgaaagcatatgaacaattattacataacatataaattaggaaattttaaaggagaaatgatcagaatttaggaaagtattcttaaaggatgtgaattttgataaaaatttgaagaaagtatgcatgctgtgcatatatggagttggcagagaagcctgataagtagagtaccacaggccttatgagaggcttggggaaggaaggacagggagaaactggcaaagagcgttgcatatacattttaaatttgtttagctgga

SEQ ID NO: 48151 - DNA, 564 bp, Homo sapiens
ggagtgaaaatcgatgtcatatgtaaactagaataacatgtcagtaacttttaaaaacatagctaacactcacttattcattcaagggagggcttctggctcatcagctattttaggtttctttacatttgctttgaaaagctttctgtggctctttatagctgttttacccaatcagttcctttttacttaggataatctcaagatgggctgcagtctgtgcagacacacaggctgagcagtgaaggggtgtgagctggggatgtgctgagctgcctagcagatccctgggacttagggtaagccttagagagcctcagttatttcgttgcacactggaaattgagagctgactgtatattgtatgccagcattttaagtatcgtaatctctcaatcattcatgctaatgaagggtagctagagataacaaagaaaagtgtaatcaccaaatcatttctttgcatcttcagccagagctgtgatctctttgggttccgccttgagtcctcatgtccattagcccagtctccagaataatacatagtaggtgttaaaaaaaaaa

SEQ ID NO: 48152 - DNA, 644 bp, Homo sapiens
tgagacagaaaaaaggagactgagaagacaaggctggaattccatagctcctatagatccagggtcgctcaccctctggtgtgcctcagagcagtcactctagtggacgtgcagggagaggaataccacatggtgtggcagcaaagcaaggagcccggcaccaccaggccgctccgtggtgctggtagcaggtgctgcatgtttataccaaggtactgtgaagcttccctggaaggggtctttctcgacatctggtggccaagctgaaagtggattaccatttggacatctcataactaaaagatgatgagccagcggggcctctgcacagctttctgcacgatgaccctgcaaaggtacagctgtgccctgcccctggccttctgcagctggcccatctgcagcttctgctgagtggccacatgggtggatgctaagtcttcaacagctaagttcaaagtgaaccctgcatgcccccactgtgtgttgatctcccctgatccaaaataatgagagaatgaggggggtgcagaaactatccaaaacattaatagacatttaaggagccctgtgccgctctctttttcatccccttcttggtaattgtcccatgaatttagaggcccctgaagggaattgccttt

SEQ ID NO: 48153 - DNA, 403 bp, Homo sapiens
aatgcataagaatgatacattggactttggggactcaagggaaaggatgggggacagcaaaggataaaagactgcacattgggtgcagtgtatacttctcagttgatgagtgcaccagaatctcagaaattaccactaaataacttactcatgtaaccaaacaccacctgttccccaaaaacctattgaaataaaaaaaaattttttaaaagaatttgttcctttcctttttttaattacatgtaaaactaggtttatggccatggggcatctgtgactcctcctctttttctttagagatgatcttctcattttttattctgatatgttatttcctctagcggcaacttatgttagtgaatggcttttctgtaagacccatggcagatacatattttttttt

SEQ ID NO: 48154 - DNA, 347 bp, Homo sapiens
gccctgcaatgtattctctcttgctttctacccacgggacagaacttatttgggactcatgcatgtgcagcctggaaacatgtggagctgacacctgtgggctgcctttacaaatggatgccaacagagaaatgcttcccccttttactcaaggtacagatggtgttgagatgcatttcataagcttcttctgaagtccttgctggatggagcatccctgcctttggtgctagtcaacctgaaaatgcatctttgtattcagcctccctccttccctgttctcctcctgtcctttattgctgctccctggaatcttgtccccaaagcataaactgcttaactgcaca

SEQ ID NO: 48155 - DNA, 390 bp, Homo sapiens
tcaggtgtgaagccagaaagacctgctgaagcacgtggctgcaagcctgagagagcgaagcccagggaccctgagtcagttcacacacgagggctcgtgcgcaaggtccttgtcaaatgccacctacacctggggccaccctcattgaaatgtcactcccagcccctcaattcccacttgctagttgcctactctactgtatattctagtttcttgtttattgtctgtttccccctaatgtaagctccctgagggcaggaaagatgtctgctctgttgtctgccccagtgccagccctcagtgctaagcgaataagggcaagtcagtcagtgggaaactgctggcaccgggcaggccctgcctgagtgccatctgtcctttttattgttg

SEQ ID NO: 48156 - DNA, 352 bp, Homo sapiens
aaaaaatttaaaacacagagaaaccaaaaaaattaaaagaatttaaaaatacgaaaaggtatacagcaaaaaagtctccttcccctcttcctttagtcttctagctttctcttctggaagaaaccactgttaccaatttcttatgtattctcctatgtaatcactcttaaacatctgaacatttgggatgaatctggcaaaagagaaaataacttatatttgcttagctattttctgaggatgctagatgactactcttataatatgtctaaatatattattatttttattttgttgaggcagagtctcaatcatcactccaccctgggtgatagagtgacaccctgtctca

SEQ ID NO: 48157 - DNA, 674 bp, Homo sapiens
ccccctcgagggcccaataattcgggccaccgaggtagggagtcagatgtttgatggatattgactcctacaaagcaatactaaacagtacaactttcagaatgaccatttaacacctagacagtatttctattcctgctttccagaatgtaattttttttaagcatccatagggtgggtcacattgataatcactgtaactaatactttgtcagcaatcctagtgcctaaatgtgtataactgcattttttaacctaaatgtaagacttgatacttcaactttttggtttaggcccagcagtttgggtattccacgtggttaatcattttaaagcttgtttcaatatagtcttccaaccagactttccaatttgtgtcacttacagatttggcactaccaccatctggtctgtatgtaatcctttacagtttgcaaggcacttttacatccattatatttaatttgattcttacaaccaacttgtgagataggcaagatgtgaagtcgatattttatagacaaagcagctgaagcataataggagcttaactggtgggatccatttatccattttctcttccatggagcatcttgttgtattcatccaaatccttgacagaaatgttgaagaggacctctagaggctaagcttatcctgaattcttaaatagc

SEQ ID NO: 48158 - DNA, 352 bp, Homo sapiens
aaactttccaaatcttacaactgaagatttttaagcaatttctgttttgcacttaaattggctctgggcagggtaaaacacacacatacacacacacacacacactttggttaaacacgtggaaataagctatgggtgtagcagactatcaaggccttgtcactttaaacattcaaacgatagattttcctttgttctaattgcattgtcaccaggcaaccttttgattattttcattcctattagatttggctacagagagcaaccatttctggccacagagatgtgggtttctgatcggtttgacaattacatgtacattttttgtatattactaaattgatcaatttta

SEQ ID NO: 48159 - DNA, 432 bp, Homo sapiens
ctatctccagtgataatgtgctggtgatgactaattaggtgcaccatcgttcggagactcagtaaagactacaaatgaaaaaacatagtcgatcaaggcatgattcacactcaaaggactcttgaaacaagcaaagaactttgttgtttagtctggcaaacatttcactttgaaaataatcataaatgaaaaccatgctccctgaatcttccagctatctatgtgaaatgctcttaatttcataggtggttggtaagggaccaattactttcgacatgtgaatgaaatgacatcatctttgccaaacaatgtgcagtgaaatgagagaccaccttccttatggcatgtttcatatgttctctctctctctctctctctctacaaattggcccatgagtattccttcactttctcattataacaaaaaaaaaa

SEQ ID NO: 48160 - DNA, 875 bp, Homo sapiens
acatttactgtactacagggaatctctcatttcaaaatgacctgtgttgcagttattgtttataaaactgttcatttatctgacgtaaggggctaatcaaactgcttaagtacattcctggatgtttggaagatttttaagcgccatagagagggtacttatgctatggaaattgtgtttatatatatatgcataattgccactgaaattctgaacagacccaaaggaagaaaaatactgtgatttaaataaagctaacataattaatttatatctattttatatttgacttagtgggataaattgttttgtggaaaaccatattataaaatagtctaagttttttatagttgaggaagaatttgaggtgaaagatcatgttaattgtaacaattgcccagtactttgtgttcactatgtgtctggcactgatttatgtttattaatttactacatcctcagaacaattcagtgaagtaggtattactaatattcttactttgagattatgaaaccgaggctcaggtagtttaaataaatttgccatgtcacacgcagtggctcatgcctgttataaccaacactttgggatgctgaggcaggaggattgcttgaggccaggagttggagcccactctggggaaaacatgttgagatcttgcctctgcaaaaataaagtaaaataaaatttaaaaaaagtaaaaaaataaaatcagctgagcatggtgacatgcacctgtggtaccagctactttggaggctaagttgagaggcagtgatgggaggatcatttgacggcccagaggttgaggctgcagtgagctgtgtttgtgtcattgcactccagcctgggtaacagagtaaaaccttctgtc

SEQ ID NO: 48161 - DNA, 326 bp, Homo sapiens
aaaccaataaaattgaagacagtaaaactaaagaaaatcaatgaaattaaaagatggtcctttgaaaaagagagaagacataaatcagcagcctcacggatgaaaacggggtgtcactataggctctacgagcattaaaggatagtgagtagtgagtattatgaacaactctaaataaatacattgtaaaatcaatttgacaacttagaagaaatcatggaccaattccttgagaaacacggcctctcactgtattagctttctattgctgctatgctaacaaattaccatgagctttatgccttaaaacattcccagtcaatttt

SEQ ID NO: 48162 - DNA, 713 bp, Homo sapiens
gctagatggttagtgcggctctctggaggacttcctttcgagtcagggactgacgcggcgtattttcgtggctacgactggatattctgcgcagaagagggtccttgagagcgctggccgtgccgtgccgccaaacactcctcaccaccgaatgtgggaaacgtcttccttggagtctagcactccctgcccgccccggatggaatttggttttctgcgcagggtcgccccttggagcccgtttccaaatgattttaagagggaagggaatctagggaggccgattccaggggcgagggtggaaaacccaggccgggcagccgaggagcggcgtgggcactagaagcggctcgccgcttcctactgtgagaggcggaaagcgaagccccggggtgtgccggggcactcggaatgtagacaagtttggtgcccagcgaaaggaagaggtgtggactgaaagtacgaacttgggaagtcatcaacagtagctggtggctggcatcagtggagtgagttgagtctttcagagccatggtctccaaactcgagaatgcaaacctctgagagtgttgcggccaggaacgttttcaggacaccagtgtttatcctatatcctaaaatgttgcctaacgataatacactcttctcccgctttacacaagaacggcgcacccctcgccaatcctcagtctaatcttactgtgatgtgtcca

SEQ ID NO: 48163 - DNA, 446 bp, Homo sapiens
ttccaataaagagagatagggaaaaaaaaaaaaaaaaaaaaaaacactgctttttagagactacattatgtgcctgaaatagcaatattaatggtccggattggcgacttcatttcaacttatgtttaaggggttcttgataatctgacatgataagtggtgttggaattggcattaaaatccaccatgttctacaacacttcatccttcttcggcaggcaccaatttgatcttctactactttgcagacatctcttctgcaaacaccagacaaattgagacaatgaccttccacaggacccaaatcacctcttactgcaggaaagaagatccagtgagaaaattagtccacaaatggaatgtaaatccataaacactcttaagtaacagaataaatttagtatgaacgtttttatgtgggagctcttgaaatggttgctgctcat

SEQ ID NO: 48164 - DNA, 1412 bp, Homo sapiens
agtttcccagctgaattcaaactcattcccagatcacttgtcctcctcaattgatgtacactgaagaaagagccaccttcaggctgtaaggtcatcgtataatcctgaccactcatttcccatcatgacactgctgttccttctctttctccttcttggatgtctgatacaaacagcctcagcttttcttagtgcctaaagtgtctgcaagtggaaatccagaggaagacagagagaaactgagttcctgacaatgcattcactaaagaaactgacttttgaagatgtagctattgacttcacccaggaagagtgggccatgatggacacatccaagagaaagctgtacagagatgtgatgctggaaaatatcagtcacctggtgtccctcgggtaccagataagcaaagcctatataattttgcagctggagcaaggaaaagagctgtggagggaaggaagagtatttcttcaagaccagaatccaaacagggaaagtgcccttaagaaaacacacatgatatccatgcatcctatcaccagaaaagacgcatccaccagtatgacaatggagaactctctcattctggaggatccttttgaatgtaatgattcgggagaagattgcactcgcagttccacaataactcagtgtttgttaactcatagtggaaagaaaccctatgtcagcaaacagtgtggaaaatcccttcgtaatcttttgtccactgaaccacataaacaaattcatactaaaggaaatcccacttccaactggatgtctggatgaactactgaaagctgctgagtgtcctgcagcaggccatttccaatccagcggaagaccttctagaagagatgatggtgggagagtgctgacatactatgtgaagctactatttggagttggacacgagtgcatgtgtccttgtgccacaacgggaatgtgagctggatgacaaatggagatttggacttgtgataattggcctctgtgtcattgtgtggaagactgactggtccctttatttcctgtagcttgactacaacacaaatgaatccactcaaatgttggcaagtggagcagagtcccagaacagtctgcaatctctacaggtacagaaacacccccagttcaaggatcttcacacctggatttaggcctactcctgcaactaccccaggcaccaatttgatcttctactactttgcagacatctcttctgcaaacaccagacaaattgagacaatgaccttccacaggacccaaatcacctcttactgcaggaaagaagatccagtgagaaaattagtccacaaatggaatgtaaatccataaacactcttaagtaacagaataaatttagtatgaacgtttttatgtgggagctcttgaaatggttgctgctcat

SEQ ID NO: 48165 - DNA, 1522 bp, Homo sapiens
agtttcccagctgaattcaaactcattcccagatcacttgtcctcctcaattgatgtacactgaagaaagagccaccttcaggctgtaaggtcatcgtataatcctgaccactcatttcccatcatgacactgctgttccttctctttctccttcttggatgtctgatacaaacagcctcagcttttcttagtgcctaaagtgtctgcaagtggaaatccagaggaagacagagagaaactgagttcctgacaatgcattcactaaagaaactgacttttgaagatgtagctattgacttcacccaggaagagtgggccatgatggacacatccaagagaaagctgtacagagatgtgatgctggaaaatatcagtcacctggtgtccctcgggtaccagataagcaaagcctatataattttgcagctggagcaaggaaaagagctgtggagggaaggaagagtatttcttcaagaccagaatccaaacagggaaagtgcccttaagaaaacacacatgatatccatgcatcctatcaccagaaaagacgcatccaccagtatgacaatggagaactctctcattctggaggatccttttgaatgtaatgattcgggagaagattgcactcgcagttccacaataactcagtgtttgttaactcatagtggaaagaaaccctatgtcagcaaacagtgtggaaaatcccttcgtaatcttttgtccactgaaccacataaacaaattcatactaaaggaaatcccacttccaactggatgtctggatgaactactgaaagctgctgagtgtcctgcagcaggccatttccaatccagcggaagaccttctagaagagatgatggtgggagagtgctgacatactatgtgaagctactatttggagttggacacgagtgcatgtgtccttgtgccacaacgggaatgtgagctggatgacaaatggagatttggacttgtgataattggcctctgtgtcattgtgtggaagactgactggtccctttatttcctgtagcttgactacaacacaaatgaatccactcaaatgttggcaagtggagcagagtcccagaacagtctgcaatctctacaggtacagaaacacccccagttcaaggatcttcacacctggatttaggcctactcctgcaactaccccagttcatttcaacttatgtttaaggggttcttgataatctgacatgataagtggtgttggaattggcattaaaatccaccatgttctacaacacttcatccttcttcggcaggcaccaatttgatcttctactactttgcagacatctcttctgcaaacaccagacaaattgagacaatgaccttccacaggacccaaatcacctcttactgcaggaaagaagatccagtgagaaaattagtccacaaatggaatgtaaatccataaacactcttaagtaacagaataaatttagtatgaacgtttttatgtgggagctcttgaaatggttgctgctcat

SEQ ID NO: 48166 - DNA, 1320 bp, Homo sapiens
agtttcccagctgaattcaaactcattcccagatcacttgtcctcctcaattgatgtacactgaagaaagagccaccttcaggctgtaaggtcatcgtataatcctgaccactcatttcccatcatgacactgctgttccttctctttctccttcttggatgtctgatacaaacagcctcagcttttcttagtgcctaaagtgtctgcaagtggaaatccagaggaagacagagagaaactgagttcctgacaatgcattcactaaagaaactgacttttgaagatgtagctattgacttcacccaggaagagtgggccatgatggacacatccaagagaaagctgtacagagatgtgatgctggaaaatatcagtcacctggtgtccctcgggtaccagataagcaaagcctatataattttgcagctggagcaaggaaaagagctgtggagggaaggaagagtatttcttcaagaccagaatccaaacagggaaagtgcccttaagaaaacacacatgatatccatgcatcctatcaccagaaaagacgcatccaccagtatgacaatggagaactctctcattctggaggatccttttgaatgtaatgattcgggagaagattgcactcgcagttccacaataactcagtgtttgttaactcatagtggaaagaaaccctatgtcagcaaacagtgtggaaaatcccttcgtaatcttttgtccactgaaccacataaacaaattcatactaaaggaaatcccacttccaactggatgtctggatgaactactgaaagctgctgagtgtcctgcagcaggccatttccaatccagcggaagaccttctagaagagatgatggtgggagagtgctgacatactatgtgaagctactatttggagttggacacgagtgcatgtgtccttgtgccacaacgggaatcttgactacaacacaaatgaatccactcaaatgttggcaagtggagcagagtcccagaacagtctgcaatctctacaggtacagaaacacccccagttcaaggatcttcacacctggatttaggcctactcctgcaactaccccaggcaccaatttgatcttctactactttgcagacatctcttctgcaaacaccagacaaattgagacaatgaccttccacaggacccaaatcacctcttactgcaggaaagaagatccagtgagaaaattagtccacaaatggaatgtaaatccataaacactcttaagtaacagaataaatttagtatgaacgtttttatgtgggagctcttgaaatggttgctgctcat

SEQ ID NO: 48167 - DNA, 1285 bp, Homo sapiens
agtttcccagctgaattcaaactcattcccagatcacttgtcctcctcaattgatgtacactgaagaaagagccaccttcaggctgtaaggtcatcgtataatcctgaccactcatttcccatcatgacactgctgttccttctctttctccttcttggatgtctgatacaaacagcctcagcttttcttagtgcctaaagtgtctgcaagtggaaatccagaggaagacagagagaaactgagttcctgacaatgcattcactaggtaccagataagcaaagcctatataattttgcagctggagcaaggaaaagagctgtggagggaaggaagagtatttcttcaagaccagaatccaaacagggaaagtgcccttaagaaaacacacatgatatccatgcatcctatcaccagaaaagacgcatccaccagtatgacaatggagaactctctcattctggaggatccttttgaatgtaatgattcgggagaagattgcactcgcagttccacaataactcagtgtttgttaactcatagtggaaagaaaccctatgtcagcaaacagtgtggaaaatcccttcgtaatcttttgtccactgaaccacataaacaaattcatactaaaggaaatcccacttccaactggatgtctggatgaactactgaaagctgctgagtgtcctgcagcaggccatttccaatccagcggaagaccttctagaagagatgatggtgggagagtgctgacatactatgtgaagctactatttggagttggacacgagtgcatgtgtccttgtgccacaacgggaatgtgagctggatgacaaatggagatttggacttgtgataattggcctctgtgtcattgtgtggaagactgactggtccctttatttcctgtagcttgactacaacacaaatgaatccactcaaatgttggcaagtggagcagagtcccagaacagtctgcaatctctacaggtacagaaacacccccagttcaaggatcttcacacctggatttaggcctactcctgcaactaccccaggcaccaatttgatcttctactactttgcagacatctcttctgcaaacaccagacaaattgagacaatgaccttccacaggacccaaatcacctcttactgcaggaaagaagatccagtgagaaaattagtccacaaatggaatgtaaatccataaacactcttaagtaacagaataaatttagtatgaacgtttttatgtgggagctcttgaaatggttgctgctcat

SEQ ID NO: 48168 - DNA, 1276 bp, Homo sapiens
agtttcccagctgaattcaaactcattcccagatcacttgtcctcctcaattgatgtacactgaagaaagagccaccttcaggctgtaaggtcatcgtataatcctgaccactcatttcccatcatgacactgctgttccttctctttctccttcttggatgtctgatacaaacagcctcagcttttcttagtgcctaaagtgtctgcaagtggaaatccagaggaagacagagagaaactgagttcctgacaatgcattcactaaagaaactgacttttgaagatgtagctattgacttcacccaggaagagtgggccatgatggacacatccaagagaaagctgtacagagatgtgatgctggaaaatatcagtcacctggtgtccctcgggtaccagataagcaaagcctatataattttgcagctggagcaaggaaaagagctgtggagggaaggaagagtatttcttcaagaccagaatccaaacagggaaagtgcccttaagaaaacacacatgatatccatgcatcctatcaccagaaaagacgcatccaccagtatgacaatggagaactctctcattctggaggatccttttgaatgtaatgattcgggagaagattgcactcgcagttccacaataactcagtgtttgttaactcatagtggaaagaaaccctatgtcagcaaacagtgtggaaaatcccttcgtaatcttttgtccactgaaccacataaacaaattcatactaaaggaaatcccacttccaactggatgtctggatgaactactgaaagctgctgagtgtcctgcagcagcttgactacaacacaaatgaatccactcaaatgttggcaagtggagcagagtcccagaacagtctgcaatctctacaggtacagaaacacccccagttcaaggatcttcacacctggatttaggcctactcctgcaactaccccaggccagttatccaggcagtgactttcagtgcagctacagtcacctctggaaacctgtggagactttaaaaatttccaaaaggcaccaatttgatcttctactactttgcagacatctcttctgcaaacaccagacaaattgagacaatgaccttccacaggacccaaatcacctcttactgcaggaaagaagatccagtgagaaaattagtccacaaatggaatgtaaatccataaacactcttaagtaacagaataaatttagtatgaacgtttttatgtgggagctcttgaaatggttgctgctcat

SEQ ID NO: 48169 - DNA, 1396 bp, Homo sapiens
agtttcccagctgaattcaaactcattcccagatcacttgtcctcctcaattgatgtacactgaagaaagagccaccttcaggctgtaaggtcatcgtataatcctgaccactcatttcccatcatgacactgctgttccttctctttctccttcttggatgtctgatacaaacagcctcagcttttcttagtgcctaaagtgtctgcaagtggaaatccagaggaagacagagagaaactgagttcctgacaatgcattcactaaagaaactgacttttgaagatgtagctattgacttcacccaggaagagtgggccatgatggacacatccaagagaaagctgtacagagatgtgatgctggaaaatatcagtcacctggtgtccctcgggtaccagataagcaaagcctatataattttgcagctggagcaaggaaaagagctgtggagggaaggaagagtatttcttcaagaccagaatccaaacagggaaagtgcccttaagaaaacacacatgatatccatgcatcctatcaccagaaaagacgcatccaccagtatgacaatggagaactctctcattctggaggatccttttgaatgtaatgattcgggagaagattgcactcgcagttccacaataactcagtgtttgttaactcatagtggaaagaaaccctatgtcagcaaacagtgtggaaaatcccttcgtaatcttttgtccactgaaccacataaacaaattcatactaaaggaaatcccacttccaactggatgtctggatgaactactgaaagctgctgagtgtcctgcagcagcttgactacaacacaaatgaatccactcaaatgttggcaagtggagcagagtcccagaacagtctgcaatctctacaggtacagaaacacccccagttcaaggatcttcacacctggatttaggcctactcctgcaactaccccagatggagccatcccagccatgacaacagagaatgtaccactctcacatgaggaagaggggtaggcagtgctcctgtatcaccagcccttaatgagaccctgaggaaaccacatcatggagatcagcccttctctcctggggtaatattgagttccagaaggcaaggattaacattcagaaaataggaaaaacaacctgcaggcaccaatttgatcttctactactttgcagacatctcttctgcaaacaccagacaaattgagacaatgaccttccacaggacccaaatcacctcttactgcaggaaagaagatccagtgagaaaattagtccacaaatggaatgtaaatccataaacactcttaagtaacagaataaatttagtatgaacgtttttatgtgggagctcttgaaatggttgctgctcat

SEQ ID NO: 48170 - DNA, 816 bp, Homo sapiens
agtttcccagctgaattcaaactcattcccagatcacttgtcctcctcaattgatgtacactgaagaaagagccaccttcaggctgtaaggtcatcgtataatcctgaccactcatttcccatcatgacactgctgttccttctctttctccttcttggatgtctgatacaaacagcctcagcttttcttagtgcctaaagtgtctgcaagtggaaatccagaggaagacagagagaaactgagttcctgacaatgcattcactaggtaccagataagcaaagcctatataattttgcagctggagcaaggaaaagagctgtggagggaaggaagagtatttcttcaagaccagaatccaaacagggaaagtgcccttaagaaaacacacatgatatccatgcatcctatcaccagaaaagacgcatccaccagtatgacaatggagaactctctcattctggaggatccttttgaatgtaatgattcgggagaagattgcactcgcagttccacaataactcagtgtttgttaactcatagtggaaagaaaccctatgtcagcaaacagtgtggaaaatcccttcgtaatcttttgtccactgaaccacataaacaaattcatactaaaggaaatcccacttccaactggatgtctggatgaactactgaaagctgctgagtgtcctgcagcagcctttcatcccaaagatgcagccgacttgattgtggtggataagctttttgatgtgctgctggattccgtttgctagtattttattaagaatttttgcattaatgttcatcagggatattg

SEQ ID NO: 48171 - DNA, 572 bp, Homo sapiens
tctgggttcctgctttccttccaggaaatcccacttccaactggatgtctggatgaactactgaaagctgctgagtgtcctgcagcagcttgactacaacacaaatgaatccactcaaatgttggcaagtggagcagagtcccagaacagtctgcaatctctacaggtacagaaacacccccagttcaaggatcttcacacctggatttaggcctactcctgcaactaccccagttcatttcaacttatgtttaaggggttcttgataatctgacatgataagtggtgttggaattggcattaaaatccaccatgttctacaacacttcatccttcttcggcaggcaccaatttgatcttctactactttgcagacatctcttctgcaaacaccagacaaattgagacaatgaccttccacaggacccaaatcacctcttactgcaggaaagaagatccagtgagaaaattagtccacaaatggaatgtaaatccataaacactcttaagtaacagaataaatttagtatgaacgtttttatgtgggagctcttgaaatggttgctgctcat

SEQ ID NO: 48172 - DNA, 914 bp, Homo sapiens
  misc_feature (841)..(841): n is a, c, g, or t
  misc_feature (848)..(848): n is a, c, g, or t
cgctaagatggcggcggcgtgagttgcatgttgtgtgaggatcccggggccgccgcgtcgctcgggccccgccatggccgtcaccatcacgctcaaaacgctgcagcagcagaccttcaagatccgcatggagcctgacgagacggtgaaggtgctaaaggagaagatagaagctgagaagggtcgtgatgccttccccgtggctggacagaaactcatctatgccggcaagatcttgagtgacgatgtccctatcagggactatcgcatcgatgagaagaactttgtggtcgtcatggtgaccaagaccaaagccggccagggtacctcagcacccccagaggcctcacccacagctgccccagagtcctctacatccttcccgcctgcccccacctcaggcatgtcccatcccccacctgccgccagagaggacaagagcccatcagaggaatccgccccacgacgtccccagagtctgtgtcaggctctgttccctcttcaggtagcagcgggcgagaggaagacgcggcctccacgctagtgacgggctctgagtatgagacgatgctgacggagatcatgtccatgggctatgagcgagagcgggtcgtggccgccctgagagccagctacaacaacccccaccgagccgtggagtatctgctcacgggaattcctgggagccccgagccggaacacggttctgtccaggagagccaggtatcggagcagccggccacggaagcaggagagaacccctggagttcctgcgggaccagccccagttccagaacatgcggcaggtgattcagcagaacctgggctgttgccgctgtcngagtggncagggaactcagtttaagaaacaggggcagagcgttctcaatgtgaacccggggctggggcccgtg

SEQ ID NO: 48173 - DNA, 494 bp, Homo sapiens
  misc_feature (451)..(451): n is a, c, g, or t
cgctaagatggcggcggcgtgagttgcatgttgtgtgaggatcccggggccgccgcgtcgctcgggccccgccatggccgtcaccatcacgctcaaaacgctgcagcagcaggtgattcagcgggcgagaggaagacgcggcctccacgctagtgacgggctctgagtatgagacgatgctgacggagatcatgtccatgggctatgagcgagagcgggtcgtggccgccctgagagccagctacaacaacccccaccgagccgtggagtatctgctcacgggaattcctgggagccccgagccggaacacggttctgtccaggagagccaggtatcggagcagccggccacggaagcagcaggagagaaccccctggagttcctgcccgccctgctccagcagcctgggcccaggagaaccctcagcttttacagcaaatcagccggcancaggagcagttcatccagatgctgaacgagccccctgggaagc

SEQ ID NO: 48174 - DNA, 711 bp, Homo sapiens
  misc_feature (638)..(638): n is a, c, g, or t
  misc_feature (645)..(645): n is a, c, g, or t
cggtacccctatactgactacgcggctgggactctgctgcgggggagctgaggccccacctgcagacctgctgctcacctgggcaggtgcctcctcacagcccatctgcacagctggcctgcggagtcctcctcaggggccactggccctcatctgccactgtcgaagggatgcctgcccctgctctccccacctcaggcatgtcccatcccccacctgccgccagagaggacaagagcccatcagaggaatccgccccacgacgtccccagagtctgtgtcaggctctgttccctcttcaggtagcagcgggcgagaggaagacgcggcctccacgctagtgacgggctctgagtatgagacgatgctgacggagatcatgtccatgggctatgagcgagagcgggtcgtggccgccctgagagccagctacaacaacccccaccgagccgtggagtatctgctcacgggaattcctgggagccccgagccggaacacggttctgtccaggagagccaggtatcggagcagccggccacggaagcaggagagaacccctggagttcctgcgggaccagccccagttccagaacatgcggcaggtgattcagcagaacctgggctgttgccgctgtcngagtggncagggaactcagtttaagaaacaggggcagagcgttctcaatgtgaacccggggctggggcccgtg

SEQ ID NO: 48175 - DNA, 753 bp, Homo sapiens
acgcgtccggtgttcttcccaccgtgtgtcaccctgaccacccgcctgtcagggccagcgagccgaggccaggatcctgagctgtacccagtccactgcttttaaggccctgcactgaaaatgcaagctcaggcgccggtggtcgttgtgacccaacctggagtcggtcccggtccggccccccagaactccaactggcagacaggcatgtgtgactgtttcagcgactgcggagtctgtctctgtggcacattttgtttcccgtgccttgggtgtcaagttgcagctgatatgaatgaatgctgtctgtgtggaacaagcgtcgcaatgaggactctctacaggacccgatatggcatccctggatctatttgtgatgactatatggcaactctttgctgtcctcattgtactctttgccaaatcaagagagatatcaacagaaggagagccatgcgtactttctaaaaactgatggtgaaaagctcttaccgaagcaacaaaattcagcagacacctcttcagcttgagttcttcaccatcttttgcaactgaaatatgatggatatgcttaagtacaactgatggcatgaaaaaaatcaaatttttgatttattataaatgaatgttgtccctgaacttagctaaatggtgcaacttagtttctccttgctttcatattatcgaatttcctggcttataaactttttaaattacatttgaaatataaaccaaatgaaatattttactgat

SEQ ID NO: 48176 - DNA, 1132 bp, Homo sapiens
cgccccggcgaatggtcccccgagggcagccatccgcagacgcagttccctgattgccccagcaaaaatgggcggtctccttgggatagattctgcgcgggctgctcttaagaatttaccggcaggcaggtctggtcccagcagaggagacccaggggtcccagagctgggctggcgggaggcgtaatccggcggggtgagggttgatcgaagagccccgcgcgcagctgccgctcacagccccttcccgagtgcagagcgggcagagaaggtaagaagcccacccacccactccccgcctcctgaagcccgtgcttcagacctgtccctgcaactggggaagagccaggcgggctctccgcctcctcgatcctcctccctggaagaggcccgaaggcagcggccgccagacacacgttcgcctagtccgtcacccgacggctctgcccctcaacaggggctcctccaccgccacgtacacatccgcggctcatgcacgccctgaatgatcggctcagccggaccccctggttttttgttcacttactggaaccttcttttgcagaaaatcttgtttgctgtgggatccacagatgggtccgcctccctcttttagtgtaaaaaagcagtgaacggctattatggtacatttttaaaaaaatcaaacagaagccaaaaccactttaatgtctatagaaggacacgtctaatacatttaaaataagcttcagctgttctgaatacagttcatggtatttttatttaaagacaaattctttagaatgagcctgtaaggtgggtaggtcagaaaccccattttacagtttaacaagtggacatttaaacggctagttaaatgatgagtctaagatcacggtttcagaaactaagacttgggcaaagctgctctcactccgaatctaattcatgttccatgaccctacactgcctctcatgatgtagagaaatgaggagtaaccttaccaaatgtacttcttaataaactgcccctaccacacagcagggtccgtcaggccagcgctgacacaggtttgcaggctcccagtaaatatgaagtgaaggacaagtcaggaagtgggaagactggaaaggattgctcatcggaaatcag

SEQ ID NO: 48177 - DNA, 401 bp, Homo sapiens
atgagagctcgctgtactatctttgcaacttttccgtcaatcaaaaatgattctgcaattaaaagtttattaaaaattataaaagtaccttaagaaaattcaaaactcttgtgtgtcctttataggtgaaaagctcttaccgaagcaacaaaattcagcagacacctcttcagcttgagttcttcaccatcttttgcaactgaaatatgatggatatgcttaagtacaactgatggcatgaaaaaaatcaaatttttgatttattataaatgaatgttgtccctgaacttagctaaatggtgcaacttagtttctccttgctttcatattatcgaatttcctggcttataaactttttaaattacatttgaaatataaaccaaatgaaatattttactgat

SEQ ID NO: 48178 - DNA, 220 bp, Homo sapiens
gcggccgcctactactactactgctcgaattcaagcttctaacgatgtacggggacatgaaaaaaatcaaatttttgatttattataaatgaatgttgtccctgaacttagctaaatggtgcaacttagtttctccttgctttcatattatcgaatttcctggcttataaactttttaaattacatttgaaatataaaccaaatgaaatattttactgat

SEQ ID NO: 48179 - DNA, 2675 bp, Homo sapiens
aaactgttctatgtactatgccctgcgatagaaacacagttacctctcccctttcacgtagttttcatttgtggtgagattctctcccaggccacaagacatttcctgctcggaaccttgtttactaatttccactgcttttaaggccctgcactgaaaatgcaagctcaggcgccggtggtcgttgtgacccaacctggagtcggtcccggtccggccccccagaactccaactggcagacaggcatgtgtgactgtttcagcgactgcggagtctgtctctgtggcacattttgtttcccgtgccttgggtgtcaagttgcagctgatatgaatgaatgctgtctgtgtggaacaagcgtcgcaatgaggactctctacaggacccgatatggcatccctggatctatttgtgatgactatatggcaactctttgctgtcctcattgtactctttgccaaatcaagagagatatcaacagaaggagagccatgcgtactttctaaaaactgatggtgaaaagctcttaccgaagcaacaaaattcagcagacacctcttcagcttgagttcttcaccatcttttgcaactgaaatatgatggatatgcttaagtacaactgatggcatgaaaaaaatcaaatttttgatttattataaatgaatgttgtccctgaacttagctaaatggtgcaacttagtttctccttgctttcatattatcgaatttcctggcttataaactttttaaattacatttgaaatataaaccaaatgaaatattttactgataagattcttcatgcttctttgctctccttaaaatgtctttttcactagttagttccaagggtcagtctcataattttgttcttatactttgatttcctttttcttttttttttttttaatagagttgggggatctttctttctttttttttttttttttttgagatagagtctcgctctgttgcccaggctggagtgcagtggcgtgatctcagctcactgcaacctccacctcctggatacaagcgattctgctgcctcagtctcccgagtagctgggattacaggttcccgccaccatgcccagctaatttttgtatttttagtagagacggggtttcaccatcttggtcaggctggtctcgaactcctgacctcgtgatccacctgcctcggcatcacaaaatgctgggattacaggcatgagccaccgcgtccagcctagagttgggggtctttctatgttgcccaggctggtcttgaactccgggcctctagcaagcctctcatctcagcctcccaaggtgctggaattacaggtgtgagccactgcaccatactttggtttcttagcaggagattttggttcacagtaacccagctctctttcatctaagaactttagatgagaaaaaaaaaaaatagactacagataactattcccaggcagttatggtacatttagccaacacttttgcctcttctcatgttatctgttagtattaatgctgacaaagcaagattttttgcgaaacaacacaccaagccttgcttttacactgcattcctcaggaggttgtttattgtgttgttgattttctttcccttttgaatatgagatatcagagtaagaaaactctgatcagagttttctgaaaactcttatcagagtaagaaaaatttgatcaatgatcaaattcagtgactcaattttggttaaattttatccatcaatagatggataaaagtgtaaaatgatttttttcacatttcttgtcccatttgatccgtcagcatcattttgccctgatgaaaatctcacttcctaatttcccctagttctcctcctacacttctgattccatttcatttgttggggtgggggaagtaagaggcaaaactatttatcttatacacttattgtgaaatctcagtgagaacaaagtgtcaaagcacctggaacttagtaggcactcaacaaattcaagcactctgccctttcctccacttaccctatagctgtgggtgctttgcagggttctagcttgagtccactcctttcacatctcacgttcctagatagcatcatctactcccatggttctaactgcctcttaggaccccaaagtctgtacttccagtttctcccttactattgatcttcagaatgtctctcttgctagctgtgaaaatgagtccatctggatgtcccctagaccttgtctacccaacaagtccaatgatatcacttagttgttcaaggtgaaaaatccaggtaccaatgacccctgaattgcctcatcgcacctttctccttttccccgatatccaatcagacacccactctgtcaccgatactccacttgaaagccccaaggggtgatctattttgtttgctgctgtattcccagtgcctagaacaatgcctgacaccagtaggtatctactcaatcattttgtttgctgctgtattcccagtgcctagaacaatgcctgacaccagtaggtatctactcaatcacttattgaatgaattaatctgtcctctcctctttgctgacataaatgtagtccaaaccttattacctctttggcaaatcatgttcataccctctaaactaaccttcctgcctactagcttgggatcctcaagaatcagctata

SEQ ID NO: 48180 - DNA, 1533 bp, Homo sapiens
aaactgttctatgtactatgccctgcgatagaaacacagttacctctcccctttcacgtagttttcatttgtggtgagattctctcccaggccacaagacatttcctgctcggaaccttgtttactaatttccactgcttttaaggccctgcactgaaaatgcaagctcaggcgccggtggtcgttgtgacccaacctggagtcggtcccggtccggccccccagaactccaactggcagacaggcatgtgtgactgtttcagcgactgcggagtctgtctctgtggcacattttgtttcccgtgccttgggtgtcaagttgcagctgatatgaatgaatgctgtctgtgtggaacaagcgtcgcaatgaggactctctacaggacccgatatggcatccctggatctatttgtgatgactatatggcaactctttgctgtcctcattgtactctttgccaaatcaagagagatatcaacagaaggagagccatgcgtactttctaaaaactgatggtgaaaagctcttaccgaagcaacaaaattcagcagacacctcttcagcttgagttcttcaccatcttttgcaactgaaatatgatggatatgcttaagtacaactgatggcatgaaaaaaatcaaatttttgatttattataaatgaatgttgtccctgaacttagctaaatggtgcaacttagtttctccttgctttcatattatcgaatttcctggcttataaactttttaaattacatttgaaatataaaccaaatgaaatattttactgataaaacaacacaaaaaaaaaacaacaaaaacacaaaaacaaacacaaaacaaacaaacaaacaaaaacaaacacacaaacacaagaacaaaaacaaagaaacaacaaaagagggcggcagcgcgggcgaccacacaaacgaccacccacaagcgagggggggcacagaatcgatatgacgcagaggagccacgcatgtattatgaagcaaaaaggcgggacacaaactgcaagcgcaacgaaattaatcaaacgacagagcagcccgacagacacataaaaaacaaaacacatgaaatgaaacaaaacaacccatacgcccgaaccaccaaaagggaagcaaacaaacacacaccacagccgagggagcgagacacactgcagagaaccacccacacagaaaaagaaaagccgacgaagagaaaacaaacacaacaccggcgagacaacgaggaggaacaaaaagccacgcgacataagagaaggcgacaagagaagaagaaacgaaacgagagaacgactagagcaaaacagagaaaatattaaacgcaggggcgcacaaaaaaaacaagccgagccagcgtgcaaccgaagaccaaccagaagcagactaaactgcaaccgacacacgacaccaccagcgcgccacccaccccgcaacccagcaacccaaccgcacccgcccacagccccaccacactcacccagccgcaccacacgcagcgccacacggccgacccccc

SEQ ID NO: 48181 - DNA, 806 bp, Homo sapiens
aaactgttctatgtactatgccctgcgatagaaacacagttacctctcccctttcacgtagttttcatttgtggtgagattctctcccaggccacaagacatttcctgctcggaaccttgtttactaatttccactgcttttaaggccctgcactgaaaatgcaagctcaggcgccggtggtcgttgtgacccaacctggagtcggtcccggtccggccccccagaactccaactggcagacaggcatgtgtgactgtttcagcgactgcggagtctgtctctgtggcacattttgtttcccgtgccttgggtgtcaagttgcagctgatatgaatgaatgctgtctgtgtggaacaagcgtcgcaatgaggactctctacaggacccgatatggcatccctggatctatttgtgatgactatatggcaactctttgctgtcctcattgtactctttgccaaatcaagagagatatcaacagaaggagagccatgcgtactttctaaaaactgatggtgaaaagctcttaccgaagcaacaaaattcagcagacacctcttcagcttgagttcttcaccatcttttgcaactgccgctttttgcagctgccttatcacaacactgatcccgttgcgttgatggaagcactgtgaccctggctgacagcaccacaactgccaggacagacaccacagggggcgtggcacagcaacctgggccatctggtacgtcagcgctgacgtcagtcttgggccttgcaggtgggaggtggaaactcgagtctggaggttggccatggtggtgc

SEQ ID NO: 48182 - DNA, 419 bp, Homo sapiens
tgtctgtgtggaacaagcgtcgcaatgaggactctctacaggacccgatatggcatccctgtgagtctcttaccataccatctcactcaaatatgcaccccattcaaaataattattataaacatggagatcatttgatgtatacatcttctgaaattgattgataagagttccctagcatgtgcaatcttgcattcagttgtagcaacagatcttctggttatgtggcctccttctaggtttctgctgaaaacctgagaaaattgataactcatatttgcaatggatgtcataccatggaagaggcttatttaggatctactgtggcgtggatgcattacatgtattatctcacttaatcctcacatcatctctgtaaagtgggtaggtccacaacattttgccaaagagaactttaa

SEQ ID NO: 48183 - DNA, 792 bp, Homo sapiens
aaactgttctatgtactatgccctgcgatagaaacacagttacctctcccctttcacgtagttttcatttgtggtgagattctctcccaggccacaagacatttcctgctcggaaccttgtttactaatttccactgcttttaaggccctgcactgaaaatgcaagctcaggcgccggtggtcgttgtgacccaacctggagtcggtcccggtccggccccccagaactccaactggcagacaggcatgtgtgactgtttcagcgactgcggagtctgtctctgtggcacattttgtttcccgtgccttgggtgtcaagttgcagctgatatgaatgaatgctgtctgtgtggaacaagcgtcgcaatgaggactctctacaggacccgatatggcatccctggatctatttgtgatgactatatggcaactctttgctgtcctcattgtactctttgccaaatcaagagagatatcaacagaaggagagccatgcgtactttctaaaaactgatggtgaaaagctcttaccgaagcaacaaaattcagcagacacctcttcagcttgagttcttcaccatcttttgcaactgaaatatgatggatatgcttaagtacaactgatggcatgaaaaaaatcaaatttttgatttattataaatgaatgttgtccctgaacttagctaaatggtgcaacttagtttctccttgctttcatattatcgaatttcctggcttataaactttttaaattacatttgaaatataaaccaaatgaaatattttactgat

SEQ ID NO: 48184 - DNA, 933 bp, Homo sapiens
cgccccggcgaatggtcccccgagggcagccatccgcagacgcagttccctgattgccccagcaaaaatgggcggtctccttgggatagattctgcgcgggctgctcttaagaatttaccggcaggcaggtctggtcccagcagaggagacccaggggtcccagagctgggctggcgggaggcgtaatccggcggggtgagggttgatcgaagagccccgcgcgcagctgccgctcacagccccttcccgagtgcagagcgggcagagaagtccactgcttttaaggccctgcactgaaaatgcaagctcaggcgccggtggtcgttgtgacccaacctggagtcggtcccggtccggccccccagaactccaactggcagacaggcatgtgtgactgtttcagcgactgcggagtctgtctctgtggcacattttgtttcccgtgccttgggtgtcaagttgcagctgatatgaatgaatgctgtctgtgtggaacaagcgtcgcaatgaggactctctacaggacccgatatggcatccctggatctatttgtgatgactatatggcaactctttgctgtcctcattgtactctttgccaaatcaagagagatatcaacagaaggagagccatgcgtactttctaaaaactgatggtgaaaagctcttaccgaagcaacaaaattcagcagacacctcttcagcttgagttcttcaccatcttttgcaactgaaatatgatggatatgcttaagtacaactgatggcatgaaaaaaatcaaatttttgatttattataaatgaatgttgtccctgaacttagctaaatggtgcaacttagtttctccttgctttcatattatcgaatttcctggcttataaactttttaaattacatttgaaatataaaccaaatgaaatattttactgat

SEQ ID NO: 48185 - DNA, 374 bp, Homo sapiens
aagcagtagcacctgttttactgggttatgctgaaaattaaatgagttgctacatgtaatgtgttaataaccgttctaggacacatgtgctcaaggaatgtgggtaggataatgatgtgatggtggtggtagtatttggttgatgtcatagggtaagtacttctatattttgttattatctaagcatttcattttattaaatatttttctccataattgctttcttgaaatgtaagagttaagtcctctcatagaaatattttggtcacttaacatagtcacattaagtaatattttttaaaaagaagcttagtaagtaagacaatttgatcccttgcattagttttttacaggttttttttttttccttttga

SEQ ID NO: 48186 - DNA, 1316 bp, Homo sapiens
ggcaacttccggcggcgggagctgcagagcgcaaggcgcgcccactgcgcgtgcgcttcggcccggctcctcctgcgcccccggcccctgcgactgggacttggtacggccgggcggttggcgtcctctgcggctcctgccaggggcgggcttttcaaatcttccctttgaaggagtggcgacggcccggacagttcgcgttggagatggaggggccgagcctgaggggtcctgcgctccgcctggcggggcttcccacccagcaggactgcaacattcaagaaaaaatagacttagaaattcgaatgcgagaaggaatatggaaactcctttctctgagcactcagaaagatcaagttttacatgcagttaagaatctcatggtgtgcaatgctcgactaatggcctatacatcggagctacagaaattagaagaacagattgcaaatcagactggaagatgtgatgtgaaatttgaaagtaaagaacgaacagcatgtaaaggaaagattgccatatcagatattcgaataccactaatgtggaaagactctgatcacttcagcaataaagaacgatcacgacgctatgccattttttgtttattcaaaatgggagctaatgtgtttgatactgatgtggtgaatgtggataaaacaatcacagatatatgttttgaaaatgtaaccatattgtaagtattttttaatcttcagagaataaaaataatttaaaattcttcttttttaaaagaaagttcttattattggttctttggattcattttatgtttaaatgtttaagtgatctttaaatgtttaatatgattttaaaaattattttgttcagaagaagtccatttctctatctgcagttttctgatgtgaaataaaaatggaaatcttgtaattactattagcagtaaatatttgacttattagatatgacccatttttaaattgttaataaatatagttcagttattaacaaagctatgcatacaacagaatatcctgtaatgttatttgatatagagagaatttaagcataaaacaggatttttatctcatgtaggatatttggttgcagaaatactaaaatagtatagcaactttatttacaagatagtcctgaagtacatgctatataggaagagcactttgaaattttggggtgttctttttcttatggtgcacttctttcatgtacttcaaagcaataaaaaaaaatgggtgatctcagggctgtttttattgtccctgctcttttacaggctcattttattgtggtcataatacagaacaagaaggaactcc

SEQ ID NO: 48187 - DNA, 876 bp, Homo sapiens
ggcaacttccggcggcgggagctgcagagcgcaaggcgcgcccactgcgcgtgcgcttcggcccggctcctcctgcgcccccggcccctgcgactgggacttggtacggccgggcggttggcgtcctctgcggctcctgccaggggcgggcttttcaaatcttccctttgaaggagtggcgacggcccggacagttcgcgttggagatggaggggccgagcctgaggggtcctgcgctccgcctggcggggcttcccacccagcaggactgcaacattcaagaaaaaatagacttagaaattcgaatgcgagaaggaatatggaaactcctttctctgagcactcagaaagatcaagttttacatgcagttaagaatctcatggtgtgcaatgctcgactaatggcctatacatcggagctacagaaattagaagaacagattgcaaatcagactggaagatggttagtaacatagtttacctgtggcttttaatgtacttaaatatgtaaatttaaaacacagtataatttaagcttaagtaccaatgtcaaatcaccaaactgttttaaaaaacaaatacactgaagtagcagctgacatcataaacagtttgccgacacagctcagagtgaacttaggcagcagcttttattgggctgttgtgttcaatatgtaattataaaatgaaaattatccagaagcaatgactgagggagcattttaagaagaaagtaccaatattgatagaaatgtagagtaagaaaattaattgcttagaaatatgctaatataaaggtactagctgtgagacatggaaactcaagtatagaaattgagatgagtgagcagcaaaattataaagagataaaacctt

SEQ ID NO: 48188 - DNA, 829 bp, Homo sapiens
caaatggcaagatctccttttttaaggcagaatggttgtccgttgtgtgtgtgtatacacacgtagcttattttctttatctgttttaccattgatggacataccttggcgattgtgaataatgctgcattcttatagtttcttcaatatcttggctattgtgaataatgctgcaatgaacaggggagtgcagataacttcacaaggtaatgattttactccttccagtataaacccagaagaaggactgctggatcatgtagtagtttcccttttaatttctttaggaacctctatactgctttccataatgactccgccagcagtgtactagggttcccttttctccataccctcgtcaacaatttatctcatgcctttttgataatagccatccttatgggtgtgaagtagtatctcatagtggttttaatttgcattttcctgatgttaaatgctgattttaaatgttacataaacataaaagaatggtataattttattttctactgagttaaatttccaacattatgaatgcccttgtttttagtaatgaagcagggccagactttcagataaaggtggaagtatatagttgctgtacagaagaatcttctataaccaacacaccaaaaaagctagctaagaaactcaagacatctataagtaaagctacaggaaagaaacataagttcagtgcttcaagaagaggatgatgaaatgtgcttgctcctcagctctgctgtatcaggtgtaaagtataatctgctagctcacactaccctaaccttggaaagtgctgaggatagtatcaagacccataatctga

SEQ ID NO: 48189 - DNA, 683 bp, Homo sapiens
tccccccatgcgccccgccttccagagcgcaaatacctcctttctctgagcactcagaaagatcaagttttacatgcagttaagaatctcatggtgtgcaatgctcgactaatggcctatacatcggagctacagaaattagaagaacagattgcaaatcagactggaagatgtgatgtgaaatttgaaagtaaagaacgaacagcatgtaaaggaaagattgccatatcagatattcgaataccactaatgtggaaagactctgatcacttcagcaataaagaacgatcacgacgctatgccattttttgtttattcaaaatgggagctaatgtgtttgatactgatgtggtgaatgtggataaaacaatcacagatatatgttttgaaaatgtaaccatatttaatgaagcagggccagactttcagataaaggtggaagtatatagttgctgtacagaagaatcttctataaccaacacaccaaaaaagctagctaagaaactcaagacatctataagtaaagctacaggaaagaaacataagttcagtgcttcaagaagaggatgatgaaatgtgcttgctcctcagctctgctgtatcaggtgtaaagtataatctgctagctcacactaccctaaccttggaaagtgctgaggatagtatcaagacccataatctga

SEQ ID NO: 48190 - DNA, 736 bp, Homo sapiens
attcttggagagaacttctccaccgaccccgtcacctggattggatcaccgacctctcccaagaggggcctggcttcctcctcgctggggaaacggtagggagctcccctaggtaaagcctctagggagagtggccaggagccgggtcaggaaaggctctggtgcccaaagggctgcccgcagaggctgaggtccctgcaagtgcacagggaggagaggtgagatcagattccagccgagtcaggcttccatgtcagactgcgtgtgtttatgcagaggtgcaactcaggaattactgaggagaaagtacagggccaatttaacctcctctgagagacctctaaccctgctcatcaccactcctcgctaaaaagggccctctccagggaagaacccagagggagagcgggaattctcctccccttggaggaagagtgcttcctctacccttaatgtatcaactgacaacaattcaaacagaaggaaactaggatgtgacaaataaaggaagccttttcatgctctatgtccactggcgtcgggcaagccccggtggaagtccaaggaaaagagtctaagacccaaacagatggtttgcgccaaagttctgaagtgtatcagacgtgaataaaggtatgttaattctaaaaggaactaaaatagaaacatgatgtggtttagactcaggtattaaaaaatgagccatctcagaagtggagacaactgaatatcttcc

SEQ ID NO: 48191 - DNA, 995 bp, Homo sapiens
attcttggagagaacttctccaccgaccccgtcacctggattggatcaccgacctctcccaagaggggcctggcttcctcctcgctggggaaacggtagggagctcccctaggtaaagcctctagggagagtggccaggagccgggtcaggaaaggctctggtgcccaaagggctgcccgcagaggctgaggtccctgcaagtgcacagggaggagaggtgagatcagattccagccgagtcaggcttccatgtcagactgcgtgtgtttatgcagaggtgcaactcaggaattactgaggagaaagtacagggccaatttaacctcctctgagagacctctaaccctgctcatcaccactcctcgctaaaaagggccctctccagggaagaacccagagggagagcgggaattctcctccccttggaggaagagtgcttcctctacccttaatgtatcaactgacaacaattcaaacagaaggaaactaggatgtgacaaataaaggaagccttttcatgctctatgtccactggcgtcgggcaagccccggtggaagtccaaggaaaagagtctaagacccaaacagatggtttgcgccaaagttctgaagtgtatcagacgtgaataaaggtatggttttcgattccctgccccctgcccgaggacctgcctcctccctgcccgaggaccaagcttcagaagaactgcacatgggaggaaataccaaccgcttaacttcttcagagacaacctctaacccggctcaccaccacgctagctaaaaaagggccctctcccagggaagatcccggaggaagagtgggaattcaccctccccttgggggaggagtgctttctctacccttaatttatgaactgagaaaaatcctaacaagcctactatgaaataaagatgcccttaacccatttatgcctagtgttccattattggaacgctaagcttgtgggagttatttatatcctactgctca

SEQ ID NO: 48192 - DNA, 964 bp, Homo sapiens
attcttggagagaacttctccaccgaccccgtcacctggattggatcaccgacctctcccaagaggggcctggcttcctcctcgctggggaaacggtagggagctcccctaggtaaagcctctagggagagtggccaggagccgggtcaggaaaggctctggtgcccaaagggctgcccgcagaggctgaggtccctgcaagtgcacagggaggagaggtgagatcagattccagccgagtcaggcttccatgtcagactgcgtgtgtttatgcagaggtgcaactcaggaattactgaggagaaagtacagggccaatttaacctcctctgagagacctctaaccctgctcatcaccactcctcgctaaaaagggccctctccagggaagaacccagagggagagcgggaattctcctccccttggaggaagagtgcttcctctacccttaatgtatcaactgacaacaattcaaacagaaggaaactaggatgtgacaaataaaggaagccttttcatgctctatgtccactggcgtcgggcaagccccggtggaagtccaaggaaaagagtctaagacccaaacagatggtttgcgccaaagttctgaagtgtatcagacgtgaataaaggtatgctgcctcctccctgcccgaggaccaagcttcagaagaactgcacatgggaggaaataccaaccgcttaacttcttcagagacaacctctaacccggctcaccaccacgctagctaaaaaagggccctctcccagggaagatcccggaggaagagtgggaattcaccctccccttgggggaggagtgctttctctacccttaatttatgaactgagaaaaatcctaacaagcctactatgaaataaagatgcccttaacccatttatgcctagtgttccattattggaacgctaagcttgtgggagttatttatatcctactgctca

SEQ ID NO: 48193 - DNA, 484 bp, Homo sapiens
tcggaagatgaccctgggcttgtcttcacattttccgtgttgtcacttgccggtcctttggaagccgtccctagatgtacactgtcttgccgggacctttctcttctcttcccctgtgaccacgcaggttttcgattccctgccccctgcccgaggacctgcctcctccctgcccgaggaccaagcttcagaagaactgcacatgggaggaaataccaaccgcttaacttcttcagagacaacctctaacccggctcaccaccacgctagctaaaaaagggccctctcccagggaagatcccggaggaagagtgggaattcaccctccccttgggggaggagtgctttctctacccttaatttatgaactgagaaaaatcctaacaagcctactatgaaataaagatgcccttaacccatttatgcctagtgttccattattggaacgctaagcttgtgggagttatttatatcctactgctca

SEQ ID NO: 48194 - DNA, 707 bp, Homo sapiens
ctttaacatgcttgcttattttaaaggtttcaaatcatacttaagctcagcgtactattgcttttgagagatagttcgaatataacaaggttttaaagcagaaacagaacccagtttgcccacacccctgcagggctggaatgtctgtcagcagagctgagcttcaccacctacaggtccctgaagcctcatgacccagtttgaaattgcagccctactcttggtgtctctagagccctcctctttcccttggagttataatttccctctcgggtttgtcttgactggtgggtgttcaatgtagagacacacaggaaggaagcaaatgtgccatggctggtggctgctggtgagggcgttttcgtaggaaagtatgcaggagccagttttatttcaagagcctcctgaaatataacaggtcaaatgggtgattggtattttctggaacagactccaaatctacacgtttcactcagcttctgcatttgtgaaatgatggggatttgtgcattcattcattcaacctaactgtattgagtactcaaatgccagacttcacatgttttaagctcaagaaacatgttccttttttcagatacagacttgaaaaacctgatcaagctgtatctggtttcagatggcagtctgaaggaatatttactttttgacctcttcaaattttactatcaacagcaacaaaaaaaaaa

SEQ ID NO: 48195 - DNA, 549 bp, Homo sapiens
gacagagctatggctagggcttcttagctccctctccttctaggccagggggagctgcacagggtggcagtcacggagtgaatcctgccaccagccagctgtgtggcacaggtatcttgggccactagggtgagcatagtatggatggctctgtcggaatccatcacacctggggaaaaacatcccaaagggcaggtcccatgatcgtggtgcgaataaggtgtttaatttttcctttcctttttagacatctgctcccaagtacacttttatgaaaagcacagccacctctatgagtgatttccactgtctagtcggcatatgaagcgactgtgctcaaaggagtaggtagtcgtagataaggctatttaaaataaaaatttcggagcatcagggcaaagagaatattgcatttggttaagaggaggtcagctgtgagagtccattaaaagggaacagactgctggtgacttttgcaggaagtaggagagttagaaagggacttgcagcatactgaggctagctattgtctttccactatcagttgcc

SEQ ID NO: 48196 - DNA, 434 bp, Homo sapiens
ctaggctttgtttgaagctctttgcagcaaagtagatgatacaaaaatgtatgtaactaaaataagctaaatgatgggagttatttgattattccttttgttaggtgtatgtaggaactacactctaaattaaaggcactgtgttttaagtcgatctgtgaactcctttgctgaaatgctttttaaagtgaatttttgtgtctcttcatgcttgatgtttcatagtaccccctcgaggggtacccgtctgcttccaagcacttgtctgggtagcggaaagaatatctttatttcacacctacacgccatggatcttttaaaggatgttgttggttacttttacttcatctgccatgacttccatagttctgttctttgataaagatgtgctccttagggtgctcaatagatttctttcaaaagccactgtttac

SEQ ID NO: 48197 - DNA, 259 bp, Homo sapiens
caccccctaaccagtctccttgttcctgcccctgccactatcagcttgttctcaatgctgctaccaaaacgtgactcaaatcatgccattcctgtaccaaaaaaaaccttcacagctcccatcccattcatagtggaagttccagttctaaaatgtccgtcattctctctctggcatctctcactagtctccctgctgactcctatcaagccacatagttctccgtgttatcctccctctaacttctataaggacaggg

SEQ ID NO: 48198 - DNA, 558 bp, Homo sapiens
ctgagccaaagggccagcctgatgggaataagcaggaggaagagtgaaaggagtagaagggatgggaggaaggcttggtggcagggcagacagcactcgggattgagtgaagagtaatggaagttccctgagagaaggtgagtgctccaatctgataacaaccacagtacagcatcgtgtatgttcaagatattgtgctaggcccttggggcgatgcaaaggggtgagacatggagcctgctctacagctgagtcgggcaacagaactggcatacttaagaggtgagcaagaagcctgtaatcccagcacgttgggaggccgatacaggaggatctcccaaggccaggagttggagaccagcctgggcaacagagagacctggtctccacaaaaaatacaaaaattacccaggagtgttggcatgcgcctgtggtcccagctactcgggaggccaaggtgggaggatcacttgaggcctggaatttgagactagcctgggcaacatggtgaaaccccatctctaaaaaaaagtttttaattagatgggcatggtagca

SEQ ID NO: 48199 - DNA, 349 bp, Homo sapiens
tgtatattgagctctggagagtgataagacacacttctgctggggaggccccactggagcgcattgcatgtgggatctctgccttcctgctacttggttacatttaaccacccaagagtgggtcatgactgaagagcctttttctactcctaggctggatatagcctgatgtgtagattttgcccactaacccattttgtttgatctgatttaaaaatcatttgatcaaggctgggcgttggcggctcatgcctgtaatcccagcattttgagaggccaaggtgggtggatcacctgagctcaggagctcgagaccagcctgggcaacatggtgaaactccgtctctaa

SEQ ID NO: 48200 - DNA, 420 bp, Homo sapiens
cccgccttggcctcccaaagtgctgggattacaggcatgagccaccacgcccggcctatcaactaattttaaaactttcgattgtaaccgctgatcaaacgtatcagattgacttagttcagttttaaagtcagcggatccagctaaaactagaccagccaccttccctttgtccccagaaataaacagctgcacagcagtctctgctactttctgaacattgttaggtcacttttccattcttaaacaggcaaaacgcaaggctgactgacctttaccgtgtttctttgggagatccacagtgagtttttgcaggacttctcttgtgtttccttggagggtgccaaaaagtgcaccactaccatctattacgatgaatccagacttgctttcatctgaaagtagtgctgtaagagcttc

SEQ ID NO: 48201 - DNA, 624 bp, Homo sapiens
tcgaagtaatgacgttaattccctgggaaacactcagccacagctgaaatgtgtgctcttcaggatggtctccagatccgcatcatcccctagacagtggggtcccggaaatactcatcacctgttcaggaattcaggcatcaagtggttcgtagggagagttcagcttgtaagcttctattcttttggttaatattaaaattagctagttttgaaacttagccataaccccatgtaattctaccagtggtgaacaagatattaatttaaaacatatcctgtggctgaactcagtttatgtcatgagaattgtcgtgatattctctggtttagctaactcaccgtaggggctgggcacggtggctcatgcctgtaatcccagcaccctgggtcaccgaagcaggaggattgcttgagagcctgggagtttgagaccagcctgcgcaacatagtagtgagactccatcccaaggaaaaaaaatagccaagcatgctggtgctagcctgtggttgcccctactccagaggatgaggtgggaggattgcttgagctgggaggttgaggctgctgtgagccctgccactgcaccactccagcctggctaacagaccttgtctcttaaa

SEQ ID NO: 48202 - DNA, 566 bp, Homo sapiens
actcagtttaaaagaacaaaaaccaaagaaatctgaaaagcttacaacgaaaagacgctcagtattctcttctcctccctggattagctgggtgggcgccaggtcatcacagggtccttgtaagaggaaggcaaggggtcagagtcgggcagaggaagccaaggtcagaggggaggagaggctgctgactttgaagatggaagagaggcctgagccaaggggtgcagcggatcctagaaatggtaagagggacacagatcctcccctagcgcctccaggaggagtggaacccagccaacacctggatcggagcttctgacctccagggctataggagaataaatgtgtgttgctgaagccactgactagtcagctactgcaaccgttggaaactacagctattatcacaatgcccataaaacacgctccagcagcgtgagaacaaagacagttgtgtggtggttatgaaacctcacctaacaagaccatgtttaagaaaagccaaataaaaacaagaagtaattatttaagcggtatcctaataaatggcttgcaaaaatatgtga

SEQ ID NO: 48203 - DNA, 396 bp, Homo sapiens
  misc_feature (282)..(282): n is a, c, g, or t
  misc_feature (387)..(387): n is a, c, g, or t
ggtcaagaagcaatggtcaatgtctttctcactctccagtctttctcctcatctagccaggaaggaaggttgagatatgaccatgaggcaagaacacatactagcgtggtggaggcaaagatataaggagtctgggtctctaatgactacaaaaaacccctcattataccagcccagggtgtggctgtctgcagacacttcattatatacaaaaaataagctaattacccccctctactaaaaatacaaaattagctgggcgtattggcacatgcctgtaantccagttactcgggaagctgaggcaggtgaatggcatgaacctgggagacagaggttgcagtgagctgagatggcgccattgcattctagcctgggcaatgagantgaaactcc

SEQ ID NO: 48204 - DNA, 314 bp, Homo sapiens
cccaccactactcctgatcccaccacgacccctcaccccacaactcctgacccttcctcaacccctgtcatcactactgtgtcccttccaacctccttggggacagaactctcctctcccactctagcaccaacagtcaagcccagtctgcacccccagttgaccttcacagcacctgcccctcacaccaccactaccccagaggaagaagaaagacccctgaggggagacgtgtgaccctctccaggatttgaggggcttaagacacccccaaccaaaaaaaacaaaaacaaaaaaaacccccaaagtatcta

SEQ ID NO: 48205 - DNA, 863 bp, Homo sapiens
cccaccactactcctgatcccaccacgacccctcaccccacaactcctgacccttcctcaacccctgtcatcactactgtgtcccttccaacctccttggggacagaactctcctctcccactctagcaccaacagtcaagcccagtctgcacccccagttgaccttcacagcacctgcccctcacacctccacatcccagatacccaccttagagccctctccagccttggagtccagcccctccaggtcctccacagccacaagcatggacccactgtccactgaggacttcaagccacccagaagccagagccccaacctaacccctccacccacccataccccacactcagcctctgaccttactgtgtcccctgaccccctcctttcccccacagcccaccccttggatcatcctccccttgaccccctcaccctagggccaactcctggtcagagcccaggcccccatggtccatgtgtggccccaacaccacctgtaagggtcatggcttgtgagccacctgccctggtggagctggtggctgctgtgagggatgtgggtggtcagctgcagagactgacccaggtcgtggaacaggagcggcaggagcgccaagccctgctgctggggctgacgcagctggtagaagctgcccggggtctggggcagctgggtgaggctgtgaagagactggcagagatggcctggaccaccagcatgcctgcaccaaccaccactaccccagaggaagaagaaagacccctgaggggagacgtgtgaccctctccaggatttgaggggcttaagacacccccaaccaaaaaaaacaaaaacaaaaaaaacccccaaagtatcta

SEQ ID NO: 48206 - DNA, 423 bp, Homo sapiens
tctaagccttagattttggagatacaaagaggagtgatacaaacctagctctttccccaggaagctgccttgataactagttttctattggtttctgattgaaagttttcagtttcattgattttagaatttaacttcagaatatgacatctgaccttccatatcttagaaacctgttattccttttttttagtctctgcattgtctttgatgccttggtagcatgcactgaaaattaactcttctgtttgaagctgtaattgtcaagattaaagattaactttttatctttgagttcactttaggcattgatctcttaggtgacagtgcccttgatgaaaaacagataaggggggcacaagcttataaacgtcaagtgaaagtaaatgctgcaggaactcatgttgtttttttaaccaacat

SEQ ID NO: 48207 - DNA, 350 bp, Homo sapiens
tgcatgacaaaattaccattttagggtatacgattcagtggcatttagtccattcacaatgttgtacaaccaccatctctctctagttccaagacatttcatcactccaaaaggaaaccttgttgtacattaatgggcactccccatttcccctttcctccagcccctggcaagcaacaatctgctttctgtcacaacagatttacttattctaagggtttcatataaatggaatcattcacttagcattatgttcttaaggtttatccaagttgtagcacatatcagtactttatcattttatggccaaataatatttcattgtaggtatataacatattttgtttatc

SEQ ID NO: 48208 - DNA, 544 bp, Homo sapiens
tctaccacaatgcagcttctacctcctcaccccagatgttcgctgatattcttgctgccaaatttgatggatataccatagtgcttaccttactttacctttgttgaccacttccttctttttaaaatgcttctgtgataccattctcctgtggtttttctttttacctttctgcttgctgcttttcaggcatgttttctgtctcttagaggtcaaagaatcttcacataggccttctcgtcacttactcttcttgggtgttctcatctttgtggcttcaatttttgtctctatgcttatgtcttccaaatccctatctgtagcccatgtctctcttctgaactttagatccacatttctccaatgggccatgattagttactcttctctccaggcctttgcattattgttggaacattctttcctccttttttccattctcttcctcttcctgctcagccaacattgactcagcctttcataacctctcagatctgggttaggcacataaccagagtaccctgccacagcactcatcacacag

SEQ ID NO: 48209 - DNA, 339 bp, Homo sapiens
tgatccatttgggatcctgaggcttagatctttccacagttgttttttgggtttggggggctttcttttccctctgtctctctctctcctctctctctcttttttctctttctctgtctctttctttttccctcagcagattctcattctctatcctctcccctcccctccccacatttctttctttcagaaatttttaaatgctggccaggtgcgatggctcacaactataatcctagcactttagtaggccgaagtgggcagatcatttgaggccaggagtttgaggtttgagaccaacatggtgaaaccccatctctactaaaaaattagccaggc

SEQ ID NO: 48210 - DNA, 2630 bp, Homo sapiens
ggtctctcggtgcagccggagctccaggtctcctcttcactactctgtgtcctgtgctcctacaggcccagcctctgtggccctgtgacctgcaggtattgggagatccacagctaagacaccaggacccctggaagcctagaaatgggaccattgcaatttagagatgtggccatagaattctctctggaggagtggcattgcctggacactgcacagcggaatctatataggaatgtgatgttagagaactacagtaacctggtcttccttggtattgttgtctctaagccagacctgatcgcccatctggagcaaggaaaaaaacctttgactatgaagagacatgagatggtagccaacccctcagttatatgttctcattttgcccaagatctttggccagagcagaacataaaagattctttccaaaaagtgatactgagaagatatgaaaaacgtggacatggaaatttacagttaataaaaaggtgtgaaagtgtagatgagtgtaaggtgcacacaggaggttataatggacttaaccagtgtagtacaactacccagagcaaagtatttcaatgtgataaatatgggaaagtctttcataaattttcaaattcaaatagacataatataagacatactgaaaaaaaacctttcaaatgcatagaatgtggcaaagcttttaaccagttctcaacccttataacacataagaaaattcatactggagagaaaccctacatttgtgaagaatgtggcaaagcctttaagtactcctctgcccttaatacacataagagaattcatactggagagaaaccatacaagtgtgataaatgtgacaaagcctttattgcatcctcaacccttagtaaacatgagatcattcatactggaaagaaaccctacaagtgtgaagaatgtggcaaagcttttaaccaatcctcgacacttactaaacataagaaaattcatactggagagaaaccctacaaatgtgaagaatgtggcaaagcttttaaccaatcctcaacacttactaaacataagaaaattcatactggagagaagccctacgtttgtgaagaatgtggcaaagcctttaagtactcccgtatccttactacacataagagaattcatactgaagagaaaccatacaagtgtaataaatgtggcaaagcctttattgcatcctcaacccttagtagacatgagttcattcatatgggaaagaaacattacaaatgtgaagaatgtggcaaagccttcatttggtcctcagtcctaactagacataagagagttcatactggagagaagccctacaaatgtgaagaatgtggcaaagcctttaagtactcctctacccttagttcacataagagaagtcatactggagagaaaccctacaaatgtgaagaatgtggcaaagcctttgttgcatcctcaacccttagtaaacatgagatcattcatactggaaagaaaccctacaagtgtgaagaatgtggcaaagcttttaaccagtcctcatcccttactaaacataagaaaattcatactggagagaaaccctacaaatgtgaagaatgtggcaaagcttttaaccagtcctcttcccttactaaacataagaaaatccattctggagagaaaccatacgagtgtgataaatgtggcaaagcctttatttcaccctcaagccttagtagacatgagataattcatactggggagaaaccctagaagtgtgaagaatgtggcaaagccttcaagtggtcctcacaccttactatacactgagagttctgaacttactctgtaaccatcccaaactcctcccaggcacagtctggcagaggtcctgccatttcggagacctggaggaagtggcccatttacagccatgtaggcaggcctgcagaccttggcctttactacggtacctgaagtggttcaatgactcagtttcagttacctgagccacagcttaaggtcagttctgcctatatagaaacccacacagttaacctgaggaaatgctctctggtactcactgaaagccacactcatccacatcctgatacaaggcccaccatatgcagacctgactgccaaaacatgccctagtgtctgccgtacagagtgaagtcctgaaggatatttagtctgtccaaaactaaaatgaagatttcaactccccaaccccctctaacaagccagctaaaggtggactatagtgcagacccagcaaccttgtgaccaggctaaaacccctcatcactacaaattcagagggcatctcatcaccctaagggcccaacgaaagatctttaccttctaacatcagtttatgaaaacttgaaaaggtgtttgctccatcaaattcagacaccagtacaaaactatattatgcccattgtctggttctattttaatgtagcactggaagtgtgtggcagaagaattagtcaaagaaataaaaatagccattgaaattgaaaaaaatgttgctgtttgtagatcatacaatcttatatttgaaaaaccttaaacagtacattaaaacccgtctaaactaataaatacactcagtaaattaacaaaatataaaatcaaca

SEQ ID NO: 48211 - DNA, 849 bp, Homo sapiens
ggtctctcggtgcagccggagctccaggtctcctcttcactactctgtgtcctgtgctcctacaggcccagcctctgtggccctgtgacctgcaggtattgggagatccacagctaagacaccaggacccctggaagcctagaaatgggaccattgcaatttagagatgtggccatagaattctctctggaggagtggcattgcctggacactgcacagcggaatctatataggaatgtgatgttagagaactacagtaacctggtcttccttggtattgttgtctctaagccagacctgatcgcccatctggagcaaggaaaaaaacctttgactatgaagagacatgagatggtagccaacccctcaggtgcacgcctgttatcccagcactttgggaggccaaggtgggtggatcccgaggtcaggagatcgagaccatctggccaacatggtgaaatcccatctctactaaaatacaaaaaattagccaggcatggtggcccatgcctgtagtacgagctactcaggaggttgaggcaggggaatcactagaacccaggaggcactccagcctgggagacagagtgagactccatctcaaaatatatatatatttccaaatattcagtttggtcttattatattgacattgttatgcaacatatcactagagtgttttttatcttgcaaagctaaatctcagtacacagtaaataactaccaatcctttgtattttgtggttcttttcaaacaccactctgttttctgtttctaagagtataactgctttatatatctcatccatctctgtctttttgcggctgggtcactttattttgcataat

SEQ ID NO: 48212 - DNA, 433 bp, Homo sapiens
catgataaactttattaggaaaaactaacgcttatggagtttctgtggagagagcagtccccccaaaagtccattctcacttttttatttctacctttgattctcccattgctccaattcaaatcatgctcattcagaatccctctttttccataatgccttatttacttactgtgtcagccttaagggtctgatttgaagctatggatagtttggtgatcaaaacctcacaaagtaggccagagaccatacttttcacctctcattttctgtaactttggcaagtgtcttaatcagtgccctattttacatatggggacaatagtacctcccatagttccctaggttgttctgaggaatgcatactaagtccttgacatgatgtgttgtaagcccttagtaattgttaactcttctactattatttcttcca

SEQ ID NO: 48213 - DNA, 298 bp, Homo sapiens
tttttttttttttacaaatcttagattttatgaacacttgctaatagcccccccctcctagatcgtcattgctgtgtaacaaattgtcatacatttagcagtttaaaataccacacatttactcacagcttccatgggccacgagtgtggggacgagtgactgggtcgtctgctcagggtctcttacaagactccatcagcgtttcagctggggctggggtctcatctgaggctcagggtcctcactccaggtcacagggcagaattcatttctttcaagctacggatctcatggcag

SEQ ID NO: 48214 - DNA, 350 bp, Homo sapiens
aactgtcaaaatttagtgaggaacaaagttatgaaattgtgtacatttcttcttacctaccacaaggaaaaatagcttaatacaggcagcaagaaggaagcataagatgcagaagggactaggatagcctcaaaattagtcactatctctgaataataggagtgactagatggcaagtggaaataacctggagggatgaggggatttaaatagaatattttgtaaaagaatctttatatttttgaggaaaatacaattgtagtaaatagtgtattcattatgtttcagagagcgatgagtttaaaggattttgggttatcttactatttgcagttttaataagatggtat

SEQ ID NO: 48215 - DNA, 1212 bp, Homo sapiens
aatatctcaggacccaggaccatgtgatatgggcccaacacctggatgatgttactcttctgcctaggtcatgcgtaaagagggaattagggcatattgcttggcccagtcccgtaatgatatgactctcctgcttgtgccagagccacagaagtgtgcttggtgacataatctttgaggctgtcacatcaccaagattatattgtatcactggaccagcataaagctgacacttctgactatgcccagccttcaaataatactacactgtataattggctcaacacccaggtgatattgttccatttacctgagaccagataaaaagcctaatgatgacgcttgtccccagagccaggacacgtgcaggacaggatcattactctcatccctgccccagattttcacaggtgctgcttacagagggcatcatgacatattgcttgacaaagaacctaagtgatgttaatattctgcataggttgctaaaaaatgggaatgtgagaaataccttgcttcagtccaaagtgggcttgctgacatattatgtgaaactgtacccgggtgaagtgactcttctgactaggcccagcatacaaatgagattatgctgtatcactggctcagtgtcgaagcccagatcacagaagtaattgtgccatatgtggaacaagcagctaagcaatagataacatccatcgtggctctgccttcaaagggaaattttacatatgtcactgggaccatcacccagatgatgtcctgcccactaaaagaattgtgacataacgctgactgcaaaaactgggtaatgcaactctcctctttattctggagtctgccaaaacaagggattatcacatattgcggagtccagcacccaggtaaaattttgtcatatacccagcttcagataccatgcaatgatacaactatcatacctggacccaaagaggagagatattttgattctcattgccattcttatggccacaagcaaagtaatggttctcatagtggtataaagttcacacagtattatgacactcccagcgtatcatagaaaatgtgagtagtacaatgagtgttataacagggaacagcaaaccaatgctattgtgattattggattcacacccagctgacgcgactatcattctctcacaagaacagaacctgcaaataaagtactaaatctcaccaaaaaaaaaa

SEQ ID NO: 48216 - DNA, 776 bp, Homo sapiens
tagatgtaatgcacccactgtaaaactgacttaagcattaaagcgattccatttttttcctcactgggccaaaaacaatctctggttcttttgtctttagtggatctgctatggcagatgactttattttaatctgtttttaaaaaatattactctgaaagagaaaataaactgttctcaaggaaatggatatatagtatctgaggaccacagcattgaaggatatgaattaatagtttagtaactttttattgcaggtagtacttgtgatttcggccagaaactggtctgtgctgataaagtacttgacattgactgattcattcatattcatgtagtaagtattaattgaatatgtaggttcgaagcattcattatgctaggtgctggtactttctgaacttccccaatctataactttttttaaaaaatgtttttattgcgcttgtataatataatattaaagttcctggaaatgtttattttaaatggctaggaatacaacatgttcattgtgtgttggagaagtagggatatttcaacattgcatgttaaaaataaatggcctcctttctcaacttgctacttaatgtgaaaaagggaggggaaagattataaatatattcaaaccagttattcacatgggtatatgaagtacccactatatcctcctgacagccttgttaattacatttatacttctgtggtttacctaggtaacatttctcacttaaactatgtaccctcttaaaccattcctctattagtatactgac

SEQ ID NO: 48217 - DNA, 485 bp, Homo sapiens
agccaaaaatgccatttttgtctttcaaaatgacagtgattaaaacattttaatgctttgaatttgtgcccataaaaatactttctcaccagcacatacatttcttgtataagctaaaagtggtattccctttctaaaaaatgccagcaatgttctttctatttggcccagtaaataaattaataatggtcatattctttggtccagtaaattaaacttcagaacacttattataagaaaatagaggctggacacagtggttcacacctgtaatcccaatactttgggaggccaaagtgggtggatctcttgagtccaggagtttaagaccaacccgagtgacatggcgaaaccccatctctacaaaaaatacaaaaattagccaggcgtggtggcacttgcttgtattctcagctacttgggagactgaggcaggagaatcacttgaacccgggaggcggaggttgcagtgagccgagatagtg

SEQ ID NO: 48218 - DNA, 263 bp, Homo sapiens
agaagaccaattctgtccacagtgtatgaatgttctaggtgaagctggggtgatggggagagtgaggtgaagacaacatctacaaatctcatgactttttgttgttgttgttttgtttcattttttggagacagaatctctgtcacctaggctggagcacagtggcgtgaccttggctcattgcaacttctgtgtcctgggttcaagcaattctcctgcctcagcctcctgagtagctgggattacaggcgcatgccctgcta

SEQ ID NO: 48219 - DNA, 650 bp, Homo sapiens
aagaatggaggcttcttaagcccatgggctcatcttacaggaatgtgcctgttttgtatttcagggtgttctagaaaattgctttcttgagcaaaaaggagaaagtttttcatgtcctcatttgaccacattttgttcccatggctttaagttgaaagctcagaatcagctctactctcatcactaggtggcacttgtgaattacaaatagtcaaatgaatttttatgacaaacatgtgattcacaaatatagataatgtttggaatccctgcatggacgttcctcaaaatggaagaaatgaaagaaggggattcctagtaagtaccagttgctgtgatgtatttataaatacatggttgaagaataaattacttcataatcatttcgtatttaatagtaatatcaataggtaaagtctggtctccatgcctgtgttcttaaactaatgttgccacaaagttgaaatttttttaggacctgcttgctattcatcttagttaattgcaagagaagtgagtactacaggtcaggtgcagtggctcacacctgtaatcccagcactttgggaggctgaggcagggcgattacttgagttcagggattcaggaccaacctgggcaacatagtgggatcccatctctacccaaaa

SEQ ID NO: 48220 - DNA, 426 bp, Homo sapiens
tgtagagacaaggtttcaccatgttgcccaggctggtcttgaactcctgggctcacgcagtctgcccacctcagcctcccgcaatctgcccacctcggcctcccaaagtgccgggattacaggtgtgagccactgcgcctggccacagctagtttaaatacaaagaatccagtaggttaaaggatagaaaaagatatccctgtgataacactaatcaaaagaaagttggggtaataatagacaaaatcgatttcagagcaaagtatataaacagggaaaacgagggttatttcacaatgatgaaagggtcaattaagaggatatacggtcctaatatttatgcacctaattagaaagcttaaaattcatatgcaaaaacttgcagaactgcaagaagaaatagataaatttatacaagtgttgtca

SEQ ID NO: 48221 - DNA, 347 bp, Homo sapiens
tcaatatactccagggactaagacaacaaaatagagttaggcttcctgccactgaggctgaaggcccaatggagtttttaaatattgctatgacagtggtggccacaaaacaggatgactaggtccaaagggagtctcagcttcctccaagtacaagtgcggttgtttcaagggtgagaaacttcacataccaaaaacaaaaacaaaagagagccttggatgagctcagagacactcttgtcaccagccactttggtgacattggctaggtaaggtgattctacctccccagcttcagtgtttaccaaacctcagttatccctgtaaccacctgggctgtttctttg

SEQ ID NO: 48222 - DNA, 358 bp, Homo sapiens
ggaatttcttagaaagagtatgataccagaccaaaaacttggatctacacaaagaagtgaaaagcactggaaagggaataaatgaagataaaataaattctattttttaatttttaaaattaatcataaagataatggactaaagcaaaaccagcaaactggatttatagcatatataaaagtaatctttgtgacaacaatactacagagggtgggaggaagttattgggaatatactattagttccttatactgtatttgaaacagtattttattatttggaggtagacactgagtactcaagaatatatattggaaactttaggaaaacaattcgaaaatattttttaagtataaa

SEQ ID NO: 48223 - DNA, 423 bp, Homo sapiens
ggcacgaggatatgaaatcaaattagaagtattcaaacaccaatgctgctaacttaaaaagaagtgaaagtactgaaaagttgccttcagcactgtttgtgtctatctcttcaaccttttctagttaaaacaattttgtattgacatcaatgtgtgcacgttatttggatcccaactcaaacaaactatagagagaggaatgggggcagagattggaagtttgaacactgactgaatgttggatgaattatttttaaaaataagattactataattacccattttagataatccttaaagtgatcttgtcatgctgtcttgtttactcatgttttaggaattcgtgtattcatcgttaagtatgaactttagctcaatttggatctatcagtctttctatttaaacaccatatttgactgaaa

SEQ ID NO: 48224 - DNA, 281 bp, Homo sapiens
tactactactctactactactaaattcggcggccgcgtcgacgcttagcagtctttcatggtggaagtgacacatctggttgaaaataatttgtgtattttcagtaaccatgtatggcttccttctttatgtatgtgtgtgacttgttttgattggtaagttataagccagacatagattttagctctttaataaaaacttcaggggcacgtatgtcccagtacaagtgtactgactatcaagttttaactcagagccaaagcttgcatctgaggtcgacc

SEQ ID NO: 48225 - DNA, 2199 bp, Homo sapiens
accttccatcttttcctcaacctccacttaatacttacaagtaattatttcatataataaaatagggataattgatttaaataataacaacaatgaaaaacagtgtagacaatacacatttttgaagcttttgcatgtatattctgcattagcaatgctttaggtctggaaaagtgtggattaacatataatttgctctgcctagtgtgttgttattagttttgttgaatgtgacactgtttctgaagctgtcaaagatagaacatgctgctcagtccttttaccgtctccgcctccaagaagagaaatctttaaatttagcctctgatatggtgtcaagagcagaaactattcagaagaataaagatcaggcccatcgtttaaagggagtgctccgagactccatagtgatgcttgaacagctgaagagctcactcattatgcttcagaaaacgtttgatctactaaataagaataagactggcatggctgttgaaagctagtgatctgaaggactaaaaccgcagagatacttggaacttaaagaaaatacctggaagaaaaccagacgaatgaaggattttggcatagaacatttctatgttttttcattattgagatttctaatatgaacatttctttcagtaacatttatttgataattagtttctgctggccttaataatccatcctttcacttcttatagatatttttaagctgtgaatttcttcagtgaaccatgaaatatattatagaactgaatttctctgatacaaaaagaaaatgacacaccctgaattgagtggtatggtctcatttctacagtgaagtctgatgctttgttagcacagaatccgtacatgtccaataggtcgcttttgtaactgagataagaccaagaggataaacaggacaatataagaagaaacctctatgtcattactgattttaaaggttctgttttcaggcatataacatttccaggtttgtgtactgtaaagattataatgtcttcatttatttagcatgcaaatttaatagtcaaactttttgaatctgcatgttgatgatgattatcagaaagggtcttctgccatgctgtatctttatgaaagaaatagttgttttttcttaaggtaactatcagaggtgggattatcttgcctcctcacttagaataccaacagtcaaaaggaagaaccatcctctgagttttaaaaaccagaaggttatgttaaaatctgggcatttagtgacagatcaaatgcatacttgaactaagattggcttcagcttagcagtctttcatggtggaagtgacacatctggttgaaaataatttgtgtattttcagtaaccatgtatggcttccttctttatgtatgtgtgtgacttgttttgattggtaagttataagccagacatagattttagctctttaataaaaacttcaggggcacgtatgtcccagtacaagtgtactgactatcaagttttaactcagatgcaagctttggctctttcataaaaagtttttatgcatatgtgtctccatacaagtggctcattaaaataagaactttgtaaactgacttaaaatcagatattttttcaagagttagggaaagttgaagtgttttactgttttgtctcttgagccctttctctggggaaaaaatacatatccatctatctatctatatataaactgtgtatacattcttactgtttgaacaactattgcctttaattaaatgtttcatttttctccagagtccccaaagccacatggcattattatagtcatttttgagatgcctgtagagaatgaaagtattgactccgttagagggaaaatgggtttctctgggtgaattccaacgaagcatacctaggggtaacagtgaacctacctgggtttgttttgttttggtaaggatttatgtagtgtctggctgtaagcaagaatgagtggattataaacttgaagatttctctgttaaagtcacaaaaatgatcgacaaacaatatttttgtgatgtttatttaaacgttgtattttataacatacttcaaggaagagtatcgaagtaagttgctttataaattaagactaaattcgtatggatgcagaattcaattaataaaatttgagcctgttacgtaaattgaatattaataaaattgaaaatttctga

SEQ ID NO: 48226 - DNA, 2526 bp, Homo sapiens
agtaccataatctgtctttgaaatctttctaatgatccaaggtaagtgggtagcctgttgtttccataactgaaattattacattaatatgtattaataacatagcacatggcaaatttgctctgatgagcccatcatttattaatacacattcattaagtgtaaaatttgaatctaggtcataagaacctaaggaatttgttaaagaaaattatcaaaaataaccaccaaaacccattgtatcttatagttgaggagctttcctcactatataaagattgtttttttttttcttagaatcagatttgttaattgaagaatctgtattaaatcaggccattgaagaccctggaaaacttactggcctacgaaggagaaggcgaaccttcaaccgaacagcagaaacagttcctaaactttcctctcagcattcctctggagatgtgggcttaggtgccaaaggggatattacaggaaagaaaaaggaaatggaaaactataacgtcactcttattgtggtaatgagtatttttgtgttgttattagttttgttgaatgtgacactgtttctgaagctgtcaaagatagaacatgctgctcagtccttttaccgtctccgcctccaagaagagaaatctttaaatttagcctctgatatggtgtcaagagcagaaactattcagaagaataaagatcaggcccatcgtttaaagggagtgctccgagactccatagtgatgcttgaacagctgaagagctcactcattatgcttcagaaaacgtttgatctactaaataagaataagactggcatggctgttgaaagctagtgatctgaaggactaaaaccgcagagatacttggaacttaaagaaaatacctggaagaaaaccagacgaatgaaggattttggcatagaacatttctatgttttttcattattgagatttctaatatgaacatttctttcagtaacatttatttgataattagtttctgctggccttaataatccatcctttcacttcttatagatatttttaagctgtgaatttcttcagtgaaccatgaaatatattatagaactgaatttctctgatacaaaaagaaaatgacacaccctgaattgagtggtatggtctcatttctacagtgaagtctgatgctttgttagcacagaatccgtacatgtccaataggtcgcttttgtaactgagataagaccaagaggataaacaggacaatataagaagaaacctctatgtcattactgattttaaaggttctgttttcaggcatataacatttccaggtttgtgtactgtaaagattataatgtcttcatttatttagcatgcaaatttaatagtcaaactttttgaatctgcatgttgatgatgattatcagaaagggtcttctgccatgctgtatctttatgaaagaaatagttgttttttcttaaggtaactatcagaggtgggattatcttgcctcctcacttagaataccaacagtcaaaaggaagaaccatcctctgagttttaaaaaccagaaggttatgttaaaatctgggcatttagtgacagatcaaatgcatacttgaactaagattggcttcagcttagcagtctttcatggtggaagtgacacatctggttgaaaataatttgtgtattttcagtaaccatgtatggcttccttctttatgtatgtgtgtgacttgttttgattggtaagttataagccagacatagattttagctctttaataaaaacttcaggggcacgtatgtcccagtacaagtgtactgactatcaagttttaactcagatgcaagctttggctctttcataaaaagtttttatgcatatgtgtctccatacaagtggctcattaaaataagaactttgtaaactgacttaaaatcagatattttttcaagagttagggaaagttgaagtgttttactgttttgtctcttgagccctttctctggggaaaaaatacatatccatctatctatctatatataaactgtgtatacattcttactgtttgaacaactattgcctttaattaaatgtttcatttttctccagagtccccaaagccacatggcattattatagtcatttttgagatgcctgtagagaatgaaagtattgactccgttagagggaaaatgggtttctctgggtgaattccaacgaagcatacctaggggtaacagtgaacctacctgggtttgttttgttttggtaaggatttatgtagtgtctggctgtaagcaagaatgagtggattataaacttgaagatttctctgttaaagtcacaaaaatgatcgacaaacaatatttttgtgatgtttatttaaacgttgtattttataacatacttcaaggaagagtatcgaagtaagttgctttataaattaagactaaattcgtatggatgcagaattcaattaataaaatttgagcctgttacgtaaattgaatattaataaaattgaaaatttctga

SEQ ID NO: 48227 - DNA, 2442 bp, Homo sapiens
accttccatcttttcctcaacctccacttaatacttacaagtaattatttcatataataaaatagggataattgatttaaataataacaacaatgaaaaacagtgtagacaatacacatttttgaagcttttgcatgtatattctgcattagcaatgctttaggtctggaaaagtgtggattaacatataatttgctctgcctagtgtgttgttattagttttgttgaatgtgacactgtttctgaagctgtcaaagatagaacatgctgctcagtccttttaccgtctccgcctccaagaagagaaatctttaaagtaagtctttttccccctgacctgtattcaccatattatttcagtaattcttcagttgcagaaaacttaatttcagtttcagagactgtggtctgctaactatcctgtagccataaacagcctgtttttgtttgtttaattttgtgttttgtttgcaaatttatggggctctgatgatttctggaaatgaaaaaaagatcagaagctattctccagattttgaagatggcatttttctttcagtttagcctctgatatggtgtcaagagcagaaactattcagaagaataaagatcaggcccatcgtttaaagggagtgctccgagactccatagtgatgcttgaacagctgaagagctcactcattatgcttcagaaaacgtttgatctactaaataagaataagactggcatggctgttgaaagctagtgatctgaaggactaaaaccgcagagatacttggaacttaaagaaaatacctggaagaaaaccagacgaatgaaggattttggcatagaacatttctatgttttttcattattgagatttctaatatgaacatttctttcagtaacatttatttgataattagtttctgctggccttaataatccatcctttcacttcttatagatatttttaagctgtgaatttcttcagtgaaccatgaaatatattatagaactgaatttctctgatacaaaaagaaaatgacacaccctgaattgagtggtatggtctcatttctacagtgaagtctgatgctttgttagcacagaatccgtacatgtccaataggtcgcttttgtaactgagataagaccaagaggataaacaggacaatataagaagaaacctctatgtcattactgattttaaaggttctgttttcaggcatataacatttccaggtttgtgtactgtaaagattataatgtcttcatttatttagcatgcaaatttaatagtcaaactttttgaatctgcatgttgatgatgattatcagaaagggtcttctgccatgctgtatctttatgaaagaaatagttgttttttcttaaggtaactatcagaggtgggattatcttgcctcctcacttagaataccaacagtcaaaaggaagaaccatcctctgagttttaaaaaccagaaggttatgttaaaatctgggcatttagtgacagatcaaatgcatacttgaactaagattggcttcagcttagcagtctttcatggtggaagtgacacatctggttgaaaataatttgtgtattttcagtaaccatgtatggcttccttctttatgtatgtgtgtgacttgttttgattggtaagttataagccagacatagattttagctctttaataaaaacttcaggggcacgtatgtcccagtacaagtgtactgactatcaagttttaactcagatgcaagctttggctctttcataaaaagtttttatgcatatgtgtctccatacaagtggctcattaaaataagaactttgtaaactgacttaaaatcagatattttttcaagagttagggaaagttgaagtgttttactgttttgtctcttgagccctttctctggggaaaaaatacatatccatctatctatctatatataaactgtgtatacattcttactgtttgaacaactattgcctttaattaaatgtttcatttttctccagagtccccaaagccacatggcattattatagtcatttttgagatgcctgtagagaatgaaagtattgactccgttagagggaaaatgggtttctctgggtgaattccaacgaagcatacctaggggtaacagtgaacctacctgggtttgttttgttttggtaaggatttatgtagtgtctggctgtaagcaagaatgagtggattataaacttgaagatttctctgttaaagtcacaaaaatgatcgacaaacaatatttttgtgatgtttatttaaacgttgtattttataacatacttcaaggaagagtatcgaagtaagttgctttataaattaagactaaattcgtatggatgcagaattcaattaataaaatttgagcctgttacgtaaattgaatattaataaaattgaaaatttctga

SEQ ID NO: 48228 - DNA, 4158 bp, Homo sapiens
gccctttgatttaacctgactaatattgacagatgctttacccagatcattcttagagcttgatttctgaaacatggggagcttttgcagcaatttttattctgtatcgatggggcatcatccttgagataatagtaagtaatcttggtcctgaaatcattacaatttcatattgaattgctttatgttacttcctctattatgccaggcttctgttccttggtttttttttttttcttttctgtttggttcttctaagttaaattccttctggcggtataaaatagatgttaagtttatgtgctctggagctggagtgggttcaaattccaggtcagtcactcactagccatggagcctcagcaattatttctgtgattctgtttccccatctggaaataatgatgataataccacttatctcatagcattgcagtgagaataagatgagtcaatacttgtaaggtatgtagcacaatgtctaacatatagtaagcactatgtaagtatgggctattttatataatatttccagggcatatgagaataggtgagcaagatattgcttcttcatttgtcactagtagttttcaacatcactatgattatcaaattcccagaaaaaatgtaataattcattgggcatttgttagctctgatgaatacttttcagaaggatttcttagttcttttaatgtgtgatgttgaaaataggttgtgattacagtcattcttgtctttgggtagtgaacattaagtcaagttgaaacattattcaggctgataagctaagtgcagcagatattatagccattgataaattaatatttactgagtgagcattcagaggtagaagttgctaatttctatgttagatactatcttatgtgtctatattgtccttgtcccttttgaaatattcttttgagtgacatattatggccatttgataccattcaagtgaaatatttctgtatcttttgggttttgacagttgaaatattgattatatgtagtttagttaactatatattgttatgcatagttataggtcatacatatgtatatatttaattcctatttggagttttaatagtgtcctagaatgttctcctcattgtaatcatatttaaaaaccattttatgcccaaaataaaaaaagaaaaccccacgaaaccccctaaagccttaaaataaactttctttgatttcttctcttttggtttgtgtttctgtttttccagaaaatgttcctgagaaagatcttcatggaagactttttatcaaccgtatttttcatatcagtgctgacagaatgtttgaattgctctttaccagttcacgctttatgcagaaatttgccagttctagaaatataatagatgtagtatctaccccttggactgcagaacttggaggtgatcagctgagaacgatgacctacactatagtccttaatagtccacttactggaaaatgcactgctgccactgaaaagcagacactgtataaagaaagtcgggaagcacgattttatttggtagattcagaagtactgacacatgatgtcccctaccatgattacttctataccgtgaacagatactgtatcatccgatcttcaaaacagaaatgcaggctaagagtttccacagatttgaaatacagaaaacagccatggggccttgtcaaatctttaattgaaaagaattcctggagttctttggaggactatttcaaacagcttgaatcagatttgttaattgaagaatctgtattaaatcaggccattgaagaccctggaaaacttactggcctacgaaggagaaggcgaaccttcaaccgaacagcagaaacagttcctaaactttcctctcagcattcctctggagatgtgggcttaggtgccaaaggggatattacaggaaagaaaaaggaaatggaaaactataacgtcactcttattgtggtaatgagtatttttgtgttgttattagttttgttgaatgtgacactgtttctgaagctgtcaaagatagaacatgctgctcagtccttttaccgtctccgcctccaagaagagaaatctttaaatttagcctctgatatggtgtcaagagcagaaactattcagaagaataaagatcaggcccatcgtttaaagggagtgctccgagactccatagtgatgcttgaacagctgaagagctcactcattatgcttcagaaaacgtttgatctactaaataagaataagactggcatggctgttgaaagctagtgatctgaaggactaaaaccgcagagatacttggaacttaaagaaaatacctggaagaaaaccagacgaatgaaggattttggcatagaacatttctatgttttttcattattgagatttctaatatgaacatttctttcagtaacatttatttgataattagtttctgctggccttaataatccatcctttcacttcttatagatatttttaagctgtgaatttcttcagtgaaccatgaaatatattatagaactgaatttctctgatacaaaaagaaaatgacacaccctgaattgagtggtatggtctcatttctacagtgaagtctgatgctttgttagcacagaatccgtacatgtccaataggtcgcttttgtaactgagataagaccaagaggataaacaggacaatataagaagaaacctctatgtcattactgattttaaaggttctgttttcaggcatataacatttccaggtttgtgtactgtaaagattataatgtcttcatttatttagcatgcaaatttaatagtcaaactttttgaatctgcatgttgatgatgattatcagaaagggtcttctgccatgctgtatctttatgaaagaaatagttgttttttcttaaggtaactatcagaggtgggattatcttgcctcctcacttagaataccaacagtcaaaaggaagaaccatcctctgagttttaaaaaccagaaggttatgttaaaatctgggcatttagtgacagatcaaatgcatacttgaactaagattggcttcagcttagcagtctttcatggtggaagtgacacatctggttgaaaataatttgtgtattttcagtaaccatgtatggcttccttctttatgtatgtgtgtgacttgttttgattggtaagttataagccagacatagattttagctctttaataaaaacttcaggggcacgtatgtcccagtacaagtgtactgactatcaagttttaactcagatgcaagctttggctctttcataaaaagtttttatgcatatgtgtctccatacaagtggctcattaaaataagaactttgtaaactgacttaaaatcagatattttttcaagagttagggaaagttgaagtgttttactgttttgtctcttgagccctttctctggggaaaaaatacatatccatctatctatctatatataaactgtgtatacattcttactgtttgaacaactattgcctttaattaaatgtttcatttttctccagagtccccaaagccacatggcattattatagtcatttttgagatgcctgtagagaatgaaagtattgactccgttagagggaaaatgggtttctctgggtgaattccaacgaagcatacctaggggtaacagtgaacctacctgggtttgttttgttttggtaaggatttatgtagtgtctggctgtaagcaagaatgagtggattataaacttgaagatttctctgttaaagtcacaaaaatgatcgacaaacaatatttttgtgatgtttatttaaacgttgtattttataacatacttcaaggaagagtatcgaagtaagttgctttataaattaagactaaattcgtatggatgcagaattcaattaataaaatttgagcctgttacgtaaattgaatattaataaaattgaaaatttctgaaaaaaaaaaaaggggggggtttaaatatcctagaggggccaagttaggtaccaggttctgtcaagtggcctatgtagtggataaagaagaggggggttaaagtcgaggaaagtgtggatttggagactcttgggggtatggacccaggttagcggaaaatggtagtgacgttgggaggata

SEQ ID NO: 48229 - DNA, 2408 bp, Homo sapiens
gccctttgatttaacctgactaatattgacagatgctttacccagatcattcttagagcttgatttctgaaacatggggagcttttgcagcaatttttattctgtatcgatggggcatcatccttgagataatagtaagtaatcttggtcctgaaatcattacaatttcatattgaattgctttatgttacttcctctattatgccaggcttctgttccttggtttttttttttttcttttctgtttggttcttctaagttaaattccttctggcggtataaaatagatgttaagtttatgtgctctggagctggagtgggttcaaattccaggtcagtcactcactagccatggagcctcagcaattatttctgtgattctgtttccccatctggaaataatgatgataataccacttatctcatagcattgcagtgagaataagatgagtcaatacttgtaaggtatgtagcacaatgtctaacatatagtaagcactatgtaagtatgggctattttatataatatttccagggcatatgagaataggtgagcaagatattgcttcttcatttgtcactagtagttttcaacatcactatgattatcaaattcccagaaaaaatgtaataattcattgggcatttgttagctctgatgaatacttttcagaaggatttcttagttcttttaatgtgtgatgttgaaaataggttgtgattacagtcattcttgtctttgggtagtgaacattaagtcaagttgaaacattattcaggctgataagctaagtgcagcagatattatagccattgataaattaatatttactgagtgagcattcagaggtagaagttgctaatttctatgttagatactatcttatgtgtctatattgtccttgtcccttttgaaatattcttttgagtgacatattatggccatttgataccattcaagtgaaatatttctgtatcttttgggttttgacagttgaaatattgattatatgtagtttagttaactatatattgttatgcatagttataggtcatacatatgtatatatttaattcctatttggagttttaatagtgtcctagaatgttctcctcattgtaatcatatttaaaaaccattttatgcccaaaataaaaaaagaaaaccccacgaaaccccctaaagccttaaaataaactttctttgatttcttctcttttggtttgtgtttctgtttttccagaaaatgttcctgagaaagatcttcatggaagactttttatcaaccgtatttttcatatcagtgctgacagaatgtttgaattgctctttaccagttcacgctttatgcagaaatttgccagttctagaaatataatagatgtagtatctaccccttggactgcagaacttggaggtgatcagctgagaacgatgacctacactatagtccttaatagtccacttactggaaaatgcactgctgccactgaaaagcagacactgtataaagaaagtcgggaagcacgattttatttggtagattcagaagtactgacacatgatgtcccctaccatgattacttctataccgtgaacagatactgtatcatccgatcttcaaaacagaaatgcaggctaagagtttccacagatttgaaatacagaaaacagccatggggccttgtcaaatctttaattgaaaagaattcctggagttctttggaggactatttcaaacagcttgaatcagatttgttaattgaagaatctgtattaaatcaggccattgaagaccctggaaaacttactggcctacgaaggagaaggcgaaccttcaaccgaacagcagaaacagttcctaaactttcctctcagcattcctctggagatgtgggcttaggtgccaaaggggatattacaggtagttgtcacctggtaaacagagatgaaagatttttactttagttatatgaagcagaatgtgcctcttgtttgtaagaatatgtcaggaggtctccttttcttccctcctttttggataatgtttatcaaactctgatttcctttaagataactaatatataagtataaaggagcagttgcaaaatggcaagcatataaccaatatattttatttggcccatgtgtcattttaagaattggacattaaactttttttaaaattttatttattttttctagatagggtctcgttctgttgcccatgctgtaagtggcacaatcatggctcagtgtaacctcgggctcctgggctcaagtgagcctcctgcctcagcctcctgagtagctgagattacaggtgtgcaccaccacacctggctaaaattggacctttttatataaaaactcagatctgacagtccagcactgaaatcccttcatg

SEQ ID NO: 48230 - DNA, 2777 bp, Homo sapiens
cggacgcgtgggcaaaagcagcacttcagattctgttgatgaagaaaatgttcctgagaaagatcttcatggaagactttttatcaaccgtatttttcatatcagtgctgacagaatgtttgaattgctctttaccagttcacgctttatgcagaaatttgccagttctagaaatataatagatgtagtatctaccccttggactgcagaacttggaggtgatcagctgagaacgatgacctacactatagtccttaatagtccacttactggaaaatgcactgctgccactgaaaagcagacactgtataaagaaagtcgggaagcacgattttatttggtagattcagaagtactgacacatgatgtcccctaccatgattacttctataccgtgaacagatactgtatcatccgatcttcaaaacagaaatgcaggctaagagtttccacagatttgaaatacagaaaacagccatggggccttgtcaaatctttaattgaaaagaattcctggagttctttggaggactatttcaaacagcttgaatcagatttgttaattgaagaatctgtattaaatcaggccattgaagaccctggaaaacttactggcctacgaaggagaaggcgaaccttcaaccgaacagcagaaacagttcctaaactttcctctcagcattcctctggagatgtgggcttaggtgccaaaggggatattacaggaaagaaaaaggaaatggaaaactataacgtcactcttattgtggtaatgagtatttttgtgttgttattagttttgttgaatgtgacactgtttctgaagctgtcaaagatagaacatgctgctcagtccttttaccgtctccgcctccaagaagagaaatctttaaatttagcctctgatatggtgtcaagagcagaaactattcagaagaataaagatcaggcccatcgtttaaagggagtgctccgagactccatagtgatgcttgaacagctgaagagctcactcattatgcttcagaaaacgtttgatctactaaataagaataagactggcatggctgttgaaagctagtgatctgaaggactaaaaccgcagagatacttggaacttaaagaaaatacctggaagaaaaccagacgaatgaaggattttggcatagaacatttctatgttttttcattattgagatttctaatatgaacatttctttcagtaacatttatttgataattagtttctgctggccttaataatccatcctttcacttcttatagatatttttaagctgtgaatttcttcagtgaaccatgaaatatattatagaactgaatttctctgatacaaaaagaaaatgacacaccctgaattgagtggtatggtctcatttctacagtgaagtctgatgctttgttagcacagaatccgtacatgtccaataggtcgcttttgtaactgagataagaccaagaggataaacaggacaatataagaagaaacctctatgtcattactgattttaaaggttctgttttcaggcatataacatttccaggtttgtgtactgtaaagattataatgtcttcatttatttagcatgcaaatttaatagtcaaactttttgaatctgcatgttgatgatgattatcagaaagggtcttctgccatgctgtatctttatgaaagaaatagttgttttttcttaaggtaactatcagaggtgggattatcttgcctcctcacttagaataccaacagtcaaaaggaagaaccatcctctgagttttaaaaaccagaaggttatgttaaaatctgggcatttagtgacagatcaaatgcatacttgaactaagattggcttcagcttagcagtctttcatggtggaagtgacacatctggttgaaaataatttgtgtattttcagtaaccatgtatggcttccttctttatgtatgtgtgtgacttgttttgattggtaagttataagccagacatagattttagctctttaataaaaacttcaggggcacgtatgtcccagtacaagtgtactgactatcaagttttaactcagatgcaagctttggctctttcataaaaagtttttatgcatatgtgtctccatacaagtggctcattaaaataagaactttgtaaactgacttaaaatcagatattttttcaagagttagggaaagttgaagtgttttactgttttgtctcttgagccctttctctggggaaaaaatacatatccatctatctatctatatataaactgtgtatacattcttactgtttgaacaactattgcctttaattaaatgtttcatttttctccagagtccccaaagccacatggcattattatagtcatttttgagatgcctgtagagaatgaaagtattgactccgttagagggaaaatgggtttctctgggtgaattccaacgaagcatacctaggggtaacagtgaacctacctgggtttgttttgttttggtaaggatttatgtagtgtctggctgtaagcaagaatgagtggattataaacttgaagatttctctgttaaagtcacaaaaatgatcgacaaacaatatttttgtgatgtttatttaaacgttgtattttataacatacttcaaggaagagtatcgaagtaagttgctttataaattaagactaaattcgtatggatgcagaattcaattaataaaatttgagcctgttacgtaaattgaatattaataaaattgaaaatttctga

SEQ ID NO: 48231 - DNA, 3977 bp, Homo sapiens
gccctttgatttaacctgactaatattgacagatgctttacccagatcattcttagagcttgatttctgaaacatggggagcttttgcagcaatttttattctgtatcgatggggcatcatccttgagataatagtaagtaatcttggtcctgaaatcattacaatttcatattgaattgctttatgttacttcctctattatgccaggcttctgttccttggtttttttttttttcttttctgtttggttcttctaagttaaattccttctggcggtataaaatagatgttaagtttatgtgctctggagctggagtgggttcaaattccaggtcagtcactcactagccatggagcctcagcaattatttctgtgattctgtttccccatctggaaataatgatgataataccacttatctcatagcattgcagtgagaataagatgagtcaatacttgtaaggtatgtagcacaatgtctaacatatagtaagcactatgtaagtatgggctattttatataatatttccagggcatatgagaataggtgagcaagatattgcttcttcatttgtcactagtagttttcaacatcactatgattatcaaattcccagaaaaaatgtaataattcattgggcatttgttagctctgatgaatacttttcagaaggatttcttagttcttttaatgtgtgatgttgaaaataggttgtgattacagtcattcttgtctttgggtagtgaacattaagtcaagttgaaacattattcaggctgataagctaagtgcagcagatattatagccattgataaattaatatttactgagtgagcattcagaggtagaagttgctaatttctatgttagatactatcttatgtgtctatattgtccttgtcccttttgaaatattcttttgagtgacatattatggccatttgataccattcaagtgaaatatttctgtatcttttgggttttgacagttgaaatattgattatatgtagtttagttaactatatattgttatgcatagttataggtcatacatatgtatatatttaattcctatttggagttttaatagtgtcctagaatgttctcctcattgtaatcatatttaaaaaccattttatgcccaaaataaaaaaagaaaaccccacgaaaccccctaaagccttaaaataaactttctttgatttcttctcttttggtttgtgtttctgtttttccagaaaatgttcctgagaaagatcttcatggaagactttttatcaaccgtatttttcatatcagtgctgacagaatgtttgaattgctctttaccagttcacgctttatgcagaaatttgccagttctagaaatataatagatgtagtatctaccccttggactgcagaacttggaggtgatcagctgagaacgatgacctacactatagtccttaatagtccacttactggaaaatgcactgctgccactgaaaagcagacactgtataaagaaagtcgggaagcacgattttatttggtagattcagaagtactgacacatgatgtcccctaccatgattacttctataccgtgaacagatactgtatcatccgatcttcaaaacagaaatgcaggctaagagtttccacagatttgaaatacagaaaacagccatggggccttgtcaaatctttaattgaaaagaattcctggagttctttggaggactatttcaaacagcttgaatcagatttgttaattgaagaatctgtattaaatcaggccattgaagaccctggaaaacttactggcctacgaaggagaaggcgaaccttcaaccgaacagcagaaacagttcctaaactttcctctcagcattcctctggagatgtgggcttaggtgccaaaggggatattacaggaaagaaaaaggaaatggaaaactataacgtcactcttattgtggtaatgagtatttttgtgttgttattagttttgttgaatgtgacactgtttctgaagctgtcaaagatagaacatgctgctcagtccttttaccgtctccgcctccaagaagagaaatctttaaatttagcctctgatatggtgtcaagagcagaaactattcagaagaataaagatcaggcccatcgtttaaagggagtgctccgagactccatagtgatgcttgaacagctgaagagctcactcattatgcttcagaaaacgtttgatctactaaataagaataagactggcatggctgttgaaagctagtgatctgaaggactaaaaccgcagagatacttggaacttaaagaaaatacctggaagaaaaccagacgaatgaaggattttggcatagaacatttctatgttttttcattattgagatttctaatatgaacatttctttcagtaacatttatttgataattagtttctgctggccttaataatccatcctttcacttcttatagatatttttaagctgtgaatttcttcagtgaaccatgaaatatattatagaactgaatttctctgatacaaaaagaaaatgacacaccctgaattgagtggtatggtctcatttctacagtgaagtctgatgctttgttagcacagaatccgtacatgtccaataggtcgcttttgtaactgagataagaccaagaggataaacaggacaatataagaagaaacctctatgtcattactgattttaaaggttctgttttcaggcatataacatttccaggtttgtgtactgtaaagattataatgtcttcatttatttagcatgcaaatttaatagtcaaactttttgaatctgcatgttgatgatgattatcagaaagggtcttctgccatgctgtatctttatgaaagaaatagttgttttttcttaaggtaactatcagaggtgggattatcttgcctcctcacttagaataccaacagtcaaaaggaagaaccatcctctgagttttaaaaaccagaaggttatgttaaaatctgggcatttagtgacagatcaaatgcatacttgaactaagattggcttcagcttagcagtctttcatggtggaagtgacacatctggttgaaaataatttgtgtattttcagtaaccatgtatggcttccttctttatgtatgtgtgtgacttgttttgattggtaagttataagccagacatagattttagctctttaataaaaacttcaggggcacgtatgtcccagtacaagtgtactgactatcaagttttaactcagatgcaagctttggctctttcataaaaagtttttatgcatatgtgtctccatacaagtggctcattaaaataagaactttgtaaactgacttaaaatcagatattttttcaagagttagggaaagttgaagtgttttactgttttgtctcttgagccctttctctggggaaaaaatacatatccatctatctatctatatataaactgtgtatacattcttactgtttgaacaactattgcctttaattaaatgtttcatttttctccagagtccccaaagccacatggcattattatagtcatttttgagatgcctgtagagaatgaaagtattgactccgttagagggaaaatgggtttctctgggtgaattccaacgaagcatacctaggggtaacagtgaacctacctgggtttgttttgttttggtaaggatttatgtagtgtctggctgtaagcaagaatgagtggattataaacttgaagatttctctgttaaagtcacaaaaatgatcgacaaacaatatttttgtgatgtttatttaaacgttgtattttataacatacttcaaggaagagtatcgaagtaagttgctttataaattaagactaaattcgtatggatgcagaattcaattaataaaatttgagcctgttacgtaaattgaatattaataaaattgaaaatttctga

SEQ ID NO: 48232 - DNA, 227 bp, Homo sapiens
aaagtattccccttttatttttaaagtgaaaagcaaattgaaaaaaatagaattagatccgagctttattttcaacacatgtacataaataagccaggcacagaaagacaaatgtcatgcattctcacttatttgtgggatctaaaaatcaaaacaattgaattcatggacatagaaagtagaaggatggtttccggaggctgggaaggatagttaggggtgggggc

SEQ ID NO: 48233 - DNA, 1357 bp, Homo sapiens
tgtgaagaatctgatagtcgaactgaatgaagccaagtccagtctttacggaaaaatttacacaacacttccagcagtgacctgagaagctacgtattgacacggcgctaccacgggtggaggagcctgcattgctgaatcacaggatgaaggcgaatccctgccagcctccatccatctctggggtgcttagcagaatcctcagctcacaagatgaataaatgcagactaaatgatgcacaaataatcttcacacacaaccatcaacacatggaaagactgcaggacggccagatcccaagctaacaaacaggggaagatgatgtttcaaatgatcatctgaatgctgggtttccaccttccaccaggaagtcatatggtaaaaagaaaaaaaatggcattatgatacaaacagaaaatgtaacagtggagtgcagaaaatacaaaaaaaaggaaaaaataaatagaaaatcttcaaagaggcaatctgtttaaatcttcaagaactggaaacagtaaaagtgaacaggtttttattgagcatgtcaataaaatgtttgcataagactttacaagtgctttatttcatgaggtttttattattgatcaaagcaacgaaaatgaacgggaaattcattctcatcaaatctacaacttgggaggaggtccgatgaaatccctggaagctcacattttttataaatgaagagttaattaccggtgggaacaatgagaacctctgtggttcttcctgatgcttggatcctcccagacctctgtttccagtctccttctccacaacctggcctatgcgatgcaagtggtctaactgatctccgcctagggaaggatccttcggcaacttgccgacaagagaagcagcgatgcccgaggcaggtccaaaggagcactgactgcgtgggattgattacactggaggaacaaaaggtcctgtggctacacaagtttgaaaagcagaaggtacaatcattgtatttctggcagacttttcaaagactttaatatatgaatccctcatatgaatctcctggaggattatataataggcagatctcccagccattttcactgaacagttcttagaattggtatccttgaaaaatttcacctaaccactcaatatggtagccactagtcctgggtggctattgagcacctgaaatttgcctagtctgaattaagacacattctaagaataaagcacactgtatttcaaaggcagtacaaaaataaaaaagaatgtaagctgtctcaataataatttttgtattgaatacgtgttgaaatgatgttatttttgatatattgagtgaaataaattgtattgctaaaatga

SEQ ID NO: 48234 - DNA, 1030 bp, Homo sapiens
tcaatcctctccgtaactttacccaatatttaaaaaattatctaaaatatttagaaaaagaaaaaaaatggcattatgatacaaacagaaaatgtaacagtggagtgcagaaaatacaaaaaaaaggaaaaaataaatagaaaatcttcaaagaggcaatctgtttaaatcttcaagaactggaaacagtaaaagtgaacaggtttttattgagcatgtcaataaaatgtttgcataagactttacaagtgctttatttcatgaggtttttattattgatcaaagcaacgaaaatgaacgggaaattcattctcatcaaatctacaacttgggaggaggtccgatgaaatccctggaagctcacattttttataaatgaagagttaattaccggtgggaacaatgagaacctctgtggttcttcctgatgcttggatcctcccagacctctgtttccagtctccttctccacaacctggcctatgcgatgcaagtggtctaactgatctccgcctagggaaggatccttcggcaacttgccgacaagagaagcagcgatgcccgaggcaggtccaaaggagcactgactgcgtgggattgattacactggaggaacaaaaggtcctgtggctacacaagtttgaaaagcagaaggtacaatcattgtatttctggcagacttttcaaagactttaatatatgaatccctcatatgaatctcctggaggattatataataggcagatctcccagccattttcactgaacagttcttagaattggtatccttgaaaaatttcacctaaccactcaatatggtagccactagtcctgggtggctattgagcacctgaaatttgcctagtctgaattaagacacattctaagaataaagcacactgtatttcaaaggcagtacaaaaataaaaaagaatgtaagctgtctcaataataatttttgtattgaatacgtgttgaaatgatgttatttttgatatattgagtgaaataaattgtattgctaaaatga

SEQ ID NO: 48235 - DNA, 187 bp, Homo sapiens
tgtgaagaatctgatagtcgaactgaatgaagccaagtccagtctttacggaaaaatttacacaacacttccaggtgggcagattcaaagacaggatgaatcatggttcagtgcagtggttcctggctgtaatcctagcactttgggaggccgaggcagggggactgcttaagaccaggaattcaag

SEQ ID NO: 48236 - DNA, 1983 bp, Homo sapiens
agtgtgtaaaagagaagagaggtccaaactgaaatctgaggagcctcaacattcagaactcaactgggcgctgtggctcaagcctgtaatcccagcactttgggaggacgaggcaggcagaacacctgaggtgagaagtttgagaccagcctggccaacatggccaaaccttgtctctactgaaaatataaaaattagccaggcatggtggcgagcgcctgtaatcccacctactctggaggctgaggcagaagaatctcttgaacctggaaggcggaggttgcagtgagccgagatcacaccactgccctccagcctgggcgacagaacaagactccgtgtcagaaaaaaaaaaagaaaagaaaagaaaaagaaaaagaaaagaactcggtggagcacaagtagctgagtaatgccccagaagccggcatcattgttggacagctcagatgttcaggatgtttcattttgagcctacctcattggaatttcaaaatattggcctctttggagcaatacagagcaagtctgttccttcaagtagatgaaaagctccctgcatgtcttccattggacttctcccctttagcttaaaaatatccacagtcctgaaacatggctcagaagcagatattacccaaaccctactcttaaagctcggccagccagccacatgcaggaccctgaagcaaataagaggcagtgacctgagaagctacgtattgacacggcgctaccacgggtggaggagcctgcattgctgaatcacaggatgaaggcgaatccctgccagcctccatccatctctggggtgcttagcagaatcctcagctcacaagatgaataaatgcagactaaatgatgcacaaataatcttcacacacaaccatcaacacatggaaagactgcaggacggccagatcccaagctaacaaacaggggaagatgatgtttcaaatgatcatctgaatgctgggtttccaccttccaccaggaagtcatatggtaaaaagaaaaaaaatggcattatgatacaaacagaaaatgtaacagtggagtgcagaaaatacaaaaaaaaggaaaaaataaatagaaaatcttcaaagaggcaatctgtttaaatcttcaagaactggaaacagtaaaagtgaacaggtttttattgagcatgtcaataaaatgtttgcataagactttacaagtgctttatttcatgaggtttttattattgatcaaagcaacgaaaatgaacgggaaattcattctcatcaaatctacaacttgggaggaggtccgatgaaatccctggaagctcacattttttataaatgaagagttaattaccggtgggaacaatgagaacctctgtggttcttcctgatgcttggatcctcccagacctctgtttccagtctccttctccacaacctggcctatgcgatgcaagtggtctaactgatctccgcctagggaaggatccttcggcaacttgccgacaagagaagcagcgatgcccgaggcaggtccaaaggagcactgactgcgtgggattgattacactggaggaacaaaaggtcctgtggctacacaagtttgaaaagcagaaggtacaatcattgtatttctggcagacttttcaaagactttaatatatgaatccctcatatgaatctcctggaggattatataataggcagatctcccagccattttcactgaacagttcttagaattggtatccttgaaaaatttcacctaaccactcaatatggtagccactagtcctgggtggctattgagcacctgaaatttgcctagtctgaattaagacacattctaagaataaagcacactgtatttcaaaggcagtacaaaaataaaaaagaatgtaagctgtctcaataataatttttgtattgaatacgtgttgaaatgatgttatttttgatatattgagtgaaataaattgtattgctaaaatga

SEQ ID NO: 48237 - DNA, 1380 bp, Homo sapiens
agtgtgtaaaagagaagagaggtccaaactgaaatctgaggagcctcaacattcagaactcaactgggcgctgtggctcaagcctgtaatcccagcactttgggaggacgaggcaggcagaacacctgaggtgagaagtttgagaccagcctggccaacatggccaaaccttgtctctactgaaaatataaaaattagccaggcatggtggcgagcgcctgtaatcccacctactctggaggctgaggcagaagaatctcttgaacctggaaggcggaggttgcagtgagccgagatcacaccactgccctccagcctgggcgacagaacaagactccgtgtcagaaaaaaaaaaagaaaagaaaagaaaaagaaaaagaaaagaactcggtggagcacaagtagctgagtaatgccccagaagccggcatcattgttggacagctcagatgttcaggatgtttcattttgagcctacctcattggaatttcaaaatattggcctctttggagcaatacagagcaagtctgttccttcaagtagatgaaaagctccctgcatgtcttccattggacttctcccctttagcttaaaaatatccacagtcctgaaacatggctcagaagcagatattacccaaaccctactcttaaagctcggccagccagccacatgcaggaccctgaagcaaataagaggcagtgacctgagaagctacgtattgacacggcgctaccacgggtggaggagcctgcattgctgaatcacaggatgaaggcgaatccctgccagcctccatccatctctggggtgcttagcagaatcctcagctcacaagatgaataaatgcagactaaatgatgcacaaataatcttcacacacaaccatcaacacatggaaagactgcaggacggccagatcccaagctaacaaacaggggaagatgatgtttcaaatgatcatctgaatgctgggtttccaccttccaccaggaagtcatatggtcaaattatcccggatcctgaaatatatcttttgatagaaatgactctggtactttccgcaacttactttctatggagcactttcctgaaacaagatttgtgtttaaatattcctccttctacaaagtattaaacagtagtaagttctgcaacgttgacaatggaaacctggcaatgtgcccttgtttgactattaaggaattgcttccaagtaccacagggccttgaagaccaaaataacacaattacctggaaggtgaacaatggcaacttatcaggtgtggtaaacacttttttcccaagaagatcctttattccttctgaatgcacatcaagaaggagtgaatacataaatcacatatttgttaataaga

SEQ ID NO: 48238 - DNA, 419 bp, Homo sapiens
aagagtgtggtaaacagaagctcagctccttcaaggatgacagccttggttacaccaccagattcctcttcaggaccaaggactcattttccagctggcaggaatgttagctactgacggccatggctgagttcctcttcaggaattatcctccacttgaggggaattgctttgttcagtgttacactccctctatagtggcagcccacactggttgatgtggggtacaaagtcctggaccttgtcttagatgggatagttctgaagggctattccagctccagaactcctcataggattggctgaggtctcctctgcaactggatcacagttcaactttttcttctgcccagtccttcttctctcatctgttgccagttttattcgtgagtgtgtttcccaataaaccccctgcatgc

SEQ ID NO: 48239 - DNA, 769 bp, Homo sapiens
tgtggaagattagaagataatggatactattattccatccagattcctcttcaggaccaaggactcattttccagctggcaggaatgttagctactgacggccatggctgagttcctcttcaggaattatcctccacttgaggggaattgctttgttcagtgttacactccctctatagtggcagcccacactggttgatgtggggtacaaagtcctggaccttgtcttagatgggatagttctgaagggctattccagctccagaactcctcataggattggctgaggtctcctctgcaactggatcacagttcaactttttcttctgcccagtccttcttctctcatctgttgccagttttattcgtgtgagcattcggatcaccaacgctgtgacctcgctgtgtgaacgggagctactacaggaaggaagcttacaaatgagctgcatggatcccacattttgctaaaatcaaataggacctttctcctctttgttgaatgccgtaatacacaagaaataagccagcaggatgctcatgtccaaggtataccactttatcataccacacgagttggcatgaacacaacttctggggttcaaactcttctgaacacagataccagtcttggcaaactacccaagactactcctaaacgaggacattcaatagccttcaagtcgtaacttgcgatacaatcatctcctattggctcacaagcttcatgccagcggtatctccacagagcctgggccatattaactcc

SEQ ID NO: 48240 - DNA, 180 bp, Homo sapiens
caggtgtgcaccaccacgcctgggtaattttttgtggagacagtttcaccatgttgcgcaggctcgtctcaaattcctgggctcaagagctccgccagccttgacctcccaaactgggtgttttcttgccattgtgagccagctgctagattcccgcatgcacgttttagctatgtttct

SEQ ID NO: 48241 - DNA, 401 bp, Homo sapiens
caaggtgagccctagaatgattccagctgtctacctggaatcacttataggactgactcagaggaagaacgaagttcagcagtggtggtcctactgagctgagaagacagagctcagagttggggcggtagttggaatatgctgggaagggtgttggaatggagggaacagctctagggatatggggtctggtgagtactggctgaatgtaaagctgtgtcttcttagggaaatttcgtgagctatgcaaagaataactactggagtttttctgtgtaggagatgttcaactcctactagttggagtggaacgaccaagttgaatactggcataattagtgtggaacccagaagggccacactctagggctaaatcagccctcaaaggcctttctagacca

SEQ ID NO: 48242 - DNA, 375 bp, Homo sapiens
tggttgccatctctcagtggcccatcattcttacatatttcatcgccattgttattcttttcaggtcattacatcttcattgtaaaatttatcctctcacctgggtttcttctttgtgccaccttagtttcttagataaatcatcatattttcctagattcccatgaagatctgtgaaaggaaaagaggtggtgatttgggacagaataggattcacagcctataggaactctagagggacaaagttcttgcatattatctaatcagaatgatttagtgccaacttgtagatctcaaaacttggaaaaaagtaaaaattgtcaaaatatatcaagaatggatgagaagggattaaaaccaggtgataaggatggg

SEQ ID NO: 48243 - DNA, 195 bp, Homo sapiens
gtggaaggtattgaggatgagctgagaccatctgcatagagggcttaacatagtgactggtacttagcaaatgctccatgagttatgattgctggcactggcatgctctccagagtggccctcaggacaggggccctcagccaccaaatcctagacagggcttcctctgacagaggtgcaggctatgactacatg

SEQ ID NO: 48244 - DNA, 355 bp, Homo sapiens
tcctgttttaaaagcaaaacgaatgctaaagaatttttaaaagtcaagttttaaaaactcttttcccatttctctctaccctctaagcggacgtgtacccaaacagtctcaatttatgtttcaatttctacagaagattggttattcctcataattctccatcagatgatttctagaggcaatctcctctactttggcactgtaatgaataaaacttcattgtcatgataaaagcctcgctctcttttaaagaaaaaacagatcctaggatcctagatttttgaaaatggaaaaaattcttctacaggtaggtctcccttttctaattaccaacaaagtcatatttaagataaat

SEQ ID NO: 48245 - DNA, 373 bp, Homo sapiens
gatcaaggaaacaacatcacataaaaatgaacaacagaaagagattaatagaaaatcccatacagattctatataaaaaattgaggaaaatagaccaaaaacccacaagaaagatgggcaaacacatgaacagattatcccccaccagtgtacaaatgaatacataagaaaaaatgttcatctttatccataacataaaataaaagactgagatattggttttcacacatcagattggcaaaaattcaaaagcttgaccacaagttgcattactgtggctatggggacaaagctgctccctttcatccttgggggagagcaacatggtactattccatgaaggggaacttgacaccatataaccaccatatgc

SEQ ID NO: 48246 - DNA, 889 bp, Homo sapiens
gagccttggatagggaaaggaaggggtagacaggcttagaggcagagactattcttacctggcttacagttgtattcccagcacctaagccagtgactggcacgtagtaggcactcagtctttctttagttaaatacaatgaataatttaatgttgggggggatatggtaaaagaagaagaggagagttggaaaactcatgggcatcttcaacagacaggagccccatgactggggggtgtcttagcaaaaggcttcctggcgtcataacagaagtagtcacagaacccccaagaccggaacctgttacaccagagggttggtgcacattcacgatgccctctgtcgaagggccccaccttccatgcctgcgcgtctccttttgttctgtcaggtttagcattgaggcaattggtggccgccgcctcctttgcctcatctgccccaaatccctgcttgccatcagcccaatgcagcaggctctggtgccaaccacaatctccccgggaaagagatttgagggactggaattgtgagagaaatgtaagctctgagcttgacggtggtccatgagcccctccccttctcacctttgaagcaagaaggggctggttccagggctctgtgggaaagctgctttgaagaatggtgaacttgggccacggggcatcattctgctttagttgagggggtccctgttgggttccaaagagaatgcggtggggttaacataaaagcagagtttagcagtgaggaacccattggtctatggcctgctttcttaattgttagtgaattaagccaggaaggcactgggggtggctggggagatcctttgtaagaggttaaggtcttcatagagtgatgataggattagcaataatttggtg

SEQ ID NO: 48247 - DNA, 831 bp, Homo sapiens
ccaggggattatggaatgtttggtaaaatccctggcctctgtccaatagattagctagtagctctctcacccctagatatgaaaaccagaaatgtctctagacattgccagtgtcccttgggggtgcaaaattgatgccagttgagaactcttgaagtaaccatagcacctctgcactggaccggaaaagcgaatgtcttcaaggaaggccaggtttttttttttagagtatgagtcactctaagaatcaaatgaatgattgtctatgccatagagggtgtctaagataactttggcctatttaattttcaaaacaaatgtaatcaatagtctaccttaactgtagttgtagaaaaaacatttacacccatggaatgtgctgttttaagaagactagttttctggataaaactagcaggataatttagttttaaaacatattcttcaccaaaaattgacctgctttacagagttacagatgatgtactaaatttcagagaacatccaccaaaaataatgatttttactttacattaagtgtttctggctgtgcgtgatggctcatgtctgtaatctccacactttgggacaccaaggccggaggattgcttgagcccaggaattcaagaacagcctgggaaacatggcaagacctcaactcttctaaatatgaaaaaaatatcagggcatggtggtgtgcatctgtggttccacctgctcgggaggctgagatggaaggatcgcttgaacccaggagttccaaactgcagtgagctgtgattgtgccagtgcactccagcctgggcatctctaaatctcttaaaaaaaaaa

SEQ ID NO: 48248 - DNA, 287 bp, Homo sapiens
ggtttcagcggggacgacccctgcccagggcgccctctgcccagcggacccacttcccgaggcaggcgaactgggcgaggcagcgctgtgtcacccaccccgagcgctcaccgggcgcccaagctcgctcagcggaaccgtctcggccgcggtgcgcttcggcgctgggaggctctggctggcactggctcaccgcgggtggagctgccggttctgctgcggccacgcggggttcccgagacagacccgccgctgggaccgcgatccttttctagaggctgagtgag

SEQ ID NO: 48249 - DNA, 441 bp, Homo sapiens
  misc_feature (357)..(357): n is a, c, g, or t
agctgcagagtgaggacacttgcatttctctttaggttgtggacgaagtgtttatttatcatgcctgaacctgctaagtccgctcctgctccaaaaaagggctccaaaaaggcggtgaccaaggcgcagaagaaggatggtaagaagcgcaagcgtagccgcaaggagagctattccgtgtacgtgtacaaggtgctaaagcaggtccaccccgacaccggcatctcatccaaggccatgggcatcatgaactccttcgtcaacgatatcttcgagcgcatcgctggcgaggcttcccgcctggcgcattacaacaagcgctccaccatcacctccagggagatccagacggccgtncgcctgctgctgcccggggagctggctaagcacgccgtgtcagagggcaccaaggccgtcaccaagtacaccagctctaagtaa

SEQ ID NO: 48250 - DNA, 928 bp, Homo sapiens
cttcatactcccatgggggacgtgctcttgatactgtcaagagttataactctagcaaggggcaatggttgcaatctgggcaggacaaccatgagaggcagtgcagtgatgcatctccctgggtggcaggcattctctctcaattatccttcctcattgactttggtaatgaaccttcataaagagaagataaattctcctgggatctttgggtccctgagaagcaggagagctgacattggaatagagaaaagctggcatcttaggctaaatgatgactgaaaagggtgtaggcaattttcaggtttcttcctagattgtccaactcaatcagggcaaaggagggagcaggaagtccagaaaatcatcatgttcatgaagaaagagtatgcatttgtagagagttattcatgagtttgagctctcagaggagccggtggagcggaaggcattggatgggctatcgtagcaggaaaaggggcatttcaagatcctaaggtctaggattcaggaaattcaatcaatcaacacctcattatttgtttctatctcaccttcttccataaagaatgatgatgtgtccctgtgtggtcatgtaaaatgggttacaatttggagacagaggctgagggtggaaaggctgaagaagccatgaagaaattgtgtctgggacctgcgggaggggcagacagaagacgcaattgtgcgcaaagactgcgtattctcagtagccagtgatttaagtttggtgtgaaggatatagcatctttgggaagcaatttggtgattctcaggaggaacagggctttttgaccaaatcagtgttacacagaagcagcatgtggttgtgataccagttcagaaaactatacatacataacctgaaaagcgaaagttccttttcatgacagcatcccccctcaaacct

SEQ ID NO: 48251 - DNA, 1071 bp, Homo sapiens
tggagagcctgctgttagtcaccaaactgattgccgcagctattgcactggggactcggggcagctggcaaaacatcctgcttggaagcaaatcctgaagaggaagtccatagaggtttctgcaacataaggcccatgaaaccgggccaaaggaaacaatcttaaaagaacagtgacttgatttactgtctggcttaacagcaagtcttggagcccctgctagttgactggaattaaacagcagatttccatttaggaagacagtcagttcctagaatgcctgtccattctttgcactgtatgtagttccagtgcgtagtgaagtgtctgacatgtaataggaactcagttcatgtgttatgttctttgttctcccatttttaatgaggtgagcaggaaatatgtattctagttaatgagatttcagttaattcaggtttcactgcacgtggcttgacacagttgcttacaggtttccccaagtaaatcattgttagtggccattcctaaaatgaattctggcaaaactataattaaagctacactttacaagtgagaggcaattggtaaacagctggaacagccaaccccaaccccaagtaggttggctcttcctggcaggcttctccctggcaagaccacgaaagcaatttcagacccaacgagtcaggggaggctttggctccccaggatctgaaagcagcaaaggcaacccgccccctcctcaaagccctcattcaaggggtggatcacgaaggccacctagaatgcaggcagagtgaggcttactgtgcctccacattttgaaattgcttgaggcactacttatagctctctgcatttgtaaaagcgattcctttgtgaccccctacatcgttgcagatactctacctcaatcattattggtccttaggagtgcacagtatatggatagtatacacacatcaaaatacgtcagccttcccatgaaacctagaacataggccattgcagtgttttttagattactcttcccctaggaagtagacaaagaataaaaataagatatgagcatttgtatagcttttatta

SEQ ID NO: 48252 - DNA, 279 bp, Homo sapiens
atcaatggaatacagtagacacttgagcaagaaactctagttttatacagatttgatacagtgggtcctctgtacctgtataaatctctaggttccacatccatggatccagtcaaccttggctcaaaaatatttggaaaaaaataataaagaataacaaaataaataaaaaacaatgcagtataacaactatttacatagcatttacattgtactagttattataagtaatctacagatgatttaaagtatacaagaagatgtgtgtagttgtatgca

SEQ ID NO: 48253 - DNA, 597 bp, Homo sapiens
ccctgacctaagggaatcaagtggttgtctgccagtgacctcaagccagcagggcatgtcaaacttaggaaagcagtgtactgagtgacttgagcctgcagtctcagctacttgggaagctaagacaggaggatcacttgagcccaggagttcaaggccagcctgggcaacatagcaagatcttgtctctaaaaacaaacaacaacaacaacaaaaccccaacaacttatgaaagcactcaggatcctcctattggagtcagagctatgacctaattatatataagcatggtttctacatgaatggttggaccttgcgtatctgtttccatctctaagtgacccatgatccttccagtcaggaactgaaaatacctgcttcagattaaatgctgcctcctccaggaaggcttccaggattgctgcaacactccgtcccttccctgaaaccccaatgtttatggctgttgccagacttttggcaatactgttatgacaacatgacctctaaatactaacctcttagtaacacttcatggttcaccaaacagtttcactagccaggataatatcactcaggctgcaggtgcagccccag

SEQ ID NO: 48254 - DNA, 713 bp, Homo sapiens
agatgtcattgtattctaagtttcagtttcttctataaaatagattaaatactattgcaaaggactattgtcagggtctgttcttattgcttccatcctactcatacctcagtttgtactccacatagcaaccagagtaatcatgacttagagggagaataaagtcacaccgttatatttctgtgcctacaacactccagtggctttccatctcatttaggagaaaagattcttagcctgaaaccagcctcgtagcatctagtcacctcccatcgttgccgggccacttctctgacttacttgggttccagcgacactggcattcatacttttttaaaaaacatgtcaaacaagttttaggactttcatgtttgttttttcctctacttggaatggcttgctccttcattttctttaggtgtcctctcaaacattgcccttctttgaaatcttgcttatgataagataggaagctccctgctctttcttcctttatttttctttatcacagttgttgtcatctgacatactatttcttgttcatttactggctctcttatactagagtccaggttccataaaggcaggatctgttttacttacagctctatttcctgcatctggaacaatgcctagaacatagtatgtactaaacttacatatgttggataaattattttctaacagaatataaactgccaaagttgaacaaa

SEQ ID NO: 48255 - DNA, 568 bp, Homo sapiens
acttcaagtaactgccaaatgtcctttcactgcagtatgcagggttctctgacttgcactgtatttctttattttaatttaattttattttagagatgatctcactctgttgcccaggtttgaatgaagtggtgtagtcagagctcactgcagttttgaactcctgagctcaagtgattctcccacctcagcctcccgagtagctgagactacagatacatgccactacacctagctaattttattttttagagagatgggctcctgctgtgttttccaggatagtcttgaactcctgggcccaagcagtcctcctgcctcattcccctaaagtgctgggattataggcaatgagccaccacacccagctacttgtagtgcatttcctgtaggacaggtctattagtagctaactccttcagccattatttcttcatatattctctcttactttcttattttctccttctggggttccattatatatattttggtatgctttatggtgtcacacgagtctcataggctctgttcattccttgtcatccttttttctttctgcttctca

SEQ ID NO: 48256 - DNA, 306 bp, Homo sapiens
ctcgcacgcaccatgaatgagaaggctttgggaaataaacacactaggaagtcgtgtgcagttggagttccgctcactaacacatgttcaaaacaaaaagcccaatttggatgaaaatagcaggaagccgtcccccagggacacctggtgaggtcatattgcttggctctgctgcttccatttttaccaactctgctgccttctgccaattcaaggaggccaggaaccacatccagccccatgcggctcaatgggaaacgagagctgctctcggaaaagcagatgctagaaccacagccccgggct

SEQ ID NO: 48257 - DNA, 275 bp, Homo sapiens
atatgataatggtaaaatcttcttatttttaaaatattttacctgttagaaatacatagtaaagtactatggtgaaataatatgatggctgagatttacctgagatgtttcaggaaaaaattggaggtagtggagaaaggataaatattaataaaacaaaatgggaaaactgttgctatttgttgaagcttgttgatgggtacatgggattcattatgctcttctctgcatttgtttattggtttgatgatttctataataaaaagtgaaaaaag

SEQ ID NO: 48258 - DNA, 649 bp, Homo sapiens
acaaaacacatgggatgtagatgtggattgggagagcccctgaattgtagcactctgctttcctcatctgtaaaatgggtataatcaaagtcttggaagggtaattgtaaaggggtgtgcagacagtggggttactgttatttgcaaggatccgcccatagttttatctgcaaatgtcactagcttttgatttactcactctcgcttgcgtcttctttcgtgctgatgttggctctgctttatcccacaggctttttattattattattacttttgagacaaggtcgctgtctgtcacccaggctggagtgcagtggtgcaatcttggctcactgcaacctctgcctcccaggttcaagtgattctccccactcagtagctgggattacaggcacgtgccaccacacccagctaatttttgtatttttttggtagagatggggtttcaccatgttggccaggctgagtgatcctcccgccttggcttcccaaagtgctgggattacaggcatgagcccctgcacccagcctttctttctttctttttttttttttttgagacagggtctcactgtgttgtgcagtggctcgatcttggctcactgcaacctccgcctcctgggttcaagcagatctcatgtctcagcct

SEQ ID NO: 48259 - DNA, 727 bp, Homo sapiens
actcctgggctcaaaggatcctctggcttcggccctccaagtagataggactgcaggcacgcaccaccatgtttggctaagtttttatattttgtagagacaggttctcactttattgccaggctggtctcgaactcctggattcaagaaatcctctcacctcagcctcctaaagtgcagggattacaggcatgagccactgcacccggctaattctcctactctaaaaaccagtcatccttgtctttcctcctcacatcaagtggccaggcctttcacaatgcctgtctttatttagtgctatctctcctgccactactctagctcagaccctgattattctctcctagaaaactaaattaacctaacccaattttttccaaagtgtggtgtattcactgctatagttactttaatgtgattaggaaaaaacactaacacatcaaaactttgatttcaaaatagaattgtgtcaagtaagaacaaaataaatctggaaatgagtagatctgaagaaaacaatgtaggcagcaatgaatatggaaaaagccatcaaaaatggtaacataaatggctgaaatgtgagaaacaccatgttagtgaatcactttgctaatctgcaaattagttaccaaattaattcttcttatatgttattcagatcacaacatatcctattcaaaatctccagtggcatccccattaactccaagtaaaattataactc

SEQ ID NO: 48260 - DNA, 553 bp, Homo sapiens
aagtagaattttttgatagtgatagtttttacaattgttgggtacaggcttctgtatatctccatgtaattaactgagttaatcatattcagatcttacatatctttactgcttatacagtgaattactagagaagcatgttaaaatttactatgatttggatttgtgtatttttacttgtggttctcatttttttctttttttaagagacagggtctcattatattgcctaggctacactcaagctcctaggctcaagcgatcttcctgcctcagtctcccaactagctgggactacaggtatatgccaccatgcctggctaggttctgttaattttgctttatacattttgggactatttccttaggttatatactgatacatacttgtcatatcttcttagtgaattaaaccatttatttatttagaagtaacttctttatagatataatacttttgccttaaatattctttatctgatattaatctagccccacttgctttcttttggctaatatttatatgattttcataaaggatttattaacaaaa

SEQ ID NO: 48261 - DNA, 767 bp, Homo sapiens
aaaatattaaataaaaattaaaatattaaattaaaaataaaaattaactgagcctggtggtgcacacctgtggtttcagctactcaggaggctgaggttggaggatcacttgagcccaggagttcaaggttgcagtgagccatgattgtgccactgcactccagcctgggtgacagagtgagctgtctctaaaagaaagaaaggaatcagaggtgattcctgttcctaaggggctcacagtctggctccaactcttttttcctcaccctatcctatataagtttccactgcccttctccatttcctcggtcccaattcaccttcccatttcctgcctctcttctcctgagccccacctgtaagggatgacctttttactgattaaaaaaacacaagatgtgctcagatttgaggagagaaggacatttgtaagaaaatcttttggtagaaaggcactgaagatcagcaactcttgtcggatggaggactttatgtgtgtttatttcagcaaacatgtaaggaaactgcctctttccttagtcaacaagaccagattcttgagctggtaatggaaagagcatctccaagtagggagaggtggttgcatctggaagccccaactctcatcctgaccccctgggcattctcttattcatgaactctgccacacggatctggtggggtgtgtatctgtgccatcttcctgttaatgatctagacaggcatgatggacccttcctgagtggctattaaatggggatgttttg

SEQ ID NO: 48262 - DNA, 369 bp, Homo sapiens
gcattgaaacaattgcacatagaaggtgagacttccaatttgaacctaagtaggttgattgcctactaaattcatattaatttactaagactcagagttttcacaactaattcacaatgcccaggatacactctaaaattactcagcctacaaagaaccaggaaaaactggatccacctctctcaggaaaagaaccaatagatggcaaccacgagatgacccacttgttggaattatcaaagactatcccatgttctgcaagataatggtgaacactggtgaatggaaagacagaggttctcagcagacacacacaggaacttcaaaagagaacaaagggaaatttttagaattaaaagggcaatatct

SEQ ID NO: 48263 - DNA, 943 bp, Homo sapiens
caaatgtgtagcggctaaaagaatttgaaaactccaaccgtaagagacttttttccatgacttaatgaggctttcttaagtacacattcagatgctacggaaattcccacttccagattagggaatttttgtatcttcaatttttttttttttcttattgtctgctttagtagagttttccctctagcttcatttgggaaaatttcatcttcactgtactttccttcccaagatgcaattatgttgacaatttagtgatttatttgaaaggtgttctgaccagttatgggtcacatttgaaaagcatctgtgttaacagcttgacatatgaaaatacagcaaaacagacaagctttgatgctgtcttggccagccttatctccagttttatggccctggctaggagacctgatatatttagccattgaactgccatgtcaagtcagtgacattttggaattttcctactcattggatattcacgttgcttaaccacgttcagccccctccaaccccccaatccctgcccaaaatagaaaaataaaactaccttaagaaagagcgcctgaagtaagtctgaaaagaaagcataattgttcatttttgtctctcataatcaaataagcaggcttgggaatttacaaagaagagctatgtaaaatctgcaaagcattattaaagcctgaaagaagaggtaataagagaaacgagagacagataggaattgttagcttcatttatcttaatacttccacctgagtattttttcacttgtaaagaaatgtaagaatgtgtgtgtctttaaaaagtactttttctgtaatcccagcactttaggaggctgaggtaggaagattgcttgaggtcaggagttcgagaccagactgggcaacatagtgagacctcatctcgaaagaagaagaagaaaaataaataaaaagga

SEQ ID NO: 48264 - DNA, 647 bp, Homo sapiens
gttgtgtaataaagggagtcagggtaggagatgcaactgagacaagctccaaaggataaacaggaggtggggtgggagagggaagtcaaggcaaaggtcttcgctaaaagacctaggggaagaggagctaagaaacctagggacagtgggagatgatgcagaagaaagaggagttagaccactcagggccttggaaaacatgaagatttggctcttttcttagaacagaagcctttgaagaattttagacaggagtatcatggcttaggctggcttttcaaaaaaaatcagcttgtatggagagggcccaccttggacctggaagttaattagaaggctactggctacttcagtagtacaagtgagccatgatggtgacatagacttgggtagtagagttggagaaaagtagacatttgaaaattacaggtcaaaataaaagtatcagatttctccaggtagttctggcttatgtaactgccatttaaaaagaagtcttaagatagaagtttatggctgggcgcggtggctcacgcctgtaatcccagcactttgggaggccaaggtgggtggatcacgaggtcaggagatcaagaccatcctggctaacatggtgaaaccccatctctactaaaaatagaaaaaaa

SEQ ID NO: 48265 - DNA, 906 bp, Homo sapiens
gtggtacattccccttccctcccttgcccctcccacatttaatgtactttggcaatagagttggccagttcagagcttttgtaattaaatgtttgcttttatctgttcctcagaggtatacacatcttgagatactaatatatacaagtgcagagtattacaactcttagatctcttatggtagaatggcctggtacctaatcacccttgttttctgaaaccttaactctgctatataatttaacatatggaaccacaatccactaaaacttgcattgtttgaacaccttaccttatatttaaagacattttaattttttggtggccagcctactttaagatttcagattttatgtttagccatttatcttgatacaggtgtatcattattacaggatcattgtgtggatgaggcctcagccaaagatcacatatactgtaaagatgatgcatatcacttacatgtttgtattttgttacacattgaatgatcaggaataccacaagaatggatttgggtatatcataaatagtagctgaaaaacactctggttggctgaaatatgtgcctcagaatgtaagttttcaagaccattagataaggatttgatgctcataaaatagagagtagaaaaggtggaaacttcagtatggtttttcagtatgtgaaatataaatagaacatttcagaaaacttacctctatttaatttggcaaatgaaagtttaactgcattaaaacaaggtaagtgtttttagtttatatttccaagtgtttcacatggctttttaacagctttgagatgtaatttatataccatatgtcatttttttacttttcatatgggttaaacacttgagtcaccaaatgtgggttcagatgtgtggtttactggtcagcacgatg

SEQ ID NO: 48266 - DNA, 260 bp, Homo sapiens
caattctcccgcctcagcctcccaagtacctgggattacaggcgtgcaccaccatgcccggctaattttttttgtatttttagtagagatggggtttcgccatattgcccaggctggtctcgaactcctgacctcatgtgatctgcccgccttggcctcccaaagtgctgggattgcaggtgttagccaccgtgtctggcccagtggggtctttctaagtcatcaataagtgtccaggtccctcctctactccccgctcc

SEQ ID NO: 48267 - DNA, 820 bp, Homo sapiens
ctaggtcagcctttctctattgttgaacagccaatgaatggaacctcattctgggcctgtctatgtgatcaaaacacctggaacagttagactctgggcaaatcatctaaactctgtgggtttctgtagcccctaaaggagaaatatgcagagattgcagcagggagatgctaaagccctggtcagctcccagatcctgctactgaggtattttctccagattccttttcctgcagcatgtccttccgggggctgcagagtctgcttgctgacaggcgtctttgaaggagaaaggaaaggctgcttgaatacagaacaggcagggagggcatctcaggtccatgaaaatggaacgaacagaacttgctgagattctctgtgccagagagcagggccactgcttacttaagcaaagtatcctgagaaggagggggaagaaataattaaaagagtaacagtggcaaagactgtagtgacttaaatgtcaggagggcctaatttgccccttaggagattgagccttgagaagcccctgacttctgctgatgtctaggaccactgccctctgcaggccagaagtggaaaggcaggctgctacctagccggctagggctgcacctcagtccgtttgtgagtacagggtctgtgttctcttcttaaaatggacaacttccttcaaaattagcggggtgtggtggcacgtgcctgtaatcccagctacccaggagactgaggcaggagaatcgcttgaacccaggaggtagaggttgccaagatactgccattgcactccagcctgggtgacagagtgagactctgt

SEQ ID NO: 48268 - DNA, 363 bp, Homo sapiens
atgttggtcaggctggtcttgaactcctgacctcgtgatccaccagcctcagcctcccaaagtgctgggattacaggcgtgagccaccgtgcccagccgtataatgatatttttaaaaatatttcttgaaggaaaactcttgagtctggaattatttttatagtttgggatattttagctaattcatctggggtgtgtagtgaactcacatctagggctgggaaatctttctggtttagtaatttttcattgtaattgatgcactcaggaacatacctccttcctaatttcagagctattttgaaatatgaatgaaaaactcagtaaaaaaaaaagtcaacttttaaaaatagtagggtctgg

SEQ ID NO: 48269 - DNA, 310 bp, Homo sapiens
atgttggtcaggctggtcttgaactcctgacctcgtgatccaccagcctcagcctcccaaagtgctgggattacaggcgtgagccaccgtgcccagccgtataatgatatttttaaaaatatttcttgaaggaaaactcttgagtctggaattatttttataggctgggaaatctttctggtttagtaatttttcattgtaattgatgcactcaggaacatacctccttcctaatttcagagctattttgaaatatgaatgaaaaactcagtaaaaaaaaaagtcaacttttaaaaatagtagggtctgg

SEQ ID NO: 48270 - DNA, 335 bp, Homo sapiens
tattggcctaaaatgctgatctctttcctttgaccctgaaaactccaaggaactccagttagggcttcctcaacctagtaagatttgtaagttggtagaatcttacttatcacccctgactttcttccttcttcctccttagtgaaatagacagcaagttagagcaaatggagcaatatttagtgctaaagctttagagccaggggagggtaatcaccaacacgggccaagccgtaatgacttggtacacccagagaaggctgggctgcagccaggcagataacctaagggactgctgctgttctctcccggcacacacacgtgctcatcactca

SEQ ID NO: 48271 - DNA, 322 bp, Homo sapiens
tagaccacttgaagctgtttttgagaatacagattccaatacaaccacaaaaaccttaccacatctaagaaaattaatactgattctatcttatgtaatatctgttctttatttaagtttcccgaaatatccccaaaatatcttttatagctttcatttttttccaaaccaggcaaggtttatacattcattgcatgcggttatgtctctttcatctctttcaatctagaatagcccaccccatcatcttttcttctgttggacagttatactaatatgcagagatgatgtcatatttttcactacagaaaaagcactcata

SEQ ID NO: 48272 - DNA, 466 bp, Homo sapiens
gatatgtttcttttctgtgcagtcattactttcagtggatgatgacacagacaatccagatgatagcgtgttttaccaagtgcagtctctctttggacatttaatggaaagcaagctgcagtactatgtacctgagaatttttggaagattttcaagatgtggaataaagaactttatgtgagagaacagcaggatgcatatgaattctttactagtctcattgatcagatggatgaatacctcaagaaaatggggagagaccaaatttttaagaatacatttcagggcatctactctgatcagaagatctgtaaagactgtcctcacagatatgagcgtgaagaagctttcatggctctcaatctaggagtgacttcttgtcagagtttggaaatttctttggaccaatttgttagaggagaagttctagaaggaagtaatgcgtactactgtgaaaagtgtaaa

SEQ ID NO: 48273 - DNA, 238 bp, Homo sapiens
ctcttctcctgtatcttctgactcaaacactgtcacacactcagtcatcccagctagcgtctgtggagtcgtccttctggtgtctttccttcccggtctcccttccctcacatctgagaagtgcaaaaatcccatgggtgtcactccctctgtgcctctgcagctagccccctctccagcccctcccactctcctcaccttctcccacctggacaatctcagctgcatccttaatgga

SEQ ID NO: 48274 - DNA, 395 bp, Homo sapiens
gcaccaccacgcccggctaatttttgtatttttagcagatggttttaccatgctggccaggctggtcttgacctcctgacctcaggtgatcttcccacctcagcctctcaaagtgctgggattataggcatgagccactgcgcccaaccctggttgcagttttttcatgagatctgctggcatttccttgctcttggtttcccaagacaatgccatatcctccccatttgggttttaggggagcctagtgggtttctgttacttgcaaacgatgtggtcttcactaatatggtaattaagtaaagcataaagtaaagctaggcagtgaccatggctcacatctgcaatcccagcactttgggaggccgaggcaggaggatcgcttgaagtcagga

SEQ ID NO: 48275 - DNA, 320 bp, Homo sapiens
ggaccttgtttggttctcaatatgaaaaagctacctccaaaagtatgttttgaaacaattaggggaaaatgggtatttttggactgggtattaaaaaaaattcatcttatattatttgggcagctattctacttaaggaagaaaaggcgtaataataccactacacatttattttcaagcacaaattaaacttacacaaaaagcttatagaatcagacccattttatagatgggaagaactgagggatatggacaactatcagtcaacatttaccgagcacctactatgtcccgggcagtgtgtggagtacttgagccca

SEQ ID NO: 48276 - DNA, 518 bp, Homo sapiens
taaataaatagcaggcatggtggtatgcccctctagtcccattgctcaggagtttgagaccagcctgggcaatatagtaagaccctgtctctaaataaataaataattatcaggcatggtggcatgcccctgtagtcccattaggaggctgaggtgggagaatctcttgaacccaggagttgagtctacagtgagttacagtcacgctactgcactctagcctcagtgacagagcaagactctgtctctaaaacaaaacaaaacaaaacaaaacaaaaaacaaacattgaagctgggcatggtagtgcaagcctgtaatcctagctactttgagagacagaggtaggaggatcacttgagcccagaagtttgataccagcctgggcaatatagtgagaagccatctctttttaatatttttctttttttcttcagaacaatatgaatataaccccatctcttaaaaaaaaattacatgagacatgcttaacatagaaaaactagaaaaggaagataac

SEQ ID NO: 48277 - DNA, 658 bp, Homo sapiens
gcttatgtgcataaaataaatagatggaaatacagtattatcttctttggattttgctctcaaatctgtactaatattggttatcaagtatgcacagccagcctgcttctgttgcactgcatgatggcatgtaatgatggaacagagctgacatgttcacaaaagcacttttctctgtgggtaggagtggaaaatagttccatttagctgatatcactaatttttaaagaaaaccatatgagctaaagagaactgaagatgaatgtgggagctatgagtcaaccactgaatctcagctgcattaattttacattataaatgacacagttttaaagtttcttagattttataatagttgaaatttttctttaaaagagtacaccctatacatgccgatacacgttaaaaagattgaacatttcttcccattctaaagcatcttgaaaacaatgactgtgctgttagcgatttttaatataaaatacatttcctagcagtgttataaaccgctaacagcactttttgtgaaaattggctacttcatacaaaaaaaacctcacagtttttgttatctttgtaggattttcttccccctttttgaattgttttataatggataatgttgcttaaaaacatccagcatttccatgagaaatga

SEQ ID NO: 48278 - DNA, 288 bp, Homo sapiens
agatacaggttgatgcctttacatctgagtttttgcaaaagcataagtctcatgctgtttcaagtgaacatgggcgccaatgtcatttttttttgttattatacttgcatttttgtaatcctagactaacctacttttttaggcaggaaaattctctaattagcattaaacattaaatactgtttattgctcccaattccattttgacaactgaggataataaaacatacttgtccagtactgtgagacacagtactttatatattgtagctcatgttattctcatga

SEQ ID NO: 48279 - DNA, 1847 bp, Homo sapiens
  misc_feature (84)..(84): n is a, c, g, or t
  misc_feature (542)..(542): n is a, c, g, or t
  misc_feature (858)..(858): n is a, c, g, or t
  misc_feature (1339)..(1339): n is a, c, g, or t
  misc_feature (1615)..(1615): n is a, c, g, or t
gatgcatatttgtttccatgatcatttgaaattctatggagtcaccactgctgattcaaacctggccaggcttcctgattctantctcatcccagggtgaattgaggttagctgctggagggaatgttcagttcagttgaatgtaaatctagcgccaagccacatgtgagctgagtgtgccaggatgccaagtgataaatcgaggaaagaaagatcacatgaggctgacatcttagcactgacacatggccctcttctgcagaaatactgggcaaagagttgtgagtcagctacaaggaagatagggctttccactgaaaaaggcagtgttcaaaggactcattcgtcaggaaaaagaattcccatgtcaatgagagctgaatgtgagctacactcatctttggataggtatttgatgaatactcgtattcttggagtgactttccaacatttaactaagaccattcagccttcacaacccatttgacttaaagggcaaaagtgcctatctgacaattttgatgatcagacattgccttctnccccttctactcctgctagatccattctagtctctgtctagttaattcctttaaaaacctccatgttaaagtagacttcaatatctagcatactagttccagaaaaatgataccaaaaaggtatattagattgcacatggtggtgaaaatgtttaaaaatcctgaaaaaaaaaaaggtattatgtaaaagagacaaaagagaggaaaaaagctctttggattttttgattagcagaaggtacacatctttatgtgcaaaaaacctgccgtctcctaaatatccttatttggggtggtgtaggtcataaggggtagnatttatatttagaaagtacatatacattttaaacttaataatgttgaaagatatgcactatacactcataaaatagccttataatttaaaaaaatctatatgcacttattacaagtattttaaataaaccagaaaagtctaaataaaaagtagcccaaattctgtcacccagggaaactctattttattaatatctttccagacagctctgtatggccacacatgcaattttataatgggattataaaattggggttatacccctcatactgttgtccaacctggagaattatatacagatgctcctcaatttatgatgccactgcattcccaataatccattctaagttgaaatcttcaacttacaatgggtttatctgggtgtaagcccattgtaaattgaggagtgtattgaatatatatcactttcacatcatcataaagtcaaaaaactgtaaatcaaaccttcctaagtcagtgnccccctgtacccttaaacaatgagataaacttccatcaagcatggcagtactctggctttgttctccgtttgaaaaaccgtcactttataggcttaatatatctattttacacattaagactgtaccttcaaactgtgttgttccatacagtagccctagtcatgtgtggctaaacttgaattaacaaaaattgaataaaatttaaaattcagttcctgaggtgcactaataacatttcaatggctccagagtaacatatggctggtggctactgnattagacaatacagaatggtttcatcatcacagaaagttctgctggacagtgctgagttggaaccaggtgttctttacacacagaccacttaaagactgaggttttatttatacacctgagttttccaagcacttttatctttgactgtggccaacattctatagggctaaatcccaactttagcagccggaagtcgcaactgaagagaccagccatttggattaggaagac

SEQ ID NO: 48280 - DNA, 410 bp, Homo sapiens
aaaagcagtgttttaaagcaaacttctaaatggtcatagttaactttagggtaatactctaagttttctgagatggaaagcacagcatggtgactacagttaataataatgtactatatacttgatgaatatgttaattcatcaagttaattactacaaattggttgtaataatcctttcacagtgtatacttatatcaaaacatcacattgtgcaccttggatatatgtacttgttatttgtcaattatacctcagtgaaccagaaaaacagttttctgtggcaagcacttttctccagtggacagagagttcggttgaaactagcttgctttatatgcaaaagcaaccccaacccctttttcttttataggacatgtgatacatgaatttatttttcttgtgaacact

SEQ ID NO: 48281 - DNA, 746 bp, Homo sapiens
gagagcttccagatagccgaacatatgggtgctcctggaaggtagagtgcccaggaaggacatggagactctctactccttcccccataccttgccctacacatctcttcattgtatcctttgcaatatcctttataatatactggggtaaatgtaagtaagtgtttccccaagttctgcaagccactccagcaaattaattgaactcaaggagaagctggttggtcagaagttctggaagagtagattattgactggtgtttgaaggtggggtggggtgcagttttggggactgagtcctcgatctgtgggatctgatgctacttccaggtagatagtatcaaatttgaattagaggacacccagttggtgtccactgcttgctggtggggaaaaccccacaaacgtttggtcacagatgtcttcatgttgattgttatggtgtgagagcagaggaaaacatggttttaatgtttttcccaaataactggtgtcagagaagtgagatttgctaaaaaggccctggctcactgaaacatgtggtttgggaagaaaaaggataaaagggtagaagatgagaaacctttgttctggtgtggccacatggtcacccaaggtatgaagccacagctgctatgctcggttattaaaggtaaaagttatcagtggaatttagagatggttccaactcctggggaattggttcactggctgcataaggaaatgcaaactaataagaaaaaaaa

SEQ ID NO: 48282 - DNA, 551 bp, Homo sapiens
actggcaaatgcttagcatagaattgcctagttgacgtatggatcttttctaggttgtaggatttggtagtgtagatccccagagtcacactgtatctgttgcctatatttggctaggttgagtcatgtcaccaaatatagcctatgccttcggcatgatgtatgccaggcttctggttccaaattctgcagctggcctccagagactactgcttttcctgtcataatgttccttaagattagggctgctgaccaggcagtattttttatatttataacaaaatcaataccaagagccttcaaagattgaattttgctcatcaaataggttcacatgctgaaatcctaatgccttccttctccctttagaaattaaattctgaatgtgcccaaacctggataatgattaaagatagatgagttcttggctgggcaccgtggctcatgcctgtaatcccagcactgtgggaggctgaggtggaggcatcacctgaggtcaggagttcgagatcagcctggccaacatggtgaaactctgtctctacaaaaat

SEQ ID NO: 48283 - DNA, 1368 bp, Homo sapiens
agacagttcagtggcaaagggcagaagtggtggatgcatctgtggtagattgattaaaagcaacgataggagcgatgagcagcaggctctgacagcaaagtggaagagatttgtctgggttgaattagaggaaagtggtgaggaggaaaagcagaggtgatttagtgatagtgatgaggatgctggcagaactggacatcatcacacattcctgaaactggtatgaggcaagaaacagtcctctctatacaagagcctaaactcttaaagaaatgatatgtacctttttagcccttaaggatgccattatgccatgctcttggtacaccctacatagatgttaagaccaggaggcacttgttcattgtatatagtggtgcaagctaagttagttgatccaatatctcctacccagagtctcagctgtgcttatatcccaaactactgattatgttgatgacacttaattcccaaggaaatactgcatttagtatatgttcctcaaggtggccaaaaaagaatatagtattttttagaaatttaaataccagtgtaaaaaaatcctttaatattcctagtctggagaaaacttcttcagattgattttactgtaatgactggcattaactgctcataaccaagctaacttccagtaggaatattgtcagctttgctttactgatagctgagactctagtcctgtagaagcagtactcatacagtagacaggttcccctgatcttgcacatccaatcttatagattttgccgtggacacaggaagctactgcttatctgtgtgttccaatgcctatcactgtctgtcatgtgtaaggaggcgatgatctccttacagataacgtgaaaacaaaagccacattgggctagacaacaacattcacacattctgaattagagcaggctgatttaataaaatgttactgtaatggtgacattttaatttacagagcccttttcaagtattcttgaattatttccataacaaccctatgaggcaggttagggttggttttgttatttccatgtaatataccaagaccagatggagatgcagtgactggtataagggttacacagatagtaagtagcagaagaaattgaatctaggttttctgactctaggctccatgttctttctaatttactgccaaagctgctaaataagggtgattttaaggccatttggaatacttgcacatgagcttacaagttggagaatttctcaaatgttgcttcaaagtgaaaggttggccaggtgtggtggctcatgcctgtaatcccagtactttgggaagctgaggtgggaggattgcttgagcccaggagttccagatcagccagggcaaaa

SEQ ID NO: 48284 - DNA, 402 bp, Homo sapiens
taatttgtcaaaatcaccttaagtaaatatttactttccgtatttccagagaacatacattttagacctttctaaagctattccagattttaagataaaatttatgcctaccagagagcagtactgataaataatgtactataagtacactatttacagttttattttaaataaaatccattcagcatgctagaatggtgaagctttgtcattattttgttgttgtcgacatgaattaaccttgttcaaaaaaggggggcaaaaaaatgacatttgtcatggaaaactttttttaatccctataggacttgaggaacagaatccttacttcagttcttataaatagttgtgctaaacctcaagtttctatcatttagtggccctttccatgctctccatgaa

SEQ ID NO: 48285 - DNA, 304 bp, Homo sapiens
caagatcacaccactgcactccagcctgggtgacagagcgagactccgtctcaaaaaaaaaaaaaaggaaaataaattcttctgtatttttctttcttcaagtgaggccatttaggggaaagtataccataaaacttgctctaagataaggcaaatttggtattataggatgaagtgctatgtgatttgaagtaatgctgaattttttaaatatattaaactaaacaagaataatgaggccctcggaaagtcatgattatatttctcatttttctcattttaaagccacagtgaaaaacacata

SEQ ID NO: 48286 - DNA, 432 bp, Homo sapiens
agagtcaggggcaaggatttgaatcaaaacagtttgagaaattatcccatgaaacacgtgtaggggaatgggaaagtgagaacagagaagggaccaaagccaacacatacagggtacattaatgagcagttaatgccatgtgtagccttcctcccatgatcatatgctggatatagtatggaagctgggatacatgtctatcaactcctgttgggcattacttagttgaaggtcattcctggaggcatgagatctcttctggcctactcttatccaaaggttgggcccacacatatgaatatatcatatactccccacctccaaacttcaggaaatgaaaattaccgtgaccaagtatcatacattctagctttttttttctagtacactgtattctaagttcattaacaacaacagaaacaaaacaaaaca

SEQ ID NO: 48287 - DNA, 931 bp, Homo sapiens
acaaacaaaaacagtaaaaaaaaaaaccaaaaaaacactaccttaattggttattttgattatctcacagtcttccatattaattttttactgatttttgactgacttgtttttcaatataggaatataagctatcaaggcaaagaccccattttctagttcgtttgagtagctcaaaggaccaggaaatttcttgagtttgacaaggaacagcatcatgctgtctaacctgttaaagcatactgttgtcttacagtaaactgttttttttgatacagggtcttgctctgtcttccaggctggagtgcagtggtgccatatcggctcactgcagcctcaaccttctgggcccaggtgatcctcccacctcagcctcctgagtagctgggattgcaggtgcgtggcagcacgtctggctaatttttgtatttttagtagagacaaggtattgctatgttgcccagctcagtaaactttttttgaagacttagaacagcgggttgatattagcactcctagcaatgtgcctgatttagagtcggtgaatggcttaggtactgagatcatctgactcttcaaagggcattaacttctaatctacttgagagtaaccaagtctaaatggtatacaatatgcaaaacaaaatcctccaagttaagtaattatagtattttagaacatactaaaactatgtgagtatttaattattgtaaagttttatattatattagattttatactctattttgaggcaggagtatcatcataaaatagaattaagtacaggcatacctcgttttattgtactttgctttgccatgctttgcagatactgagtttttagcaaattgaaggtttgtggcagccctgtgtccagcatgtctatcagtgccattttcctagcaacatgtacctacttcgttagcattt

SEQ ID NO: 48288 - DNA, 451 bp, Homo sapiens
aatttttcatacagtaagggagaagagattggaaaatgcttatttactggtgatttaagatcctaagaatgtatacatttatgtaggtgttatcttttattatttttaaaaagatgagacaaaagtttcctgagatattcacaggctcttcctgagatagtcaattcagagttcttagggaagatactcattctggaatattcatgggtaaatacatttgtttgttttagggaatggaatttccttaagttgtaaatgaactttgcagttgttaatctgacccatataaaaatcatgtgggctctttttccgaaggaatcttagacctttgtatctgggttatttcacctttttgttgggaatatactatacatcaggaagtatatacacataccttatgtagatagcttgcaggattttcgcaagttgaacacactggtacaaccaaccc

SEQ ID NO: 48289 - DNA, 299 bp, Homo sapiens
gcttgttcagaccaaaaaaagagagcagacttttggcgaatgcgtatttaatttaattgcactgtaggtaagttttatacatcagttttacattctctttagattgcctgcaaatttaattgaagcatgctgttcttaatgaaagcacgtcctttctgtgcatggttttcacagctcatttctatgtttcatagttagccttattttctgttctattatagtaaccagctgcaacgtggttaaagctttttttagagatttaacttgatttctgtggatttttacttctttcgttccaa

SEQ ID NO: 48290 - DNA, 495 bp, Homo sapiens
gagagccgctggatgaaagaagaatcactcactgcatttgtgagagtggccaggtcacctgtgtggtggagatttgtcccccggctccctgtcccagtcctgaattggtgaaaggaacctgctgtccagtttgcagagaccgaggaatgccaagtgattccccagagaagcgctaataaaagttttgtgctgttgagccccaaatgggaaatttctcaggaagagacatttaggacttcagaacttttaacttgtagtcacattgttgatatggaaaccactgacttaagcaacttagttcatctaatcttacatatacttacgatcttttattttttcattttctaacataccttgaaataattcaaaactaaaagcaataaagtgcatatgaagtgtttgatcataagaaatatttcttactgtaagctgtcagttttatatgccacacctggaaataaaaagaatatcatggaatatttaaaaaatatatga

SEQ ID NO: 48291 - DNA, 562 bp, Homo sapiens
tggccagaggcccagggcttctgcattatcagtccagagctggggctctccaggcagtgggaaagacaggagcaaacaagaggccagcagctgaggagctcactgattgtgagttttcagagcttctgaggctctctctgtagaatgagatctcagattttccctccagccccctccccactctagccatggattttttgcattttagtccatttgcatgcctcttaacttcaaaaaccccgactcccttccatcccaggcccttctgaggaacttgcctaacttctctccccaaggccaggagaaaatgtgaatgagggttgctctgaacccttgcaggccacactggatgctggttagaagtacagattctcagttctaccccagacctacagaatcagaatcttcatttggttgggcatggtggcttacacctgtaatcccagcacttcgggaggctgagatgggaggatcccttgagcccaggatttcaaggctgtagtaagctatgattgtgtcactgcactctagtctaggcaacagagtgagaccccatcaaaaa

SEQ ID NO: 48292 - DNA, 401 bp, Homo sapiens
ctccagctgggcccagtagctcccctggccacttcctctgtctagcttggttgtgggggttgaagggtttggagttgggagttgggatagagaatttaggaatgggagcaagaatattaggagcaaaaatcgggaggcccccccatggtggctcatgcctgttaatcccgacactttgggaggccaaggcaggaagattgcttgaggccaagagttcgagaccagcctgggcaacatagtgagatgctgtctctacaaaaaataagaatattagtgtggtgcagtggtacacgcctgtagtcccagctacatgggaagctgaagcaggaggatcgctggaacccaggagttcgaggctgtggtgagctatgatcttaccactgcactccagcctaggcgac

SEQ ID NO: 48293 - DNA, 202 bp, Homo sapiens
ggaggttgcagtgagccgagatcatgccattgtactccagcctgggcaatgagagcaaaactctgtttcaaaaaaaaaaaaaaaaattttaggaaacaaactagagtttttaaaaattaaaacattaagttaaaatgtggatagtggtaatgagaagctcaatagaagggctggaaggcaaaaggtgtcaaagttacccaga

SEQ ID NO: 48294 - DNA, 269 bp, Homo sapiens
gaaacagggacagaaaaccacagatcctgcattgtgtgggctgaggaagagttgagttccagctcctgaggagaaaacattctccaaagttccgcgccgattccagacagattccccacagctgttgagtcaccagtactttaaaacagacagagctttactacaaatccacttaagcagtttttaaacttcaaacacctgatttgctgaagcaaggaagacttcccctcccatctaaaactgcacttcagtgtcattgcactattcct

SEQ ID NO: 48295 - DNA, 114 bp, Homo sapiens
ctgccgggatccagcctgcttgcccacaactgggtggggccagtcaccaacgacaaacatgaactagatcctggagacatacaaagccctcacaataaagccccagtgggtgca

SEQ ID NO: 48296 - DNA, 767 bp, Homo sapiens
gctagtatgagaggaacatactaccagaaaatataaacaatagatatagctagaaagaaatccaatattatatgtaatttaatgtggtcactcactgagtccttttagccactagtatgctttgtctattctttatattacttacaattaggttaattaggctaattccccaactataaagggctttatgaggctcccctcattgatgtgtagtaggtagatagtcctgacggtgagttggtggatgttctaattttagttttagtttagagcatcactgtccaatagaattctgcagtggtggaaacttctgtgatctttgccatccaatacagtatccaccaggtcacgtggactgttaagcgctcgagatgtggttagtgtgagtgagaataatgcatttttaatttttatttaatttaatttatttattttgagaaacggtctcactctgtcacccagcctggagtgcagtggcatcatcttggctcactgcagcctctgccttatgggctgaagcaatcctcccacctcagcttcccaagtagctgggactacaaacgtgtaccaccatgcccagctatggtgtatcttttgtagagatgggttttcaccatgttgcctaggctggtcactagctcctgggttcaagggatctgctacctcagcctcccaaagtgctaggattacaaatgtgagctgcctcatccagcctaatttaaattttaaatgcaacatctgggtagaggttactgtattaaacagtg

SEQ ID NO: 48297 - DNA, 346 bp, Homo sapiens
ttgtgatccacccgccttggcctgccaaagtgctgggatcactggcgtgagccaccgcacccagcagaatattttttatacacacacactgtatatatgtgccccgtgaacaaaggacaaattgttcaggaatccatggacaaggtgatcataaatagactacaaagaaaaccctgataatttttaaaaataaaaattaaggagaccttattcttcactataaaacaatacaatttaaaattaataacagaagattaagcaaaaacaagcactcaaatacttggatacatgaaatctcataatcattgaattaaaatgatatcaaaagtgctgttttaaaacaaat

SEQ ID NO: 48298 - DNA, 455 bp, Homo sapiens
gctcccaccacctattctgtctcttgcagctgtacagttagccctctgtatccacggattcaaccaactgtagatgaaaaatattcagaaaatataaccaaaaaacaatacaacaattaaaaaaaatttttaaatacaatataaaaactatatagcatttccattgtattaggtatatgtaaataatctcaagatgatttaaagtatatgggagactgtacattggttacatgcaaattttatgccattttgtattgaggacttgaacatccgcagattttagtatctgtgggggtcctggaaccaagcttctgaagaaaccaagggacaactgtacatcaaactaacactggctacagtctgagatagtcttctttcatatcttttatttgctgccacacaatgtaagagcacaaactttcttcttttaaatatttattttccacgaccataaa

SEQ ID NO: 48299 - DNA, 389 bp, Homo sapiens
ttttttgtagagatgggggtctccctgtgttgcccagactggtctcttaactactgggctcaagtgatcctcccaccttggcctcccaaagtgctagaattatatgcgtgagtcaccacgcttggcccaaaaacaatctttttgaaaaaactggggtaaaattcacatgacaaaatttgccatcttaatcatttttaagtgtatagtttagtagcactaagtatattcacattgttgtgtaacagagatccaaaacttcctcattttgcaaatctgaaactctgtacttattaaacagcttccacagtccctggtaatcaatcaccattctaactttgtttctgtcaatttgtctatttttgatacctcatataagttggagtcaaata

SEQ ID NO: 48300 - DNA, 510 bp, Homo sapiens
acatgatctcactcgcaggtgggaattgaacaacgagaacacatggacacaggaaggggaacatcacacactgaggcctgttgtggggtggcggaatgggggagggatagcattaggaaatatacctaatgttaaatgacaggttaatgggtgcagcacaccaacatggcacatgtatacatatgtaacaaacctgcacgttgtgcacatgtaccctaaaacttaaagtataattttttaaaaaagtaagaatgtggcacataataggaaaaaaaaaaaaaaaaagaaagcttagagcaatatactaatccaagttctgaagtgatttggctttaaatcttttctgcctgatgtgatctggaagccggctatggggaagaaggctctcctagaatcttctctctcctccgttttgtccttttctcatccccagttgccccagcttgctgcccagtgtctgacctcttggggtgagaaggggagaagattcctaaggggaagaggggtctt

SEQ ID NO: 48301 - DNA, 999 bp, Homo sapiens
gatcgtcccactgcactccagcctgggcaacagagtgagactccgtctcgaaaaaaaaagcaaaaactcctagcaacatggatctaaagactgtaatacagaagtctgctggtatattcaagaaatagcaaggaggccaaagtggccggaacaatgtgagcaaggaaaaaaattgaagatgaggttacagaggttattggcagagcaggtcacgtaaagcctcacaggacattgtaaggacataggccttggctgtcagtgagaaggggagccgttggaaggtctcgagcagggaaatgctaaaatctgagttacatttgaaaggctcactctcactgatgcactaagaaagaacagaatgtagggggcaggagtaaaagcaggaaaatcaggagcctactctagtaatctggcctagagatataatggtggctcccaccaggggatagcagtggaagtggtgggaagcgttgaattctggatatgttttgaaggcagggccaacggaatttcctgacaaaacaaatgagggtctggtagtgttgagcatgactctgagttttttcgaagttgccatcttctaacatgggcagctggaacagcggccttaaggaagatcagaagtctagtgttggatgtgttacgtttgagatgtctatgcaacatccaggagatctacaaatttctaacttccatgtcagatgagcacagcatattgtattcagcattttacttatttcaatgaggagttagggtttccattctgccataataccagaaatgaagtgcttctgtgacttctttaatgtgccctcatataatgtttattctctcttttagtaaccatcagtgctgtccttcaaaccttttctaatctacaacaactattttaagatataatgaacaaaactggaattagtactccaataaatttctgggctttaacaaagacagcaaggggactcctgggagtttccaaacatgatgtctttagaatgc

SEQ ID NO: 48302 - DNA, 660 bp, Homo sapiens
ggttaatttgctcagtctgtttgctcacagactcagcagatggccaagctggtacttaggccaaggcagtctggccccaatgcccatgctgggaattgctggggatcacagtcctctgtgcctctctcaccacaaaactggaacctcacaaactccctgccactaggcagggcctccccagcccctactggcctgccccacctccatttggactggcacatttggactgggccatcacattcccctcagaacagccctgataaatgtaccggtgcatgtgagtacatatatgcatgtgcacgcatatgtgtgcgcctgtgtgcacgtgtgggtgggtgtttactatcaagaagcaacagacagccgtgagcctcactcaccccaactagggggtgggaagcccaggggtggggcagatgtttgctgtgagcattactcaagagagagaagatgacttaatggcttgcatttcagccacatcaaaaagccctgcgccaacgttaaaatcacatcccattgccaccagccccataaagggcttccctggacgtgcccgatttccaaagcctaatctttgtagtcacatctccacctctatctgccagtgttggggcccctctggggcccagcagcgctaagacaggaggaaggcacggggct

SEQ ID NO: 48303 - DNA, 607 bp, Homo sapiens
ggttaatttgctcagtctgtttgctcacagactcagcagatggccaagctggtacttaggccaaggcagtctggccccaatgcccatgctgggaattgctggggatcacagtcctctgtgcctctctcaccacaaaactggaacctcacaaactccctgccactaggcagggcctccccagcccctactggcctgccccacctccatttggactggcacatttggactgggccatcacattcccctcagaacagccctgataaatgtaccggtgcatgtgagtacatatatgcatgtgcacgcatatgtgtgcgcctgtgtgcacgtgtgggtgggtgtttactatcaagaagcaacagacagccgtgagcctcactcaccccaactagggggtgggaagcccaggggtggggcagatgtttgctgtgagcattactcaagagagagaagatgacttaatggcttgcatttcagccacatcaaggcttccctggacgtgcccgatttccaaagcctaatctttgtagtcacatctccacctctatctgccagtgttggggcccctctggggcccagcagcgctaagacaggaggaaggcacggggct

SEQ ID NO: 48304 - DNA, 564 bp, Homo sapiens
tgccaattctcacactcatctgtgctgcccaccgtcccatggcctcttgcggacctctctcccatggcgctggctccttgcacccagctatctgcttgcacacctctctccctgctggaggataagcaccccaagggcagtggccagtcttagctactgttgtttccccaggacccacacaggcctggcatggagcaggcacgtggcaaatgactgttgcatgtttgaatcttcatcagagggctaagcaacacacacctttaaaaagtgagtgagttttggccaggcgaggtggcttatgcctgtaaccacagcactttgggaggccagaggcaggcagatcacttgaggttaggagttggagaccagcctggccaatatggtgaaaccccttctctactaaagatacaaaagttagccaggtgtggtggtacgtgcctgtagtcccagctacttgggaggctgaggcaggagaatcactcagacctaggagggtggaggttgcagtgagccgagattgcgccactgcacccagcctggacaacagagctagactccatctca

SEQ ID NO: 48305 - DNA, 846 bp, Homo sapiens
cttgtttatccattcactcatacgttgtttccttttggggatattatgactagcattctacgaatatttttctggaagacttttgtcttgttgtagaagatgttttttttctcttattttgagtaaaaagtgagaggaattgcaggaacacatataagcacatgcttattttttttaaagaaactgttcaactattttccttagttgagaattttatactcccaaaagcagtgatgtaccagagccccacttgtttcacatcttcagcatcacttgcaactaatcaatcttcaattttagctgttcttctggctttgtaatgacatctcattgtgcttttgctttgtttctatctgatggatatagatgtgaaacatcttttcttatgcttactggtcattggtattttttctattttgaaatgtttaagtccttttgccaatttttattgggtttatcccctcattgacttgtaagaattcttatattcataggtggaaattgaacaatgagaacacatggacacaggaaggggaacatcacacaccggggcctgttgtggggtggggtgagcggggagggatagcattaggagatatacctgatgttaaatgacgagttaatgggtgcagcacaccaacacggcacatgtatacatgtgtaactaagctgtacgttgtgcacatgtaccctaaaacttaaagtacaataaatataaaaagatacatatcctatgtattttcaatattttctcccagtttatatcttactttgatttttaaaatgttgaatttcaatgaatctcagcttattaatttatttccatcttatcaaataaatatttcc

SEQ ID NO: 48306 - DNA, 436 bp, Homo sapiens
gagtgcttcccagtgtctccaggctcccctctctgggccctttctcgccaactaactgccattctaacttgctttccatcacattagtcttttcttccctacccactctttcatagatactttgccaccctccagtaacagtttgattcagctgagtaagatttttttgttaagttcaatgatgaatctgtattggttgaaacacacacgagggttcgtcctgttgggaacaggcatcactcagtgggatcacacagtgtccagtctgtccttatccttccatgtccagccctgttttctaaaaagggttccctccatgcagttttcgaatccttctccaaaaatcaaaagtcattcagttggatgaaagggaaaccaaacgagcatttacaactctgccactgcattagtattcattcgataattaggtggaaag

SEQ ID NO: 48307 - DNA, 440 bp, Homo sapiens
ctgggcaatttttaacatttgatttatgtcaaaaaatagccccccaagtgtcctgccttggggtaaacagggttatggggttactcgtatctgcccttaaggaacaagttctacccctgttcttccctccaggctcctggtccacccccaacttccagcagaattgtctaggaactactggataccaggatacagtaaggaagagattagatctgacacaatgtttacttagcaacagcaacaaaacaacagcagtagtaacagtggaaataggttccgtggtttaagagtatagagtctggaatttcatcttcaagccttggcatcaccatgaattcactctgtgacttatcttctctcaaccttagttttctcttctgtaaaagagataagatacttcgcccaatagtacacattaaatgctgtatatataaaaaaaa

SEQ ID NO: 48308 - DNA, 476 bp, Homo sapiens
tcatcctcccacctcagctcccgccaccaagtagctgggactacaagcacatgccaccacatctggctaatttttgtattttttgtagaggtaaggtttcacgatgttacttgcccaggctgatcttgaactcctgagctcaagcaatccatccactgcagcatcccaaagtgctgaggttacaggcgatagccatcgtgcctggccgaaaataactttttttaaaagactttcaatatccaggtaaataatcatttacacatttctccttgccagccaatctgcaggcatagagacagaccacctcttttctactagaatcccactaacccttaagcggctaaggcagggtgggaagaaagatgttaccaatcaaggatcataaagaaaaaacactgtttgctttaaaaagagaaaacaaattctctatttccccctttaaattaagtatagggagcatacaatttccacagtaa

SEQ ID NO: 48309 - DNA, 256 bp, Homo sapiens
ctatatctatatctatatctatatatctatatccatatctatcatctatatctatctatatttatgtctatctatagacagatatcctgtggacttcgtttgtattttgtatccacaaatgctttgaatggccagataacatctaatttattcctttttggggggcttttattttaagttcagggatataagtgcaggtttgttacataggttaacttgtgtcatgggggtttgttgtatagattatttcatcatg

SEQ ID NO: 48310 - DNA, 242 bp, Homo sapiens
cttgatagctgtatgctaaaagtgaggttttttttgttctgttttgttttgttttgaggtttgaggctttttttccccttatcaactcaagtctttcctggttatcctgggctgtcagtatttggttatggactacattaattacttagcgtacagaggaaaagatgtgtgttttagataaaaagagctattgcgagctaaaaattattaacagatggccaggtgcggtggctcatgcctgt

SEQ ID NO: 48311 - DNA, 434 bp, Homo sapiens
gctcagttacggtcattttaactgttttttcctaattaccctaatattttgaccttcataaaagcaagatctggatcctatattttactgaattgccttacttcccatcccagtgtgaactgccttagaaaatgctcaattgaccagttgcagtgggtcagcctgtaatcccagcgctttgggaggcccaagatgagatgcacacttgaggcccaggagttcaaaatcagccctggtctatattgtgaaacttcatctctacaaaagaaaaaattaacatgattgggtaacacacctgtagtcccagctactgggaaggttgagatgggaggattgcttgagcccaggaggttgggactgcagtaagccacgattgcaccactgcactaccaggtctgggtggcagagtcaagaccctgtctcaaaaaaaaaaa

SEQ ID NO: 48312 - DNA, 361 bp, Homo sapiens
actaaaaaagaagagaaaacagattctcctttaaatcctccaaaaagaatgtggcatccaggttttaggacttctgaattataagataaaaagtatgttttaagccaattgagtttagggtaatttattacagctgcaacaggaaactaacacaacccactacatgccaagtacagttatatgctgtgcacatgcaggtagcataccggaaagttttggtttggttattttaaattgtaaggttaaataacctataatactgggcatataattaccatttatctccagggttctttggaacctaaaattcagagattgctaggaataatttactcccaaagtcaaataaaactttatctgg

SEQ ID NO: 48313 - DNA, 369 bp, Homo sapiens
cacattaaagttggcctcttctgtcccatgtggaatcttcctgttacaaggatacatagaattgtagttagggcccatctagataatcccaggataagctccatatgtcaaaattcttaatttaattatacctgcaaagtcttttttttttttcatttaaattaatattcagactccaagagttagaacgtggacacattttgagatgtcattattcagcccaccacaccatgtttacctttgtacctctctgcattcttcccttgttctcccttctcctttccgctagcactgtcagccaggccaagaaaaaacaagagttgtccaaaggcttaactttcctgtccgcactttgtattttagtaaaaa

SEQ ID NO: 48314 - DNA, 417 bp, Homo sapiens
aaggataccagggtccttccattgcaggagagtattatgagtggaaaccatggtctggagcctagatgtacttgctgccactgaggtgttgttagtcctagttgctatcatctgacagcaaggaaatacgtgtgtataccagcctgtgtatatacatatatctataaatgtttctctatgaaaccatccatattcatattaaggtaaacatgagtttatgtcaccaatgatgagccgtcatcacgtggagtattctagctcctccagttatctcgaaccttccatttcaatcgtgagaaatataactcctaccatttcaccatccatttattttaatcgttcaatttcactaggacatgcatagtggtcagaattattaacctgtacccctgtgggaagcagctttatcagctagag

SEQ ID NO: 48315 - DNA, 352 bp, Homo sapiens
ataattaatgtcggatttgttaatgtaagagttgcaatctgttgctgggttctgtctcaaattaggcaagaagggtggctgaggggccagccactcagttatataccaagacaagaggtgatttgggcactgaggcacctgccatgcactcctccatgaacactcagcaccttacccttcagggtctgtctcctcacactgtaccgtgagctcccctcagtcctcacttgctgctgggacctcagggctggacagggctgcttcattaagctggcccagctcttcccaatttaccttcaactaacatttgttcagcacctaactggcaccaggccctatggcaacagggagg

SEQ ID NO: 48316 - DNA, 1029 bp, Homo sapiens
tgctctggtgactacagcaggtcaattattggagccaagagtagtattgtaaagttggagggtcttagaaggtcaggaaagaaatgagtggcccatggaagtgtcccttaaatgataacagccaaaagcacagccacctatggaatattcctttgttttgctggactggtagaaagtgcagggcttgcaagagtagaaagttagagccagtctcatccaatgtcctgtgaaattctagtgtttctgttaagtgcttgccggggtcttcttgaacccctccagctggggaacttggtagaaacagccccactgattctgttttttaataaagtcctttttagttgtacaagcaaactggtagctctttaatgacgtaaaaattcaaacaagacagataaagctaaatatgcctaaaactactatttactctgatcctagccatctctctagaagtaattactggaatagtttgttggtatcttttacccacttcaatacgtgtatgtacaaaagtctgtgttttttttatgtaaacagatcacattaagtgccttctgcatcttacattcttttttatctttgcagtaagtacatcctagagatgttttagtacacgtagatttactgcagttttcttactgctccatgataatcccgtggtacagatgcactattcccctgttggtggacatttaggttctttctttctatttttgccattatctgtcccctgagtttttttagacagctctagactttaggaaatttgcaccttcatcctcagaaacagattctggcttccacgaaagtgctgcagaacccatttgtggagagcccacgtgtcttgtccagtccttgtgttgtatggacgaggacacacacacacacacacacacgtacacacattatttattgtgacttcttttgctggccactgtgctaaacacagttatctttttcctcaaaacaaccctatgaagtaggtgctgttattatccctgcttgcagatgaggaaactgaagagtaaa

SEQ ID NO: 48317 - DNA, 891 bp, Homo sapiens
ggacggcgtcgtagcggcactccaggccaggccactgcggtccattcctctgccctgcgtttgtgggaaatacgagcccagtgccgcagctttagggcctgggtcgcccttggtccgcccgccgcgttcccgggtggtgtccccacgctgctgaggagctggttccgcgatgcctgccgcggggggcactccccgcagcctgcgaccgtcctgcgtccttcgcttctgggcgtttccttctggggtttccttggagcggctcgagtcgactcctcccgcctgcccaactcagctccgctcgccactgggtccctgcagccctgcaccctcggggcgctcattgtagactattcttggtccccaggggccaccggtccctgcctggcgtggcaggaaagcgcagactggacacaggggtcggagcctagggaaccatcgagtcgcagcggccggacccaccgggggtctcaacagctgaggactgtctgactattgcctcaatgtcgccgacttgggtggcctcccagctgctgctgagggacggtgcgaagtcctagtgcgtttttaagcagactcctaagtctgcgcgcgagtcggggcgcggcgccaggtcaggccgcctccgtcgccaccgagccgcggcccagcgcagagccccgccatctggagctgacagtggccattgtgaaggcaggaggccagggccgcgccacccgttgcatcccgcggcaggtctgtgtcgcctggttctcggcgccaaaggctggtcccacagacggcttccgggagtgatgcgtccccacgagcatcctcctcttccttagcgacccccggactgcagagcttcaagaccagcgaactgtttcccaagaaataaaattgtaaattagg

SEQ ID NO: 48318 - DNA, 427 bp, Homo sapiens
tcattcattctgactgagccaaccaatgctgcagcatatgggtgcagtagacaagctggctcctgttcctcaaatagaccctactatacagtcttttgaaagattaagatgtattttagtgttaaaaattaaaatattaaaacaacacccacaccgtgtaagggaaaaaaataagaggttggagaagaaagcacctcatctccttaaggcaggtccaggggcacccccatcccccgccatgctgaggctggccaagggtccggggcagctgcaggtgccagggcccctggtagggcgggggcaagctcaacccttctgcttcaatagcaggcaacagcaaggcacacacacacccacgccgtcttggagaagggccccttcaggatgaaggctgcagacagggccacccagctgtgtagcgagtacc

SEQ ID NO: 48319 - DNA, 381 bp, Homo sapiens
gaagaaaaaagtattataccttgacaccaatcattccagctactgtagctgtgccattttgggtatataatttctttgggaaatcgaaagaatgtcaagtatgtgaaggtaattgaggatggctgcagaatggaatgtatgtagatcctcaagtcatttcaagtttccttcctacctctttctcaaagaagcacatggatcagatatggtgaaagttgagggaggaggcatggtcaggaagagggaatatgttaaggctcagttgcaaacgttgtgttaacttaccctagccactaggtagatctagggtgatttaattgtcttaatctaaagactaatgtacttaaaatgatctactaaaggtgaactatttactcccat

SEQ ID NO: 48320 - DNA, 727 bp, Homo sapiens
attcagtgtaaagtgtaagtctagtgggcctagaatcttcttacctgctgagattgtctaggctcctacaacctcggcctgtagacttaagagaactgtgtggagcatggaatgagatttttgccccctccctccctgtcttccttcctttctcttttttcgttttgcagtaattagtgttggttctgtctcttttcctgtctccacacacacataaacacatccttagtcttccttcctttcattgtaaatgatagcaaactgattttgactttttccattttctttatatatgaagatataacataaatatatagatgtaagcatttctgaagggcaggaaagctggtaggggctttatgaaatctccatgaggccagtttcatgacttagcagccccacagggctggtcttcagatccaaggcgatgggctgcagggcctgcaccttccctcttggcagagcggtgccacagaggtgcagagctgctgcgctgggcaagacctgctcctgcacaggacttggagtaggggcctgtgccgagggcggtgctgctcttcctggggccctcaccagcctgtgctttacatagaggcttgtaaagaagcctgcgagacaggagtgtgttcagaatatggacagggtcagccgattacagcctgaggggtaaatccagcctgccattgaattttgtaaataaaaatgtatctaaacacaaacacaccca

SEQ ID NO: 48321 - DNA, 1016 bp, Homo sapiens
gtactcatattactataaggaaacaaaaagaaagaggagctaatctgcaccgactctcttatctaccaccgctacatgccatggtcatggatgaaaaggtcaagagaagctttgtgctggacacggcttctgccatctgcaactacaatgcccactacaagaatcaccccaaatactggtgccgaggctatttccgtgactactgcaacatcatcgccttctcccctaacagcaccaatcatgtggccctgagggacacagggaaccagctcattgtcactatgtcctgcctgaccaaagaggacacgggctggtactggtgtggcatccagcgggactttgccagggatgacatggattttacagagctgattgtaactgacgacaaaggaaccctggccaatgacttttggtctgggaaagacctatcaggcaacaaaaccagaagctgcaaggctcccaaagttgtccgcaaggctgaccgctccaggacgtccattctcatcatttgcatactgatcacgggtttgggaatcatctctgtaatcagtcatttgaccaaaaggaggagaagtcaaaggaatagaaggggtaagtagctattgttgagggagggggtgggcaagaattagagaaaatgaaagaggtcaaggagcagatttcaaatgagtgaatgagagcctcttcatattgcctggtcacctggagaccaatgcagccagccatgggctggggtagatatctgcttgatggtgacaaggcatcacgagaagtgacagagggagcactggagctttcttaagtggatacatgtgtaggtcaggaaggaaggaggtcctgagacaaccacaccaggttcccatctgcagagccacctacctccccagcacacaaacttcgggctcctgtcgaaggaatgagcttctgggaccgctgggtaagcaggtatagaagagtctcctttttcatatacacaggatgttgccctgttgcccaggcttgagtgccgaagtatg

SEQ ID NO: 48322 - DNA, 656 bp, Homo sapiens
gcctgttctgagcctcaccctatcagtcagtagagagagatgtccagaaaaaatatctttcaggaaagttctcccctgcagaattttttttccttgttaaatatcaggaatataggcgtgagccaccgcgcccggcagcctcaggctcttcaaggccctccgtcaagcaatgatgccatggtcatggatgaaaaggtcaagagaagctttgtgctggacacggcttctgccatctgcaactacaatgcccactacaagaatcaccccaaatactggtgccgaggctatttccgtgactactgcaacatcatcgccttctcccctaacagcaccaatcatgtggccctgagggacacagggaaccagctcattgtcactatgtcctgcctgaccaaagaggacacgggctggtactggtgtggcatccagcgggactttgccagggatgacatggattttacagagctgattgtaactgacgacaaaggaaccctggccaatgacttttggtctgggaaaggactatcaagccacaaaccagaagctgcaggcttccaccggcttgggatcatcttgtatcagcctttgcccaaaggggagaatcaaagaattgaaagtatgcgaccctttgaggcccttttgcgggtccgaatcca

SEQ ID NO: 48323 - DNA, 1154 bp, Homo sapiens
gctagggacagagggcctcctaacggtaagcctcaggctcttcaaggccctccgtcaagcaatggtaggaggcctccatatttcacccacccttaggccagggaaaaggacttctccagagttgctttattagtttgctagggctgtgataacaacaacagcaacaaaaccacagtctgggaggctaaaacaatggaaatttatttccttatgttatgaaggtgatgccatggtcatggatgaaaaggtcaagagaagctttgtgctggacacggcttctgccatctgcaactacaatgcccactacaagaatcaccccaaatactggtgccgaggctatttccgtgactactgcaacatcatcgccttctcccctaacagcaccaatcatgtggccctgagggacacagggaaccagctcattgtcactatgtcctgcctgaccaaagaggacacgggctggtactggtgtggcatccagcgggactttgccagggatgacatggattttacagagctgattgtaactgacgacaaaggaaccctggccaatgacttttggtctgggaaagacctatcaggcaacaaaaccagaagctgcaaggctcccaaagttgtccgcaaggctgaccgctccaggacgtccattctcatcatttgcatactgatcacgggtttgggaatcatctctgtaatcagtcatttgaccaaaaggaggagaagtcaaaggaatagaagggtaggcaacactttgaagcccttctcgcgtgtcctgactccaaaggaaatggctcctactgaacagatgtgactgaagatttttttaatttagttcataaagtgatgctacaacagaataatcaccatgacaactggcccacacctcagagactgattctgatctcccaggaattctgaaggaccctctatccttgacaacaatcatttgcagccaggtagcaacggcggtagtcagaggagctatgatagaccacacccaagcaaggctgccctcaaataacatctcaagatcttagttcttatgcattccatcagtcagaagtgaagaagaggtggagaatctggattggggaccaggaaatcacttgtattttgttagccaataaattcctagccagtgttgaatgaaaaaa

SEQ ID NO: 48324 - DNA, 895 bp, Homo sapiens
agcggagttggaccaatggaagggtctccagcaggacccattgagcagaaggaggccaggtgggaaagctcctgggaagagcagccagactggacactgggctgcttgagtcctgagtcacacaccaatcatgtggccctgagggacacagggaaccagctcattgtcactatgtcctgcctgaccaaagaggacacgggctggtactggtgtggcatccagcgggactttgccagggatgacatggattttacagagctgattgtaactgacgacaaaggaaccctggccaatgacttttggtctgggaaagacctatcaggcaacaaaaccagaagctgcaaggctcccaaagttgtccgcaaggctgaccgctccaggacgtccattctcatcatttgcatactgatcacgggtttgggaatcatctctgtaatcagtcatttgaccaaaaggaggagaagtcaaaggaatagaagggtaggcaacactttgaagcccttctcgcgtgtcctgactccaaaggaaatggctcctactgaacagatgtgactgaagatttttttaatttagttcataaagtgatgctacaacagaataatcaccatgacaactggcccacacctcagagactgattctgatctcccaggaattctgaaggaccctctatccttgacaacaatcatttgcagccaggtagcaacggcggtagtcagaggagctatgatagaccacacccaagcaaggctgccctcaaataacatctcaagatcttagttcttatgcattccatcagtcagaagtgaagaagaggtggagaatctggattggggaccaggaaatcacttgtattttgttagccaataaattcctagccagtgttgaatgaaaaaa

SEQ ID NO: 48325 - DNA, 1135 bp, Homo sapiens
  misc_feature (1087)..(1087): n is a, c, g, or t
gcctgttctgagcctcaccctatcagtcagtagagagagatgtccagaaaaaatatctttcaggaaagttctcccctgcagaattttttttccttgttaaatatcaggaatataggcgtgagccaccgcgcccggcagcctcaggctcttcaaggccctccgtcaagcaatgatgccatggtcatggatgaaaaggtcaagagaagctttgtgctggacacggcttctgccatctgcaactacaatgcccactacaagaatcaccccaaatactggtgccgaggctatttccgtgactactgcaacatcatcgccttctcccctaacagcaccaatcatgtggccctgagggacacagggaaccagctcattgtcactatgtcctgcctgaccaaagaggacacgggctggtactggtgtggcatccagcgggactttgccagggatgacatggattttacagagctgattgtaactgacgacaaaggaaccctggccaatgacttttggtctgggaaagacctatcaggcaacaaaaccagaagctgcaaggctcccaaagttgtccgcaaggctgaccgctccaggacgtccattctcatcatttgcatactgatcacgggtttgggaatcatctctgtaatcagtcatttgaccaaaaggaggagaagtcaaaggaatagaagggtaggcaacactttgaagcccttctcgcgtgtcctgactccaaaggaaatggctcctactgaacagatgtgactgaagatttttttaatttagttcataaagtgatgctacaacagaataatcaccatgacaactggcccacacctcagagactgattctgatctcccaggaattctgaaggaccctctatccttgacaacaatcatttgcagccaggtagcaacggcggtagtcagaggagctatgatagaccacacccaagcaaggctgccctcaaataacatctcaagatcttagttcttatgcattccatcagtcagaagtgaagaagaggtggagaatctggattggggaccaggaaatcacttgtattttgttagccaaaataatccctcagtnaaagggcaagccccccccgtcgccgctgggcgccgccatatacgcgaa

SEQ ID NO: 48326 - DNA, 1113 bp, Homo sapiens
gcctgttctgagcctcaccctatcagtcagtagagagagatgtccagaaaaaatatctttcaggaaagttctcccctgcagaattttttttccttgttaaatatcaggaatataggcgtgagccaccgcgcccggcagcctcaggctcttcaaggccctccgtcaagcaatgatgccatggtcatggatgaaaaggtcaagagaagctttgtgctggacacggcttctgccatctgcaactacaatgcccactacaagaatcaccccaaatactggtgccgaggctatttccgtgactactgcaacatcatcgccttctcccctaacagcaccaatcatgtggccctgagggacacagggaaccagctcattgtcactatgtcctgcctgaccaaagaggacacgggctggtactggtgtggcatccagcgggactttgccagggatgacatggattttacagagctgattgtaactgacgacaaaggaaccctggccaatgacttttggtctgggaaagacctatcaggcaacaaaaccagaagctgcaaggctcccaaagttgtccgcaaggctgaccgctccaggacgtccattctcatcatttgcatactgatcacgggtttgggaatcatctctgtaatcagtcatttgaccaaaaggaggagaagtcaaaggaatagaaggggtaagtagctattgttgagggagggggtgggcaagaattagagaaaatgaaagaggtcaaggagcagatttcaaatgagtgaatgagagcctcttcatattgcctggtcacctggagaccaatgcagccagccatgggctggggtagatatctgcttgatggtgacaaggcatcacgagaagtgacagagggagcactggagctttcttaagtggatacatgtgtaggtcaggaaggaaggaggtcctgagacaaccacaccaggttcccatctgcagagccacctacctccccagcacacaaacttcgggctcctgtcgaaggaatgagcttctgggaccgctgggtaagcaggtatagaagagtctcctttttcatatacacaggatgttgccctgttgcccaggcttgagtgccgaagtatg

SEQ ID NO: 48327 - DNA, 1102 bp, Homo sapiens
gcctgttctgagcctcaccctatcagtcagtagagagagatgtccagaaaaaatatctttcaggaaagttctcccctgcagaattttttttccttgttaaatatcaggaatataggcgtgagccaccgcgcccggcagcctcaggctcttcaaggccctccgtcaagcaatgatgccatggtcatggatgaaaaggtcaagagaagctttgtgctggacacggcttctgccatctgcaactacaatgcccactacaagaatcaccccaaatactggtgccgaggctatttccgtgactactgcaacatcatcgccttctcccctaacagcaccaatcatgtggccctgagggacacagggaaccagctcattgtcactatgtcctgcctgaccaaagaggacacgggctggtactggtgtggcatccagcgggactttgccagggatgacatggattttacagagctgattgtaactgacgacaaaggaaccctggccaatgacttttggtctgggaaagacctatcaggcaacaaaaccagaagctgcaaggctcccaaagttgtccgcaaggctgaccgctccaggacgtccattctcatcatttgcatactgatcacgggtttgggaatcatctctgtaatcagtcatttgaccaaaaggaggagaagtcaaaggaatagaagggtaggcaacactttgaagcccttctcgcgtgtcctgactccaaaggaaatggctcctactgaacagatgtgactgaagatttttttaatttagttcataaagtgatgctacaacagaataatcaccatgacaactggcccacacctcagagactgattctgatctcccaggaattctgaaggaccctctatccttgacaacaatcatttgcagccaggtagcaacggcggtagtcagaggagctatgatagaccacacccaagcaaggctgccctcaaataacatctcaagatcttagttcttatgcattccatcagtcagaagtgaagaagaggtggagaatctggattggggaccaggaaatcacttgtattttgttagccaataaattcctagccagtgttgaatgaaaaaa

SEQ ID NO: 48328 - DNA, 1159 bp, Homo sapiens
agcggagttggaccaatggaagggtctccagcaggacccattgagcagaaggaggccaggtgggaaagctcctgggaagagcagccagactggacactgggctgcttgagtcctgagtcacaattcagaattcctgggctccctgggtgcattctatcattccagttgaaagtttgcttccttccagtcatgtggctcttcattctactctccttggctctcatttcagatgccatggtcatggatgaaaaggtcaagagaagctttgtgctggacacggcttctgccatctgcaactacaatgcccactacaagaatcaccccaaatactggtgccgaggctatttccgtgactactgcaacatcatcgccttctcccctaacagcaccaatcatgtggccctgagggacacagggaaccagctcattgtcactatgtcctgcctgaccaaagaggacacgggctggtactggtgtggcatccagcgggactttgccagggatgacatggattttacagagctgattgtaactgacgacaaaggaaccctggccaatgacttttggtctgggaaagacctatcaggcaacaaaaccagaagctgcaaggctcccaaagttgtccgcaaggctgaccgctccaggacgtccattctcatcatttgcatactgatcacgggtttgggaatcatctctgtaatcagtcatttgaccaaaaggaggagaagtcaaaggaatagaagggtaggcaacactttgaagcccttctcgcgtgtcctgactccaaaggaaatggctcctactgaacagatgtgactgaagatttttttaatttagttcataaagtgatgctacaacagaataatcaccatgacaactggcccacacctcagagactgattctgatctcccaggaattctgaaggaccctctatccttgacaacaatcatttgcagccaggtagcaacggcggtagtcagaggagctatgatagaccacacccaagcaaggctgccctcaaataacatctcaagatcttagttcttatgcattccatcagtcagaagtgaagaagaggtggagaatctggattggggaccaggaaatcacttgtattttgttagccaataaattcctagccagtgttgaatgaaaaaa

SEQ ID NO: 48329 - DNA, 1005 bp, Homo sapiens
gtactcatattactataaggaaacaaaaagaaagaggagctaatctgcaccgactctcttatctaccaccgctacatgccatggtcatggatgaaaaggtcaagagaagctttgtgctggacacggcttctgccatctgcaactacaatgcccactacaagaatcaccccaaatactggtgccgaggctatttccgtgactactgcaacatcatcgccttctcccctaacagcaccaatcatgtggccctgagggacacagggaaccagctcattgtcactatgtcctgcctgaccaaagaggacacgggctggtactggtgtggcatccagcgggactttgccagggatgacatggattttacagagctgattgtaactgacgacaaaggaaccctggccaatgacttttggtctgggaaagacctatcaggcaacaaaaccagaagctgcaaggctcccaaagttgtccgcaaggctgaccgctccaggacgtccattctcatcatttgcatactgatcacgggtttgggaatcatctctgtaatcagtcatttgaccaaaaggaggagaagtcaaaggaatagaagggtaggcaacactttgaagcccttctcgcgtgtcctgactccaaaggaaatggctcctactgaacagatgtgactgaagatttttttaatttagttcataaagtgatgctacaacagaataatcaccatgacaactggcccacacctcagagactgattctgatctcccaggaattctgaaggaccctctatccttgacaacaatcatttgcagccaggtagcaacggcggtagtcagaggagctatgatagaccacacccaagcaaggctgccctcaaataacatctcaagatcttagttcttatgcattccatcagtcagaagtgaagaagaggtggagaatctggattggggaccaggaaatcacttgtattttgttagccaataaattcctagccagtgttgaatgaaaaaa

SEQ ID NO: 48330 - DNA, 1124 bp, Homo sapiens
  misc_feature (1089)..(1089): n is a, c, g, or t
gcctgttctgagcctcaccctatcagtcagtagagagagatgtccagaaaaaatatctttcaggaaagttctcccctgcagaattttttttccttgttaaatatcaggaatataggcgtgagccaccgcgcccggcagcctcaggctcttcaaggccctccgtcaagcaatgatgccatggtcatggatgaaaaggtcaagagaagctttgtgctggacacggcttctgccatctgcaactacaatgcccactacaagaatcaccccaaatactggtgccgaggctatttccgtgactactgcaacatcatcgccttctcccctaacagcaccaatcatgtggccctgagggacacagggaaccagctcattgtcactatgtcctgcctgaccaaagaggacacgggctggtactggtgtggcatccagcgggactttgccagggatgacatggattttacagagctgattgtaactgacgacaaaggaaccctggccaatgacttttggtctgggaaagacctatcaggcaacaaaaccagaagctgcaaggctcccaaagttgtccgcaaggctgaccgctccaggacgtccattctcatcatttgcatactgatcacgggtttgggaatcatctctgtaatcagtcatttgaccaaaaggaggagaagtcaaaggaatagaagggtaggcaacactttgaagcccttctcgcgtgtcctgactccaaaggaaatggctcctactgaacagatgtgactgaagatttttttaatttagttcataaagtgatgctacaacagaataatcaccatgacaactggcccacacctcagagactgattctgatctcccaggaattctgaaggaccctctatccttgacaacaatcatttgcagccaggtagcaacggcggtagtcagaggagctatgatagaccacacccaagcaaggctgccctcaaataacatctcaagatcttagttcttatgcattccatcagtcagaagtgaagaagaggtggagaatctggattggggaccaggaaatcacttgtattttgttagccaaaccgatgcggcaagtcntcctctctccccgcgcgatatgtgcgggaaaaaaa

SEQ ID NO: 48331 - DNA, 522 bp, Homo sapiens
agcggagttggaccaatggaagggtctccagcaggacccattgagcagaaggaggccaggtgggaaagctcctgggaagagcagccagactggacactgggctgcttgagtcctgagtcacaattcagaattcctgggctccctgggtgcattctatcattccagttgaaagtttgcttccttccagtcatgtggctcttcattctactctccttggctctcatttcagcaccaatcatgtggccctgagggacacagggaaccagctcattgtcactatgtcctgcctgaccaaagaggacacgggctggtactggtgtggcatccagcgggactttgccagggatgacatggattttacagagctgattgtaactgacgacaaaggaaccctggccaatgacttttggtctgggaaagacctatcaggcaacaaaaccagagctgcaaggctccaagtgtcgcagctgacgtcaggacgtccatctcatcattcgatactgatcacggttccacattccc

SEQ ID NO: 48332 - DNA, 1197 bp, Homo sapiens
ctggaggcctggctggtgctcacatacaataattaactgctgagtggccttcgcccaatcccaggctccactcctgggctccattcccactccctgcctgtctcctaggccactaaaccacagctgtcccctggaataaggcaagggggagtgtagagcagagcagaagcctgagccagacggagagccacctcctctcccaggaactgaacccaaaggatcacctggtattccctgagagtacagatttctccggcgtggccctcaagggacagacatggctcagcggatgacaacacagctgctgctccttctagtgtgggtggctgtagtaggggaggctcagacaaggattgcatgggccaggactgagcttctcaatgtctgcatgaacgccaagcaccacaaggaaaagccaggccccgaggacaagttgcatgagcagtgtcgaccctggaggaagaatgcctgctgttctaccaacaccagccaggaagcccataaggatgtttcctacctatatagattcaactggaaccactgtggagagatggcacctgcctgcaaacggcatttcatccaggacacctgcctctacgagtgctcccccaacttggggccctggatccagcaggtggatcagagctggcgcaaagagcgggtactgaacgtgcccctgtgcaaagaggactgtgagcaatggtgggaagattgtcgcacctcctacacctgcaagagcaactggcacaagggctggaactggacttcagggtttaacaagtgcgcagtgggagctgcctgccaacctttccatttctacttccccacacccactgttctgtgcaatgaaatctggactcactcctacaaggtcagcaactacagccgagggagtggccgctgcatccagatgtggttcgacccagcccagggcaaccccaatgaggaggtggcgaggttctatgctgcagccatgagtggggctgggccctgggcagcctggcctttcctgcttagcctggccctaatgctgctgtggctgctcagctgacctccttttaccttctgatacctggaaatccctgccctgttcagccccacagctcccaactatttggttcctgctccatggtcgggcctctgacagccactttgaataaaccagacaccgcacatgtgtcttgagaattatttgga

SEQ ID NO: 48333 - DNA, 965 bp, Homo sapiens
cattccttggtgccactgaccacagctctttcttcagggacagacatggctcagcggatgacaacacagctgctgctccttctagtgtgggtggctgtagtaggggaggctcagacaaggattgcatgggccaggactgagcttctcaatgtctgcatgaacgccaagcaccacaaggaaaagccaggccccgaggacaagttgcatgagcagtgtcgaccctggaggaagaatgcctgctgttctaccaacaccagccaggaagcccataaggatgtttcctacctatatagattcaactggaaccactgtggagagatggcacctgcctgcaaacggcatttcatccaggacacctgcctctacgagtgctcccccaacttggggccctggatccagcaggtggatcagagctggcgcaaagagcgggtactgaacgtgcccctgtgcaaagaggactgtgagcaatggtgggaagattgtcgcacctcctacacctgcaagagcaactggcacaagggctggaactggacttcagggtttaacaagtgcgcagtgggagctgcctgccaacctttccatttctacttccccacacccactgttctgtgcaatgaaatctggactcactcctacaaggtcagcaactacagccgagggagtggccgctgcatccagatgtggttcgacccagcccagggcaaccccaatgaggaggtggcgaggttctatgctgcagccatgagtggggctgggccctgggcagcctggcctttcctgcttagcctggccctaatgctgctgtggctgctcagctgacctccttttaccttctgatacctggaaatccctgccctgttcagccccacagctcccaactatttggttcctgctccatggtcgggcctctgacagccactttgaataaaccagacaccgcacatgtgtcttgagaattatttgga

SEQ ID NO: 48334 - DNA, 1206 bp, Homo sapiens
  misc_feature (1195)..(1195): n is a, c, g, or t
  misc_feature (1200)..(1200): n is a, c, g, or t
  misc_feature (1206)..(1206): n is a, c, g, or t
ctggaggcctggctggtgctcacatacaataattaactgctgagtggccttcgcccaatcccaggctccactcctgggctccattcccactccctgcctgtctcctaggccactaaaccacagctgtcccctggaataaggcaagggggagtgtagagcagagcagaagcctgagccagacggagagccacctcctctcccaggaactgaacccaaaggatcacctggtattccctgagagtacagatttctccggcgtggccctcaagggacagacatggctcagcggatgacaacacagctgctgctccttctagtgtgggtggctgtagtaggggaggctcagacaaggattgcatgggccaggactgagcttctcaatgtctgcatgaacgccaagcaccacaaggaaaagccaggccccgaggacaagttgcatgagcagtgtcgaccctggaggaagaatgcctgctgttctaccaacaccagccaggaagcccataaggatgtttcctacctatatagattcaactggaaccactgtggagagatggcacctgcctgcaaacggcatttcatccaggacacctgcctctacgagtgctcccccaacttggggccctggatccagcaggtggatcagagctggcgcaaagagcgggtactgaacgtgcccctgtgcaaagaggactgtgagcaatggtgggaagattgtcgcacctcctacacctgcaagagcaactggcacaagggctggaactggacttcagggtttaacaagtgcgcagtgggagctgcctgccaacctttccatttctacttccccacacccactgttctgtgcaatgaaatctggactcactcctacaaggtcagcaactacagccgagggagtggccgctgcatccagatgtggttcgacccagcccagggcaaccccaatgaggaggtggcgaggttctatgctgcagccatgagtggggctgggccctgggcagcctggcctttcctgcttagcctggccctaatgctgctgtggctgctcagctgacctccttttaccttctgatacctggaaatccctgccctgttcagccccacagctcccaactatttggttcctgctccatggtcgggcctctgacagccactttgaataaaccagacacgtgcagcgtagaatgggatcctctanagtgncactcn

SEQ ID NO: 48335 - DNA, 790 bp, Homo sapiens
  misc_feature (16)..(16): n is a, c, g, or t
accaaatgtctgaacngcggtcctctcgtactgagcagtgtcgaccctggaggaagaatgcctgctgttctaccaacaccagccaggaagcccataaggatgtttcctacctatatagattcaactggaaccactgtggagagatggcacctgcctgcaaacggcatttcatccaggacacctgcctctacgagtgctcccccaacttggggccctggatccagcaggtggatcagagctggcgcaaagagcgggtactgaacgtgcccctgtgcaaagaggactgtgagcaatggtgggaagattgtcgcacctcctacacctgcaagagcaactggcacaagggctggaactggacttcagggtttaacaagtgcgcagtgggagctgcctgccaacctttccatttctacttccccacacccactgttctgtgcaatgaaatctggactcactcctacaaggtcagcaactacagccgagggagtggccgctgcatccagatgtggttcgacccagcccagggcaaccccaatgaggaggtggcgaggttctatgctgcagccatgagtggggctgggccctgggcagcctggcctttcctgcttagcctggccctaatgctgctgtggctgctcagctgacctccttttaccttctgatacctggaaatccctgccctgttcagccccacagctcccaactatttggttcctgctccatggtcgggcctctgacagccactttgaataaaccagacaccgcacatgtgtcttgagaattatttgga

SEQ ID NO: 48336 - DNA, 325 bp, Homo sapiens
ctcggctggtagttgctgaccttgtaggagtgatccagatgtggttcgacccagcccagggcaaccccaatgaggaggtggcgaggttctatgctgcagccatgagtggggctgggccctgggcagcctggcctttcctgcttagcctggccctaatgctgctgtggctgctcagctgacctccttttaccttctgatacctggaaatccctgccctgttcagccccacagctcccaactatttggttcctgctccatggtcgggcctctgacagccactttgaataaaccagacaccgcacatgtgtcttgagaattatttgga

SEQ ID NO: 48337 - DNA, 211 bp, Homo sapiens
  misc_feature (27)..(27): n is a, c, g, or t
aaaggccaggctgcccagggccagccncactcctggccctaatgctgctgtggctgctcagctgacctccttttaccttctgatacctggaaatccctgccctgttcagccccacagctcccaactatttggttcctgctccatggtcgggcctctgacagccactttgaataaaccagacaccgcacatgtgtcttgagaattatttgga

SEQ ID NO: 48338 - DNA, 1131 bp, Homo sapiens
ctggaggcctggctggtgctcacatacaataattaactgctgagtggccttcgcccaatcccaggctccactcctgggctccattcccactccctgcctgtctcctaggccactaaaccacagctgtcccctggaataaggcaagggggagtgtagagcagagcagaagcctgagccagacggagagccacctcctctcccagggacagacatggctcagcggatgacaacacagctgctgctccttctagtgtgggtggctgtagtaggggaggctcagacaaggattgcatgggccaggactgagcttctcaatgtctgcatgaacgccaagcaccacaaggaaaagccaggccccgaggacaagttgcatgagcagtgtcgaccctggaggaagaatgcctgctgttctaccaacaccagccaggaagcccataaggatgtttcctacctatatagattcaactggaaccactgtggagagatggcacctgcctgcaaacggcatttcatccaggacacctgcctctacgagtgctcccccaacttggggccctggatccagcaggtggatcagagctggcgcaaagagcgggtactgaacgtgcccctgtgcaaagaggactgtgagcaatggtgggaagattgtcgcacctcctacacctgcaagagcaactggcacaagggctggaactggacttcagggtttaacaagtgcgcagtgggagctgcctgccaacctttccatttctacttccccacacccactgttctgtgcaatgaaatctggactcactcctacaaggtcagcaactacagccgagggagtggccgctgcatccagatgtggttcgacccagcccagggcaaccccaatgaggaggtggcgaggttctatgctgcagccatgagtggggctgggccctgggcagcctggcctttcctgcttagcctggccctaatgctgctgtggctgctcagctgacctccttttaccttctgatacctggaaatccctgccctgttcagccccacagctcccaactatttggttcctgctccatggtcgggcctctgacagccactttgaataaaccagacaccgcacatgtgtcttgagaattatttgga

SEQ ID NO: 48339 - DNA, 1356 bp, Homo sapiens
ggaaaggattttctcagcccccatccccagcactgtgtgttggccgcacccatgagagcctcagcactctgaaggtgcagggggcaaaggccaaaagagctctggcctgaacttgggtggtccctactgtgtgacttggggcatggccctcatctgtgctgaaatgattccacaaagattaaactggctatcatttgttgatttcccccttcttacatttaatccttgcaggagaaagctaagcctcaagatagtttgcttctctttcccccaaggccaaggagaaggtggagtgagggctggggtcgggacaggttgaacgggaaccctgtgctctaaacagttagggtttgttcccgcaggaactgaacccaaaggatcacctggtattccctgagagtacagatttctccggcgtggccctcaagggacagacatggctcagcggatgacaacacagctgctgctccttctagtgtgggtggctgtagtaggggaggctcagacaaggattgcatgggccaggactgagcttctcaatgtctgcatgaacgccaagcaccacaaggaaaagccaggccccgaggacaagttgcatgagcagtgtcgaccctggaggaagaatgcctgctgttctaccaacaccagccaggaagcccataaggatgtttcctacctatatagattcaactggaaccactgtggagagatggcacctgcctgcaaacggcatttcatccaggacacctgcctctacgagtgctcccccaacttggggccctggatccagcaggtggatcagagctggcgcaaagagcgggtactgaacgtgcccctgtgcaaagaggactgtgagcaatggtgggaagattgtcgcacctcctacacctgcaagagcaactggcacaagggctggaactggacttcagggtttaacaagtgcgcagtgggagctgcctgccaacctttccatttctacttccccacacccactgttctgtgcaatgaaatctggactcactcctacaaggtcagcaactacagccgagggagtggccgctgcatccagatgtggttcgacccagcccagggcaaccccaatgaggaggtggcgaggttctatgctgcagccatgagtggggctgggccctgggcagcctggcctttcctgcttagcctggccctaatgctgctgtggctgctcagctgacctccttttaccttctgatacctggaaatccctgccctgttcagccccacagctcccaactatttggttcctgctccatggtcgggcctctgacagccactttgaataaaccagacaccgcacatgtgtcttgagaattatttgga

SEQ ID NO: 48340 - DNA, 373 bp, Homo sapiens
ctatcagctgtcgttctctgaaatttaaacctagacaagaagcttctgaattttactaatattaaaacagtatttgctatatataggaaacaaaagctatataactacagtagctgaactaaaattataaataggaagaaaagtatatttaaatttgatcatagatggttgacaacaattactaaaatccttaagacttatgattacccccttttctaatctaccgttaaaaaaataatagtatggaggtttagaaggaggaagttgtgaaagatatcatagaggcaaacctacaaatgcttgtatagtaagtgttccctatttagtctagcatgaaatcataagaattgttatgtactctaataatctattt

SEQ ID NO: 48341 - DNA, 540 bp, Homo sapiens
atcttaattaatgaccctccatataaagagaatattatgaaatcatcaagaattcatcatgatcaaccagtgaagcccttggatcgagcagtcttctggattgaatttgtcatgcgccacaaaggagccaaacaccttcgagttgcagcccatgacctcacctggttccagtaccactctttggatgtgattgggttcctgctggcctgtgtggcaactgtgctatttatcatcacaaagtgttgtctgttttgtttctggaagttcgctagaaaaggaaagaaaggaaaaagggattagttaaatctgagatttgaagctggaaaacctgatagatagggatacttcagttgattccagcaataaatattgtgatgcaagatttctttcttcctgtgacaaaaaaaaaaaaatcttttcgaaatctaccttgtcaagtaaaaatttgtttttcagagatttaccacccagttaatggttagaaatattttgtggcaatgaagaaaacactagggaaaataaaaaataacataaagccgt

SEQ ID NO: 48342 - DNA, 491 bp, Homo sapiens
atcttaattaatgaccctccatataaagagaatattatgaaatcatcaagaattcatcatgatcaaccagtgaagcccttggatcgagcagtcttctggattgaatttgtcatgcgccacttcgagttgcagcccatgacctcacctggttccagtaccactctttggatgtgattgggttcctgctggcctgtgtggcaacacaaagtgttgtctgttttgtttctggaagttcgctagaaaaggaaagaaaggaaaaagggattagttaaatctgagatttgaaatagggatacttcagttgattccagcaataaatattgtgatgcaagatttctttcttcctgtgacaaaaaaaaaaaaatcttttcgaaatctaccttgtcaagtaaaaatttgtttttcagagatttaccacccagttaatggttagaaatattttgtggcaatgaagaaaacactagggaaaataaaaaataacataaagccgt

SEQ ID NO: 48343 - DNA, 2554 bp, Homo sapiens
tttagcagtctgtgatgatcagcaaaaaagcacataaagtaaaaattagttgaccatgctaaattcaattctggaatttttttttatttgggcatttctagaactttttacatttgaaagtacatgatgagtattagtaacgatgacttatgtataatcagaatctttatgacaatttagttttacaaggtcagaagagatgagttgctaaacccagctgtgatacctcagttggaaagggaattcaaaggtatgctttgtagaacagaaaagtatagtttttttttcatgaactttaatcattttctgtttttcctctatgtgagtcagctacaaaagtggtctaatttttacaacagtagaacttcctccttttctactgtaatcttcccactgactttactgcacaggtatgaaatactagtgtatggatcttcagtaacctttttatttcctagatgattgaaatataggtatttactccatttaaaccaggtgataagatgatgtaaatactcagggagggtattaacttgttacttttgctcgttggggtgtaaagtgccatgactgaataatcttcaattcatgattctagagtaagtttaatttggaaaaaggggcttcacacatggtggtggttgaacattgattcttttatacttaaaaagatgaaaatgttttgtggactgatacattttatcttactgaatatgaattgtttatgtatctctactgtcaaatagcctttttgaaactcaggaaagacaaggttcaattacaccacttttgtcaataagcaaaccaggtatttttttttctcctgttgtctggatatggcaatagattttttaaattgctgtgagaacccatatatgaaaagagaggagttgaattgtgtgtgccttttatgtcttgagatttatatgtggaaaagacgacatctacttcaaactgtatttttttcgtttttttttttttttggggaaggggggagaacggggtcttgctctgtcgcccaggctggagtgcagtggcgcgatctcagctgactgcaacctccacctcccgggttcaagggattctgcctcagcctcccgagtagctgagaccacaggtgcgtgccaccacacccggctaatttttttgtatttttagtagagacggggtttagtagagacggatcactcctgaccacgtgatccgcccacctcggcctcccaaagtgctgggattacaggcgtgagccaccacccccggcctgtattttcagagaggagagcttggtgtttttgtggtgccaagtggtaagataatgtctctttgaggcttcctatggactgcctttattttagtaaactcaagacaccagttaacctcaacagagttttggccttattagaatttgttgtgcatcttattgaaagccaggtttacatcacctcaccccattattctttttagttaaataaatttaccatgccaagtaaccagaatggagcaaattggttgatctttaaggcagtaggtttgactagctagctatcattattgtcacatctaatgctaggcaccagaaaccatttgagccaggagtgtgaatgaataattccagagacactttagacattttttaatgttttatatgaacattttacatttgtgtgattgccttagatattaaattttcctagtgctgataaaaacagcaacattcataacttattttatatattgttccaaagaaaagaatttgttttaatggtttcaaaataactgcacctgaatttgtttatgtgccttaagttctctagtgctatttcaacttttttttcaatctaaatgaagcttaccttagataaggttcatatttgtttcctatagagtaaataaacttccccttcttaaattgtgtaataagcaccaacgtgtggttgcttggcagaatgagaatgttaagggagattgttggatgtttggagtttcattatattttttgtttttattttttgatacctaggtgctttttaaaatattcagacaaatatctatcttacattgattaaacccgtgtaaattcatttgcagtatctacatcgaatgtcaaaaaagtatacttatttttgttccatacttatgtacaattttttccctcttcaggctttttcatttaacctttttgaaaaagcacttactctccccttccctatcacccctcccccaaggtttctttatttaaatttttattgagagttgttggagctctaagacaatacaaatttagagttgaacaaaagtataatctgctttacaactagtatagacctaaggtcatttgctttcaattagaggctccagagtcttcatagtggaaagaatgctttgtatttaattgttcttagttaagttgtagcacgtgaatacttacttacatgttttgtttaaatatacttcttgcatagtttaattttttaaaagttgtatctaataaaatgtcttttaaccattattacttgactatatggttgtattaaattttgtttacgaaaaaaat

SEQ ID NO: 48344 - DNA, 1525 bp, Homo sapiens
tttagcagtctgtgatgatcagcaaaaaagcacataaagtaaaaattagttgaccatgctaaattcaattctggaatttttttttatttgggcatttctagaactttttacatttgaaagtacatgatgagtattagtaacgatgacttatgtataatcagaatctttatgacaatttagttttacaaggtcagaagagatgagttgctaaacccagctgtgatacctcagttggaaagggaattcaaaggtatgctttgtagaacagaaaagtatagtttttttttcatgaactttaatcattttctgtttttcctctatgtgagtcagctacaaaagtggtctaatttttacaacagtagaacttcctccttttctactgtaatcttcccactgactttactgcacaggtatgaaatactagtgtatggatcttcagtaacctttttatttcctagatgattgaaatataggtatttactccatttaaaccaggtgataagatgatgtaaatactcagggagggtattaacttgttacttttgctcgttggggtgtaaagtgccatgactgaataatcttcaattcatgattctagagtaagtttaatttggaaaaaggggcttcacacatggtggtggttgaacattgattcttttatacttaaaaagatgaaaatgttttgtggactgatacattttatcttactgaatatgaattgtttatgtatctctactgtcaaatagcctttttgaaactcaggaaagacaaggttcaattacaccacttttgtcaataagcaaaccaggtatttttttttctcctgttgtctggatatggcaatagattttttaaattgctgtgagaacccatatatgaaaagagaggagttgaattgtgtgtgccttttatgtcttgagatttatatgtggaaaagacgacatctacttcaaactgtatttttttcgttttttttttttccctatcacccctcccccaaggtttctttatttaaatttttattgagagttgttggagctctaagacaatacaaatttagagttgaacaaaagtataatctgctttacaactagtatagacctaaggtcatttgctttcaattagaggctccagagtcttcatagtggaaagaatgctttgtatttaattgttcttagttaagttgtagcacgtgaatacttacttacatgttttgtttaaatatacttcttgcatagtttaattttttaaaagttgtatctaataaaatgtcttttaaccattattacttgactatatggttgtatcaacatattgggtgtacggtaaaaaaacaaaaaaaaaaaaaaaaaaaaaaaaatattgtgtggggcgcgggcaggggcctcagaaaaaaggtttttcagaagccatttgcgttggggggcgggggcccagatagttgataaatgggacactggggcaaaaggggtgtccaaaaggaaaacccggggtaagagcaaaggggttgtggtttcctcagcaa

SEQ ID NO: 48345 - DNA, 2500 bp, Homo sapiens
tttagcagtctgtgatgatcagcaaaaaagcacataaagtaaaaattagttgaccatgctaaattcaattctggaatttttttttatttgggcatttctagaactttttacatttgaaagtacatgatgagtattagtaacgatgacttatgtataatcagaatctttatgacaatttagttttacaaggtcagaagagatgagttgctaaacccagctgtgatacctcagttggaaagggaattcaaaggtatgctttgtagaacagaaaagtatagtttttttttcatgaactttaatcattttctgtttttcctctatgtgagtcagctacaaaagtggtctaatttttacaacagtagaacttcctccttttctactgtaatcttcccactgactttactgcacaggtatgaaatactagtgtatggatcttcagtaacctttttatttcctagatgattgaaatataggtatttactccatttaaaccaggtgataagatgatgtaaatactcagggagggtattaacttgttacttttgctcgttggggtgtaaagtgccatgactgaataatcttcaattcatgattctagagtaagtttaatttggaaaaaggggcttcacacatggtggtggttgaacattgattcttttatacttaaaaagatgaaaatgttttgtggactgatacattttatcttactgaatatgaattgtttatgtatctctactgtcaaatagcctttttgaaactcaggaaagacaaggttcaattacaccacttttgtcaataagcaaaccaggtatttttttttctcctgttgtctggatatggcaatagattttttaaattgctgtgagaacccatatatgaaaagagaggagttgaattgtgtgtgccttttatgtcttgagatttatatgtggaaaagacgacatctacttcaaactgtatttttttcgtttttttttttttttggggaaggggggagaacggggtcttgctctgtcgcccaggctggagtgcagtggcgcgatctcagctgactgcaacctccacctcccgggttcaagggattctgcctcagcctcccgagtagctgagaccacaggtgcgtgccaccacacccggctaatttttttgtatttttagtagagacggggtttagtagagacggatcactcctgaccacgtgatccgcccacctcggcctcccaaagtgctgggattacaggcgtgagccaccacccccggcctgtattttcagagaggagagcttggtgtttttgtggtgccaagtggtaagataatgtctctttgaggcttcctatggactgcctttattttagtaaactcaagacaccagttaacctcaacagagttttggccttattagaatttgttgtgcatcttattgaaagccaggtttacatcacctcaccccattattctttttagttaaataaatttaccatgccaagtaaccagaatggagcaaattggttgatctttaaggcagtaggtttgactagctagctatcattattgtcacatctaatgctaggcaccagaaaccatttgagccaggagtgtgaatgaataattccagagacactttagacattttttaatgttttatatgaacattttacatttgtgtgattgccttagatattaaattttcctagtgctgataaaaacagcaacattcataacttattttatatattgttccaaagaaaagaatttgttttaatgatttcaacttttttttcaatctaaatgaagcttaccttagataaggttcatatttgtttcctatagagtaaataaacttccccttcttaaattgtgtaataagcaccaacgtgtggttgcttggcagaatgagaatgttaagggagattgttggatgtttggagtttcattatattttttgtttttattttttgatacctaggtgctttttaaaatattcagacaaatatctatcttacattgattaaacccgtgtaaattcatttgcagtatctacatcgaatgtcaaaaaagtatacttatttttgttccatacttatgtacaattttttccctcttcaggctttttcatttaacctttttgaaaaagcacttactctccccttccctatcacccctcccccaaggtttctttatttaaatttttattgagagttgttggagctctaagacaatacaaatttagagttgaacaaaagtataatctgctttacaactagtatagacctaaggtcatttgctttcaattagaggctccagagtcttcatagtggaaagaatgctttgtatttaattgttcttagttaagttgtagcacgtgaatacttacttacatgttttgtttaaatatacttcttgcatagtttaattttttaaaagttgtatctaataaaatgtcttttaaccattattacttgactatatggttgtattaaattttgtttacgaaaaaaat

SEQ ID NO: 48346 - DNA, 479 bp, Homo sapiens
aatacattttaagtatccccaacacagttcggaaaacaaaaataattccccttccatacttatgtacaattttttccctcttcaggctttttcatttaacctttttgaaaaagcacttactctccccttccctatcacccctcccccaaggtttctttatttaaatttttattgagagttgttggagctctaagacaatacaaatttagagttgaacaaaagtataatctgctttacaactagtatagacctaaggtcatttgctttcaattagaggctccagagtcttcatagtggaaagaatgctttgtatttaattgttcttagttaagttgtagcacgtgaatacttacttacatgttttgtttaaatatacttcttgcatagtttaattttttaaaagttgtatctaataaaatgtcttttaaccattattacttgactatatggttgtattaaattttgtttacgaaaaaaat

SEQ ID NO: 48347 - DNA, 320 bp, Homo sapiens
caggatgcagttaaacaacttgggatttatccagttgtgttctactgctgttaagtttggtgagaatgtttggcaattagtgggaggacgcagttcttcgtcaagaaaacaattttcagaaacagctgattttctctggaaaacatcaggccccactgggagtcgaacccaggatctcctgtttacgagacaggcgctttaaccaactaagccatagagccacgcggaagcactctttagaggtgaatctatctcattttactttgacaaaatgagtttagttagttatctgctgtcttcaaaaaatatgtcaactcgag

SEQ ID NO: 48348 - DNA, 706 bp, Homo sapiens
taagtctgatttaagtctttccatctttaatttaaatccatttctttttactctgaccccagtgactgtcgttgagtgtgtatttgcccgacttgccgtgccagattggtaggcagtggtttggaatcttcattttaaaatcctgtttttctctctccaatacccttcactgcttggtaagtttttatacttctcaatgagacccagagtctcgtgacctaccatttgcctccttcatgatgaaacaactcacaagttggtagatagcctccagttggcagaatcctatgtataatgtgtctttaaaacttgaagagtttgaaggtattatagccctggagcagtaagttttatggctataccttggtaataagacatttgaataacttggcttagcggctttggtaattaactgtgatttttggaatccacctcccctgctgtcagcttgaatcttcattttagtaacacactattactaacactaaacgcttattacatgtgtgtttcaagacaagcgtgagggagttgctcaccctggggtccaaatgaagcagtcagtggcaacccatgtgtagtggggaatggccagaatctgccggggccacttggtgggctgccttgctcttgattttcagcaggaagctggtggaagctggggttgggcatctgtctctgctcaacttctcagtcagaaaggaaggag

SEQ ID NO: 48349 - DNA, 454 bp, Homo sapiens
gaaatgaagttgtgtttgaggtgagatgagactggacagctggcgttggcaccagaccttgtcttaggtttcatctcctccgacgttgaccaaagcctttgactgcacttgatgcccagttctcgctccatccctctccatgaaatggcattgggaagtccagcattcagatattgtgttaaatctccctttagagactggcctggctgccagtcccggcctgctgcttattggctctgaggcacagtatattgttggcagccccaaccccctaccactcactctgataccgctgtccatgatcactaaagcacacactaactggaagtgtcttgttgcacagtttatggccggaatgtcttaatttttcatgactgggatttcagtgtgtgtagatctgtgtatgcttgtatttcttttagacatttaatggatattcttggtaagaagtgaa

SEQ ID NO: 48350 - DNA, 613 bp, Homo sapiens
tgaatattattttaaacatcatctaggtcagattagcggcctgtgaccaacttggaaacaaattcctcattcttttctgccctggtgtcagctcctgtaagcctgcagattttatgccaaataaaccgctggagcaaaaggaaaggcagccagcctctcccggaatttgggagagggataccttgttaagaaaacgttctacaacttacgaattagatttaactgtaaaaaatagcacgtcctcttttaccaaacaaacgtactagttagggaaatcatcttgcttcagatttaagatagttctttttttagtgcttgtaatatcctgctatataatcttcataagaaacgtgaagggttaggaaaggtttagccgtgctgtccagtattgggatttaaattttaaatattaacttaattcctcagtggcaccagccacatttcaggtgtgccataaccatgtatggctagtggctgctatgtggcaaagtacatatgtagaacgtttctatcatcgaagacagttcttttggacagagccggccgagaggattacaatacttggggcagaaaagtgtccttaatcacataaaataatgaaaaccctagccag

SEQ ID NO: 48351 - DNA, 371 bp, Homo sapiens
gaagtataactagcaggaatgtgtacatatgcccaccaaaagacattcataagaatgtccagagcagcattacttgtaacaatcacaaaccaaaaagataccaaatggccatcaacggcaagataaattgtggtatatttatacaatggagtacaatatggcaatgagaatgagcaaagcactgccatttgcaacactaatgaatgaatcccataaacatactgttgggcaaaagaggccggtgaggccagggatggtggctcatgcctgtaatctcagcactttgggaggctgaggtgggtggatcgcttgagcccagaagtatgagaccagcctgggcaacaaagtaagatcctgtctctacaaaaagt

SEQ ID NO: 48352 - DNA, 275 bp, Homo sapiens
caggatgtctgtcattctgtctggaacctgctgttcttggtcccctgctgtggctcccactggcagtagagggagcgcattgccagatatgaaggaaactcatacttgagtatgagtatggtatgaagagaggagctgtcgcaaggatactccccctgcatattccagaagcccatcactggattccctagatccatttcagtaccccacatcccaaaaaggaggactagaactaagtatgtgtaaatatgtccacatctgtaatgagccaaatt

SEQ ID NO: 48353 - DNA, 437 bp, Homo sapiens
taaaattaagaggcctgagttttaggctgtcttagtggtgggacctcagacccatagtttgcgtgttttctggatatgttctctcatagataaaatgagaggcttggagtagatgggcctgagccctaggggtttgtccaggtgtaacatcttattatagtattgccaggactcttagaatcatggagggtgaggagagagaacatttgcagttgagaattacaggggaatttctttttctctttttctacacttttctccactagcatcttgtttgtgactagaattaaatggggggacatggaggtttgttctctgcctccttgagtaggatgacagaggtgctttcttcgaaagtctgtgtgtcaaagttttatttcagcactagcctcttgtgaattgccagtcacctgtctgttcctggtaggtaggggcag

SEQ ID NO: 48354 - DNA, 249 bp, Homo sapiens
ccaaagtagaattgggcttatcagaagtaaattactcactttctagaaacaagcatagtgtattagaataagacccacacaaggcgagacaccagcactaccactagagcaaactacaaaatccctaagccctggatggcacaaggatcacggttaccactgacccctctctgcctacccttgaaaaacaacaggctaggcatagtggctcacttctgtaatcccagcactttgggaagccaaaatggt

SEQ ID NO: 48355 - DNA, 466 bp, Homo sapiens
aaaaagacacacacatacatatcccatatgaaagttgtggacatcatgatacttcaattctaaatatttatacgctagtatttctttctttttttgagacagagtctcactctgtcacccacgctggagtgcagtggtatgatcttggctcactgaaacctccacctcctgggttcaagcgattctcatgcctcagcctcctgagtagctggaatgaatgcctcttactaaggacattctcctacatagccccagtaccatcaccacacctcagaaaattaaaaataattttatactatccaatatccagaccttactccaattttcccagttgtcccaagatagttgttgatagcgtttttcagactgggatccactcaagatcctcctgttgccctgtttgctgagcttctgccatgtctccccagtgtctgaggttgtgagcatcttggttacttgctgccaa

SEQ ID NO: 48356 - DNA, 509 bp, Homo sapiens
aatacagtggcatgataacagctcactgcagcctggacttccctccaggctcaggtgatcctcctgcctcagccttctgggtggctgggactataggcctgtaccatcatgctaatttttttctatttttagtaaagaaggtgtttcgctatgttacccaggctgttgaactcctgggctcaagtgatctgcatgcctcagctccccagagtcctgggattacacatgtgagccaacaccatgctcagctttaactgttatttttgaagaccagattaaaataaattttattagaaaactctcaagatttaaataaaataattttttttttggagacagtcttgctctgtcgctcaggctggagcatggtggcgcatgcctgtaatcccagctactctggaggctgaggcaggagaatcacttgaacccaggaggtggagttgaggtgagccgagatcgtgccattgcactccagcctgggtgacagagtgcaactcagtctcaaaaaa

SEQ ID NO: 48357 - DNA, 427 bp, Homo sapiens
gttacattgcttgagtatttcaaaactgggataaatccaaatttataaatgttttataagtctggtacattcttaaattaaaaatttttttacaaaaaactggtcaatggaaattaggggaacaggccatgcctgcattctattaaagaataattcctatgtaaaactgcaaacagatggtattatatagtcttagaaaaatggtagggttgatatggtttggctgtgtacccacccaaacttcatcttaaagtgcggctcccataatccctatgtgtcatgggaggaactcagtgggaggcagtggaatcatgggagtgagtttttcccatgctagtctcatgatagtgaataagtctcatgagatctgatggttttataaaggggagttctgctgcacaagctctcttgcctgctgccatgtaag

SEQ ID NO: 48358 - DNA, 544 bp, Homo sapiens
aaacgggtccctggtgccaaaaaggttgggaaccactgctctaaggtgtccagtgttggctgacccctctccctacttatgcacccattggcttgcctaacagctgattgatttctgtttaaatagacacagtatattggggcagtttattgcatctttggtcatctcttttcctctgggtccctaggacggaagacaatatcctaagttgattctgtctaacaaaacatgagtaaaatgaggaattggttaggtaggtggcaaacagcaaagattatatggacttgtagcttgctccataagtagactttaaccaagtaagctatttgaaaaacaatcttaatttttttcaagtgttatttttaattctataggaatattttcataaaaataatgatgtccattatgttagcaactagaattacaatggcaagttttaggagatgcttgaaatgtgagatgttacatttaaaactataaagttatcgacctaagtatatgattgtacccatgtggcagtaaacttaaaacttccagtttcagg

SEQ ID NO: 48359 - DNA, 171 bp, Homo sapiens
attgttaacaaattctatgtatttcagtaatctacactaatacagaagtcagtgtaaaattcagaaaatttcattcaaaacttcatgacactaatatgattcattcaaaataccatacagatgtttacatacttatttatcttattcaacatatttataactagcatatcc

SEQ ID NO: 48360 - DNA, 205 bp, Homo sapiens
atatttttcttatttttccaaacagtgctggcatatttttggatatattacacaaaatgtatgacaaaattctaaatatttaaaagaccttggcttcctgaccagtgtaaatttgtattttttatctccattttaaactgaattataaatttctgtgtaaagttctgtaattattttttcaaaaatatttgcaatgtttttgtca

SEQ ID NO: 48361 - DNA, 431 bp, Homo sapiens
cgcgcgccaccatgcctagctaatttttgtattattagtagagatggggtttcaccatattggccaggctgctctcaaactcctgacctcgtgatcctcctgccttggcttcccaaagtgctgggattataggtgtgagccaccgcccctggctgttagtggtattttaaaaaattatgtctaggcatctataataaggctgtatgtattggattgctgtgaagagtcaatgaattaataaatgcaaagtacctcaaactgttatcacataatacaggtttagtaaaagttttccactattatcagtgatatactcattatcataagtatcttcattaggatttatggaaaggattttaaccatgttgtttacctttggcaaatttgtaattcatggtggaaaaagagaaacacttgtaatgagtataacg

SEQ ID NO: 48362 - DNA, 692 bp, Homo sapiens
  misc_feature (1)..(1): n is a, c, g, or t
nttttttgagatggagtctcacctccgccgcccaggtggagtccagtggtgcaatcttgtctcgctgtaacctctgcctcccgggttcaagtgattctcctgccgcagcctcctgagtggctggaattagaggtctgagccattgtacccagctacatttatatgacaattgtttattctgcaatgagatcaactgaaagtgagaaccactttctgtatttccttttacatgaggatgcctgaaaaaacccttaatagaaaaactgagcctctaaaactatggctgtggcatcacattagatgctgtgagatggctggaaacacaggtaagaaaatagcgtaatttcctataaatctgcactcagaaaaaagatggctggacatggttcttctgacagcccaccgcgcatgtttttattttgtcaacgtaagcagatggcccctgggcccttcctctgagagtgaaggatggccgtgctgaggacccttctatccctcatccttcaacacccctgccacatcaccccacagggagcctgtgcctatggggtggggacctttccagaggcgtctgcgtgctagaatttcaagtcaggggcctgtgagggacattggcgcccttaaagattgtccctgagagctgacctctctgcctcatctaccactgatctaaatacctgcagggacctgtt

SEQ ID NO: 48363 - DNA, 365 bp, Homo sapiens
ttattttatttttgcttagctttgcttcaggggactgaaggtgagggatcagttcttcatagtggaacaccttacatctttctctgccatctttgacgtttatgaggcatatttttctactttgtttggtagctgttgctgaatttgtttcattggtgctttgctcactttacttacttttttagctattgaagaagaatgactgtatcatgctgctgatttccccgtcttggctagacagtatgtcatcctttatctacattggtccctgtagtgaggatcatggagtagatgttgctgggagagtgagtatatgtgaaaaaaatgtgaaggtatttggtgctgatgaagcaatatgccctact

SEQ ID NO: 48364 - DNA, 349 bp, Homo sapiens
aaatttgtgtgtgccaaatgtcgtcctattattagactcaggttcgtggaacaccttacatctttctctgccatctttgacgtttatgaggcatatttttctactttgtttggtagctgttgctgaatttgtttcattggtgctttgctcactttacttacttttttagctattgaagaagaatgactgtatcatgctgctgatttccccgtcttggctagacagtatgtcatcctttatctacattggtccctgtagtgaggatcatggagtagatgttgctgggagagtgagtatatgtgaaaaaaatgtgaaggtatttggtgctgatgaagcaatatgccctact

SEQ ID NO: 48365 - DNA, 381 bp, Homo sapiens
ggcaacaaaaacaaactttaaggcaaaagtgtggtgggagtgaggaaaggcatatggttgattaaaacaactttcctttttttccaccaaaacatttaattggctttagagtcaaggaaggttcatagtcaaagatgccagtaagttcctttgtatcccacttttcatctctgctttgctcctattttgtgtcaaggtttatgtaagtgctaaagggtttagaccaatgatcctcaatttgaggtgattttgtacccccaccccaggagacttctggcaatttctggagacatttttggttgtcacaatttaggggtggggtgctactggcatctagtaggtagaagccagggatgctgctaagcaccttgcaaggcacag

SEQ ID NO: 48366 - DNA, 223 bp, Homo sapiens
tttttagtaagttatatgattcatttgtgtatcatatatggaattaacatatgccagaatgaaaaaaaaaagagagattatctgtgcttggaaagaacaagagagagggaattacaaggaataaataagggttcatgcctaaaataccgttgtcctcccttccactcagatttaccttttgcattgtcaagggacagagacataaatctctttgactagataa

SEQ ID NO: 48367 - DNA, 626 bp, Homo sapiens
agactagtctgagcaacatgatgaaaccctgtttatacaaaaaaatacgaaaattagctgggcatggtggcgtgcatctgtagtcccagctacttgggaggctgaggtggagaatcacctaagcctggggaggtggaggttgcagtgagctacaattgcaccactgcactccagcctgcgcaacagagtgagacccactctccaaaaaaaaaaaaaaatttttttcaaagtaaaaaaagtaatctaatagaggaaaatgctccagtcagagtggcttggaatctgttttagttcataaaactaggggctgaggtgagaaaaagaggctgaaacaagctgctgccctctgctgcctgggacagcagcttttgtaactctcatacccaggaaccaggccaacatagacatggccacaaaaccaggatctgtgccaaacatacagggccatgactgaattcacaaaaaccctagataaggatggtgagagcagtgagaaagaaggttatagcaaaacaaaacagaacgaaattgcaaaacttcccactctaagatgaacctgcaaataaatttcctcaacttattaaaattaattgtagacaggacaaattccccaacaccaacaccaa

SEQ ID NO: 48368 - DNA, 448 bp, Homo sapiens
tcatgccttctgccagccttcttggtaccatgggagaggtatagctcctcctaactaaggctactctttcccctgtgttttatttatttattttatttttattttattttattttactgagacagggtcttgctttgtctcccaggctggagtgcagtgatgtgatctcggctcactgcaacctccgcctcccgggttcaagtgattctcgtgcttcagcctcccgagtagctgggattacaggcacacagcaccatgcccagctaatttttgtggttttagtagagatagggtttcaccacgttggccaggctggtgtcaaactcctgacctcaagtgatctgcccacctcagcctcccaaagtgctgggattacaggtgtgagccacctcacccagcctcccctgtgttttagatcccaccctcataccctttattctccttgaaa

SEQ ID NO: 48369 - DNA, 429 bp, Homo sapiens
gccaaggactaaattgcggattaagagtttcttccttttatttcctgcatatccagaaacctggggtcatagatactcttccatggtgtgttgtttggcacaacttgcaagtattttggcagatggttagaaaaaaagactttaagaaatatgcaatagtactcaggactctaaatataataaataaagctaagataccagtatcctgccattcattacaatcaacatttattgaacagcagttatatgccaggtagcagggatacctagaacttgcccctcccactagcactccagaagagttcctgctttcccagcctaaagcaacagcaagtcttacatgagctaggcttactgtgatagctgtcctgacggcgagtggcaaacatggcccagtgccttcctcatggatgaacatgactctacact

SEQ ID NO: 48370 - DNA, 389 bp, Homo sapiens
aattttgccccttagcccatagaacctaaaatatttaccctctggccatttacagaaaaagtttactgattcttattcagaaagtaaaatctaagtaagaagttagtggaagagaaggaagattttcagcttgggcacaggagaaagaaccaatggggtatgtaaaaaataagcaatcattccataccaaatcatatttttaaaccatattttggccaggcacagtagctcacatctgtaatcccaacactgggattacaggcatgagccaccgcgcccggcccacactcagctaatttttgtatccctctatccatccatcagtctattatggggtttttttttgtttgtttgtttgctttttttttgacacagggtctggctctgtc

SEQ ID NO: 48371 - DNA, 354 bp, Homo sapiens
actatgaggattctcacatggtgattttgtaattctatcattcctccttcatttgttactattgtactgtaaggaaaagctttctcatcttcatctgttcattcatgtatttattcagatgagtgttattttattggttttaatctgtcacaaacattgatttgatgctcaaattatatccctcagattggctcttcaggctgacttcagtgtcctttctaaaacctttttatttttaaatgattttaaatttatataaaagctgcaaaagtacacaagtgcttatatacccttgcatacccagattcttagaacttttgagaataagttgtagacatgtgccatattatactt

SEQ ID NO: 48372 - DNA, 354 bp, Homo sapiens
tcccataggggtttatatttccctagtgactttgaggcttatcaactctgcatagacaactgctttactttgtggcacgatgccttagttccctttgtgattcagctggagctgctaatgctacccctttatcatgttgctgggccagatgggcctagctccagatgtcagctccaggatattgctgttttctggctgacagtttctacatagccacttctgttcattatgaattggagctgggcgtggtgacacgtgcttgttgtcccagctactcagaaggctaaggcaggaggactatttgagcccaggagtttcagtcctgcctgggcacacagcaagaccccatctctt

SEQ ID NO: 48373 - DNA, 499 bp, Homo sapiens
cttatgcaggcaaaaacaaagccaaagttagaaagtgcctatgtgtaggattctctggagggtccaccagtggatggtctttaggattgaagaatcctttaaggctgctgtgaaaagggtcctcagaggttacccaagccagtttcccttttggccgaatggggagagagacacacagagaggggaggggtgtgtgctggatgacacagctcctcagcggcaggaactaggatttaatccctggcatctgacttccaggccttgccccctgcaccgctgagagaatgtgtctcataaacaccatcacctctcaccccacacggacccaccacccacacacagccttcagccttcatgcatagcaatttgggctccctttcaagtcaggggatgaggggttgtttctgacacatccctttgcttttgtaccacaccaggcaggaggaaccagacccctgttcctcatccccaactgcccccccaacacccctccagtttg

SEQ ID NO: 48374 - DNA, 575 bp, Homo sapiens
aaataaatgtggcaggaggtggggcgttgggaatggggaggcacggtggttgtgggcaaagagtcagaaggagcagacagacccggaagaaaaggaatctgctctggaataacacttttttttttgaggcctcaggccttgggcaaaattgcttcgctctgtaatgatttctgctgccggagttgctcctccacccctaagttaaagctatgaacctgggtgcccgggcaacgccccacagtggatagcagccgggagcgctggttttgtgccttttgtgggggcccttggttccccctcattggaggctgactctgaaatttactggatcagtaaatttcctggctccctgggagcagctgttaacgaggataaagtctctgggcatgtttctggccctgcaaaaggacctcacccatgaaggtacaattctcactttgtttagataccagaggggcacccacaggctggctgagaatgaggcatagttgattaaaaaaaaaatcagtcattacaaaattgtttttaaactcacacgtgcttttaaagtgttgtggtttaaattactttaagat

SEQ ID NO: 48375 - DNA, 572 bp, Homo sapiens
tcacaagcctcatggtcagcaagcacaattgccatacttcttttaggggagagatgagatgcaaaattctgatttcaaaactctgtatttgcaaagtctgaatgatacctattgatatttgtcaagaaattaatttctaaaatgctgagaattatagttgaaatattcctttttgggatgtcagaacctaggttgtagttatttttaaaactgctgttgttgttattttattttcccccagaatttaggggccatttggataattcaaaactgcctttcctattgtattcacagaaaacagatcctctagtccctcccctacttctactcaggataattgtcgaacagtgctgggcagtgaaaaataatgagccagggacaccccatcttctaccaatccaaggttaaattagaaaagatcagccctagtcttaacaaaatatccctttcgaatgagaaatcattgctatctaccttatgcccttagctggacctgaatattctccctattgctcactactccaaaagccacaaatacttaataaacagtaactgtcagcaagcaatgtcat

SEQ ID NO: 48376 - DNA, 508 bp, Homo sapiens
acaaagaattaagatgtgctataaatggaaaaaacaagattaaggacttagcaacataaaatgtaaaatacctcaattttttttattataaattgaaataataggttttggaaacaccaggtaaattaaaatatatttaagtttaattttactgttgctttgtacttttttctttttaaagagacagggtctctccctcgtcacccaggctggagtgcaatggtgcaagcatagctcacggcagccttggaactcctggcctcaagcagtccacctgccttgccctcccaaaatgctgggattataggcgtaagccacccactccaggcctctttttacttttttaaaaatgtggctcctagaaaaatttaaattacataagtggcttacatttctattggcagtgctgttccagacaacgctcttaacattaaaggcataaatgcaaaaattatgggccaaatctcaggcctcctggagtttgtattttgctgggcacagaagaatc

SEQ ID NO: 48377 - DNA, 467 bp, Homo sapiens
acgaggagactgaaggtcatgaattctacgaaacttgttaaaggttgcacatctagtgaatggtgggatggagaacaagactgaggtctaagaccaaagatattttctcctctctagtcctctaatccgtcctcagaaatagtctttctatcctggcttctacgcccttcccaggctcatttaaccaacctcccctttgccctctccctcattctctgcataacttccatggcttacccgcaaagccagatgagaccagccccaagatttatgttaaacatttatgttatttgtatcaaaaattaattatggatctattaattcataacttcataaaattataactcatggcaaacatttgaataggattactaatgtcatgatattttgtatttaaatatcttgctttataaagtatgatgactaggtcatgctttcagaacagacttaaggtaattctaatactt

SEQ ID NO: 48378 - DNA, 288 bp, Homo sapiens
tgttgcctctgcctcccagggtcaagcaattctcctgcctcagcctcccaagtagctgggattataggcatgcaccaccacatctggctaatttttgtatttttagtagagacaggctttcaccatgttggccaggctagtctcgaactcctgacctcagatgatccgcctgactcaacctcccaaagtactgggattccaggcatgagccaccacacccagacttcattttaggtagtttctattatgaacttctagtccgttgctcttttcttcttgtgatgtctg

SEQ ID NO: 48379 - DNA, 3129 bp, Homo sapiens
  misc_feature (1236)..(1236): n is a, c, g, or t
actaaaaatcatgaattcacactgatgctttgagaccagccctgtaggtttattccagtctgcccccttttccatgttgttaactctttcctccagagagacaaagatttcaggttgctttgttaagttccatctaatgatcattctgacgtaagtctgtttttcttatttccttggaatgatgtctcctctggtttcagaacttcctcctctgcttcctgtatcctgaggctggcggggccagttgtctttagggcttgtgcatttttgtaaagagcttgcacgtgtggaaatcaagtaggccagtagtgggttaggggtactgagccagaagcctctacaaggaataacaggagcacaaaggaagaaggtggtattccagctggggacccaggagggaggactttgtggagaacctgatgcttgaactgagtctaaaaggtgtaaaagtgtttgttgcttctgcctccctgtctgtctggcagggtgaggtaggcgcatctagggaaatgtcaagtggcttggtgtagggtaaagtcagtgaggcccatggagaaaaacgagcaggagccacatcacatgggtgtctgataggacctgggaggcgctttccacattaccattgtcgcttcgtgatctggacacaccagaaggcgtgagactggaggcaggaagagcagccaggcttatccctaccctcaggagagctgaaaagggcaggtatggtggggccagagctcaggagagtttcggaaccactgagatcggtccttgatttgatgagaggcttgaggggagagggaggtagctaggatgccccgcaagcttctggcccagacactgggcagacaatgaaaccctttgtaacacatgaggcaataggtttggggcagatgggaggggaagcagtggtgggggcagtgagtgctgaaggtgttttaagaagcggctctgggccaggcacagtggcttatgcctgtattcctagcattttgggaggccgaggtgggagaatcacttgagcccaagaatttgagaccagcctggggaatatagtgagaccctgtccctacaaaaataaaaacaactagctgggtgtgtggtggtgcatgcctgtaggcccagctacgcgggaacatcacctgagcccaggaggttgaggttgcagtgagctacagttgcgccactgcactccagcctaggtgacagagcaagatcttgtctcaaaaaaaaaancagctctggatgggaagggaggccagttgctttaagtaggggagatagagttaaaggaggctttgttttatttaaaggtgggacaaacttaagcatgttaataaaattcagagaagagaaagagaatgactatcagagccatgtttggaagaaaatggggtccagagcacaggaaggggacctgtgttcagagggtgcctcactgctgaggccacaggaaagaatctgtaggtggaggggaggccgaagaggggaagtttcatgcttgataattaaaattttctgagataggaatgtcatatttacctatttaagccaagtttttttagataaaaggtatggaacctgctttccccttggctagttcagcgtttgggctccggagtgctgaagatgaggactggacttcgagctggtgtgatcccagtattcagtgtcagtactcagtgacaaaataaatgagagaaacgggaataagaattgtcgcctacacaaaaataccagcaactgttaactcttcccagaagattttcattctgaatgctcctgtagctaggaaccctaaaaagtctttgaagcaactcaagttttaaaaaaggggaggaactcctggaaatctcaggatggggccaagatgtggctggagagtgtgtggtgatggagggcgtgtcttttgccgagcacactcagggcccacgggaagcccatagacttcaaggacatcaagccccaaggtggtgggattttccccaccagtacttggcagcctagggggaaggggagggcgggagaagataatggggatccctggctccaaacataggaggacacatctgtgctacagtgcgcacatgcctggatgtacactctgtctttggagacactggctaagattctctgctccatgtttggacagggtcgtgcctgatctgagataaatggacaagaacaactgaagcctgtcttctggtgcatgtgtcacctgccgataactgcatcttgtgataaagttgggtgatttacagtctccaccaaatgctaaactctggggtcttacgcctttataactccatgggccccagcaaaggttcaggctcaaaacaggtgtcaaatagataactgttgaatgattgttccccagttgcaggctctgccacctggcgttcatactgtctgtgaaaggacccagctcacctttccctctttatctcccagtccttcccaacagcgccgacacctcatggaaactgattgcaaatgtgctacttctcacttctgtgtggcccgaggaggctgggttaatgctgggcttggtaccttaagcaccctttctcccttccccatcttcattctcagaattacacctgtctgaagcaggcattttccaatgccctagatgggaatataagtgtaaggagatgtgaagcatttgcctgtgtgtcagaacattcactgaggatcctcataggcacttctagaaaccaaatccttgaagatgactaaccagaaatgcccgtcatagcactgtttacagttgcaaaaactgaagccaattgaaatgtccatcaggaggggattaaatgaattatggtacagttacaccgttgaatattttacagccattgaagatgatatatagctatattcattgacaaggaaaactcatattttttagtgaaaaaagcaggttatagaattgcatgatattcacatttatataaaactttatatatgggaaggatgttgattgaattgttaataactatggtcacctctagagatggaagtttgcattacctttaatttttaataccattttgtattgcttaaaatttgtatgtattatcgttaaaataagaaaaatcaaataaagctattttcattatgggaaaa

SEQ ID NO: 48380 - DNA, 3644 bp, Homo sapiens
  misc_feature (1236)..(1236): n is a, c, g, or t
actaaaaatcatgaattcacactgatgctttgagaccagccctgtaggtttattccagtctgcccccttttccatgttgttaactctttcctccagagagacaaagatttcaggttgctttgttaagttccatctaatgatcattctgacgtaagtctgtttttcttatttccttggaatgatgtctcctctggtttcagaacttcctcctctgcttcctgtatcctgaggctggcggggccagttgtctttagggcttgtgcatttttgtaaagagcttgcacgtgtggaaatcaagtaggccagtagtgggttaggggtactgagccagaagcctctacaaggaataacaggagcacaaaggaagaaggtggtattccagctggggacccaggagggaggactttgtggagaacctgatgcttgaactgagtctaaaaggtgtaaaagtgtttgttgcttctgcctccctgtctgtctggcagggtgaggtaggcgcatctagggaaatgtcaagtggcttggtgtagggtaaagtcagtgaggcccatggagaaaaacgagcaggagccacatcacatgggtgtctgataggacctgggaggcgctttccacattaccattgtcgcttcgtgatctggacacaccagaaggcgtgagactggaggcaggaagagcagccaggcttatccctaccctcaggagagctgaaaagggcaggtatggtggggccagagctcaggagagtttcggaaccactgagatcggtccttgatttgatgagaggcttgaggggagagggaggtagctaggatgccccgcaagcttctggcccagacactgggcagacaatgaaaccctttgtaacacatgaggcaataggtttggggcagatgggaggggaagcagtggtgggggcagtgagtgctgaaggtgttttaagaagcggctctgggccaggcacagtggcttatgcctgtattcctagcattttgggaggccgaggtgggagaatcacttgagcccaagaatttgagaccagcctggggaatatagtgagaccctgtccctacaaaaataaaaacaactagctgggtgtgtggtggtgcatgcctgtaggcccagctacgcgggaacatcacctgagcccaggaggttgaggttgcagtgagctacagttgcgccactgcactccagcctaggtgacagagcaagatcttgtctcaaaaaaaaaancagctctggatgggaagggaggccagttgctttaagtaggggagatagagttaaaggaggctttgttttatttaaaggtgggacaaacttaagcatgttaataaaattcagagaagagaaagagaatgactatcagagccatgtttggaagaaaatggggtccagagcacaggaaggggacctgtgttcagagggtgcctcactgctgaggccacaggaaagaatctgtaggtggaggggaggccgaagaggggaagtttcatgcttgataattaaaattttctgagataggaatgtcatatttacctatttaagccaagtttttttagataaaaggtatggaacctgctttccccttggctagttcagcgtttgggctccggagtgctgaagatgaggactggacttcgagctggtgtgatcccagtattcagtgtcagtactcagtgacaaaataaatgagagaaacgggaataagaattgtcgcctacacaaaaataccagcaactgttaactcttcccagaagattttcattctgaatgctcctgtagctaggaaccctaaaaagtctttgaagcaactcaagttttaaaaaaggggaggaactcctggaaatctcaggatggggccaagatgtggctggagagtgtgtggtgatggagggcgtgtcttttgccgagcacactcagggcccacgggaagcccatagacttcaaggacatcaagccccaaggtggtgggattttccccaccagtacttggcagcctagggggaaggggagggcgggagaagataatggggatccctggctccaaacataggaggacacatctgtgctacagtgcgcacatgcctggatgtacactctgtctttggagacactggctaagattctctgctccatgtttggacagggtcgtgcctgatctgagataaatggacaagaacaactgaagcctgtcttctggtgcatgtgtcacctgccgataactgcatcttgtgataaagttgggtgatttacagtctccaccaaatgctaaactctggggtcttacgcctttataactccatgggccccagcaaaggttcaggctcaaaacaggtgtcaaatagataactgttgaatgattgttccccagttgcaggctctgccacctggcgttcatactgtctgtgaaaggacccagctcacctttccctctttatctcccagtccttcccaacagcgccgacacctcatggaaactgattgcaaatgtgctacttctcacttctgtgtggcccgaggaggctgggttaatgctgggcttggtaccttaagcaccctttctcccttccccatcttcattctcagaattacacctgtctgaagcaggcattttccaatgccctagatgggaatataagtgtaaggagatgtgaagcatttgcctgtgtgtcagaacattcactgaggatcctcataggcacttctagaaaccaaatccttgaagatgactaaccagaaatgcccgtcatagcactgtttacagttgcaaaaactgaagccaattgaaatgtccatcaggaggggattaaatgaattatggtacagttacaccgttgaatattttacagccattgaagatgatatatagctatattcattgacaaggaaaactcatattttttagtgaaaaaagcaggttatagaattgcatgatattcacatttatataaaactttatatatgggaaggatgttgattgaattgttaataactatggtcacctctagagatggaagtttgcattacctttaatttttaataccattttgtattgcttaaaatttgtatgtattatcgttaaaataagaaaaatcaaataaagctattttcattatgggaaaaaaaaaaaaaaaaaaaaaaaaaaaaaaaaaaaaaaaaaaaaaaaaaaaaaaagggggccggcccccacacaaaagactccccaccgaggaggcgcccaccaaccaacccagctacccacgtcatcgtgacacaaagaggcgcccccaacaaggcagcgcgcaacctaaagagacagaacaggcaccgactacatcacacacacccctgaccactagaggccaaacagcagcaccgaccacaaccaagcaagagaagacccacaccactcgcggggggccgccccacctcgcggccgacacccaccccgcccccaccgagaaccctaaccacgcagcccggcgaacaccaacaaccccaaacgcgcgcctctccggtccccaccccccccgcaccacaccaccgcccccccacaccccccgcccccccagagcgcccgatctcacaacacacacacacccgccgcagcagaacaaaataaccacaccccacccacacagcacgccacacgaccaccg

SEQ ID NO: 48381 - DNA, 1148 bp, Homo sapiens
ttcttgaagtccttggatttctctttctcaaaccgtatcacttcttttcggaccactgttgaaatcctctcgaagtccctttcatattgagacactcctttactcacagcagcaggctggggagcagttgggaatcaggtctggaatactcctaaccaagaagttgcccagggtcgtgcctgatctgagataaatggacaagaacaactgaagcctgtcttctggtgcatgtgtcacctgccgataactgcatcttgtgataaagttgggtgatttacagtctccaccaaatgctaaactctggggtcttacgcctttataactccatgggccccagcaaaggttcaggctcaaaacaggtgtcaaatagataactgttgaatgattgttccccagttgcaggctctgccacctggcgttcatactgtctgtgaaaggacccagctcacctttccctctttatctcccagtccttcccaacagcgccgacacctcatggaaactgattgcaaatgtgctacttctcacttctgtgtggcccgaggaggctgggttaatgctgggcttggtaccttaagcaccctttctcccttccccatcttcattctcagaattacacctgtctgaagcaggcattttccaatgccctagatgggaatataagtgtaaggagatgtgaagcatttgcctgtgtgtcagaacattcactgaggatcctcataggcacttctagaaaccaaatccttgaagatgactaaccagaaatgcccgtcatagcactgtttacagttgcaaaaactgaagccaattgaaatgtccatcaggaggggattaaatgaattatggtacagttacaccgttgaatattttacagccattgaagatgatatatagctatattcattgacaaggaaaactcatattttttagtgaaaaaagcaggttatagaattgcatgatattcacatttatataaaactttatatatgggaaggatgttgattgaattgttaataactatggtcacctctagagatggaagtttgcattacctttaatttttaataccattttgtattgcttaaaatttgtatgtattatcgttaaaataagaaaaatcaaataaagctattttcattatgggaaaa

SEQ ID NO: 48382 - DNA, 2864 bp, Homo sapiens
  misc_feature (1236)..(1236): n is a, c, g, or t
actaaaaatcatgaattcacactgatgctttgagaccagccctgtaggtttattccagtctgcccccttttccatgttgttaactctttcctccagagagacaaagatttcaggttgctttgttaagttccatctaatgatcattctgacgtaagtctgtttttcttatttccttggaatgatgtctcctctggtttcagaacttcctcctctgcttcctgtatcctgaggctggcggggccagttgtctttagggcttgtgcatttttgtaaagagcttgcacgtgtggaaatcaagtaggccagtagtgggttaggggtactgagccagaagcctctacaaggaataacaggagcacaaaggaagaaggtggtattccagctggggacccaggagggaggactttgtggagaacctgatgcttgaactgagtctaaaaggtgtaaaagtgtttgttgcttctgcctccctgtctgtctggcagggtgaggtaggcgcatctagggaaatgtcaagtggcttggtgtagggtaaagtcagtgaggcccatggagaaaaacgagcaggagccacatcacatgggtgtctgataggacctgggaggcgctttccacattaccattgtcgcttcgtgatctggacacaccagaaggcgtgagactggaggcaggaagagcagccaggcttatccctaccctcaggagagctgaaaagggcaggtatggtggggccagagctcaggagagtttcggaaccactgagatcggtccttgatttgatgagaggcttgaggggagagggaggtagctaggatgccccgcaagcttctggcccagacactgggcagacaatgaaaccctttgtaacacatgaggcaataggtttggggcagatgggaggggaagcagtggtgggggcagtgagtgctgaaggtgttttaagaagcggctctgggccaggcacagtggcttatgcctgtattcctagcattttgggaggccgaggtgggagaatcacttgagcccaagaatttgagaccagcctggggaatatagtgagaccctgtccctacaaaaataaaaacaactagctgggtgtgtggtggtgcatgcctgtaggcccagctacgcgggaacatcacctgagcccaggaggttgaggttgcagtgagctacagttgcgccactgcactccagcctaggtgacagagcaagatcttgtctcaaaaaaaaaancagctctggatgggaagggaggccagttgctttaagtaggggagatagagttaaaggaggctttgttttatttaaaggtgggacaaacttaagcatgttaataaaattcagagaagagaaagagaatgactatcagagccatgtttggaagaaaatggggtccagagcacaggaaggggacctgtgttcagagggtgcctcactgctgaggccacaggaaagaatctgtaggtggaggggaggccgaagaggggaagtttcatgcttgataattaaaattttctgagataggaatgtcatatttacctatttaagccaagtttttttagataaaaggtatggaacctgctttccccttggctagttcagcgtttgggctccggagtgctgaagatgaggactggacttcgagctggtgtgatcccagtattcagtgtcagtactcagtgacaaaataaatgagagaaacgggaataagaattgtcgcctacacaaaaataccagcaactgttaactcttcccagaagattttcattctgaatgctcctgtagctaggaaccctaaaaagtctttgaagcaactcaagttttaaaaaaggggaggaactcctggaaatctcaggatggggccaagatgtggctggagagtgtgtggtgatggagggcgtgtcttttgccgagcacactcagggcccacgggaagcccatagacttcaaggacatcaagccccaaggtggtgggattttccccaccagtacttggcagcctagggggaaggggagggcgggagaagataatggggatccctggctccaaacataggaggacacatctgtgctacagtgcgcacatgcctggatgtacactctgtctttggagacactggctaagattctctgctccatgtttggacagggtcgtgcctgatctgagataaatggacaagaacaactgaagcctgtcttctggtgcatgtgtcacctgccgataactgcatcttgtgataaagttgggtgatttacagtctccaccaaatgctaaactctggggtcttacgcctttataactccatgggccccagcaaaggttcaggctcaaaacaggtgtcaaatagataactgttgaatgattgttccccagttgcaggctctgccacctggcgttcatactgtctgtgaaaggacccagctcacctttccctctttatctcccagtccttcccaacagcgccgacacctcatggaaactgattgcaaatgtgctacttctcacttctgtgtggcccgaggaggctgggttaatgctgggcttggtaccttaagcaccctttctcccttccccatcttcattctcagaattacacctgtctgaagcaggcattttccaatgccctagatgggaatataagtgtaaggagatgtgaagcatttgcctgtgtgtcagaacattcactgaggatcctcataggcactgtttggacttgggcactgtttggactttgggcactgtttggactttgggcactgtttggactttgagcactgtttggactctgggcactgtttggactctgggcactgtttggactttgagcactgtttggactctgagcactgtttggactctg

SEQ ID NO: 48383 - DNA, 666 bp, Homo sapiens
  misc_feature (52)..(52): n is a, c, g, or t
tattttttccagatctctcactgcaccctcccagattattcccctggggagncgacactgcagcaagacccaagatgtgtcggaagagcctgctgggacaaaggcaggcagacaccaactgtattcatgctcatcttatgcctcttccctctgctgctcctatcagaagcataaggcactggcccaaacagaaaaatgcgaccttacacctaggcttgacaattttcaaactgtaagcatgactctgtgaggctcccagcaaccaaagggaccaggacaagggactcccacaggacagatgggcatgcagagctcaggaaggattgtgacttgctacaagtcacctgcagcttccatgccagtgtttttcccacccctgcatgtggccttgtccagtggagaagaacatctccttgtctcttccacttccactactccttcagtacatcatgggaagtcttgtgaaagaaagcaatattgaaactgttttcctggctgggatgagtaagaatctggagtgtgttactgtaaagccatctctcgttcatcttctcatttaattaaaaaaatttaaaacccagtgctcacccaggtccagctatgggctcccaggtagcaggggagagatatgctctgaattagcaatgcagggctggacctgccaac

SEQ ID NO: 48384 - DNA, 744 bp, Homo sapiens
ccgcccaggaggtacttctgaaacaggtccccagtggcacctcagtttatccattcccgttttggtttcgcagctgtcatccggtcccaacgccagaataggagaaaaacctgcaggctaagagagaagggagggctgggcctgaggttcagtcttggtcatctccgactggcggcgctaggatttcccccttcctgtgtcttgatgggttcctccaacactcactttgtatcgataaacgaccctgcagttcttcacgacctgcattgcgctggcagtcctgagtgaagaactctcctctcatcccagagatgggaaacctggatctgagactgccagctagctgcggcctcctagtctgtaaagcgaagggagaccaggacgctcccaaggacccggcttatcgcccctccctttccttcccggggacccagaacagaccacaagacggagggtggccgctggaggtcgccgtggccccgcgataccaccaaccgacagaaatggagaacagttgattcagattcagctgatattctcaggtctggagcgggcctgagcgctttaattagcccggggctaatgtcctcacccatctttgtttatagaacgttgaaactccagtactgttggtaagttccaggaagacaggaactttgcactacttgaactccagggtctagaacagcctgcaatctagcagatgctgtaaattttttaattaaatactgaactcctgtaaaa

SEQ ID NO: 48385 - DNA, 262 bp, Homo sapiens
tatcctttagaacagagaaaccagggaggactcagaaaagtctgaggtctccatctaattctcccatcttatgacccttttactatttccttccttccctacagcaatttgtctgtagggttttaaatgtatattggccggccatagtggctcatgcctataatcccagcactctgggaggctgaggcaggtggatcacttgaggccaggagtttgaaatcagcctgggcaacatgatgaaaccccatctctactaaaaata

SEQ ID NO: 48386 - DNA, 414 bp, Homo sapiens
aacgcctactgtttgcagaccctgtgtgaagcgctgagaaatggaatgaggaaggagtcccagcctcggcactcagggacttcccatgctctcagtgagatagacccaaatcattgcagtgcaggtgccagtacatgggttagaagtggcagaagagggcccagcagacacctgggcctgaatgctacgtgacacctgcgtgacacctgggcctgaatgttgtgctaagggctcctttcttgtaccttctctgtgcagaggaacagtctgtaaagaacacctccccaggcacggtggctcacccctgtattcccagcaatttgggaggctgaggccagaggatcatgtgcagccaggagttcgagaccagcctcagcaacatagcgagatcccatctcttaaaaaaaattacca

SEQ ID NO: 48387 - DNA, 361 bp, Homo sapiens
cctgtcttacaaaaaaaaaaaaaattatccaggcatggtggcacatgcctgtagtaccagctacttgggaggctgaagtgggaggatcgtttgaacctggaaggttgaggctgcagtgagctaaaaatcacaccagagcactctagcttgggtagcagagtgagacccagtctcaataaaaataagataaaacaaaataaaataaaataaatcattggctttttgggaggattaatattgattacacctgggtaaagtatagcacatagtaaatgcttaaaacatggcagattagagaatacagggtggataagagaagtgcttaggaggtagaattgatttgattgatttagaattgatt

SEQ ID NO: 48388 - DNA, 405 bp, Homo sapiens
catctcacccagcctcttccttgtactaaacatagacaatagtatttcacaccagggcctgccctctaccttgacgtctctgtgaggaggcaggggaggaatgctcagagcaccttctacctgccatcctccaccctttcagtcaggaccctgaatggacagagagaggggcatcaaggccttgtcccctgtgagcccaagaaggcaggtaggttaatccaacatccccctccaggtgactttcctcctgtccctgacaagaggactgttaacgttgacccaagagccagagccctgccctgtggcctcgtgtgctcagcctctgcaggggctcttaccatgttctggaagcatcctgatgggggtcggggggctaggacctgcaaagagcacacgaggtcgacg

SEQ ID NO: 48389 - DNA, 221 bp, Homo sapiens
ccagctctttcccgctccctttcaaatactgtttttggatccctccactctattgccatttttactggtaccccattgtctaataagcagctatctttagcttcttaagtctctgtagccttgagtctttaagagctaccatttactactaaaggtcttttccaaataaggcaaaataacaaagtgtccaatctccaatgatagaaatcatgaaataatta

SEQ ID NO: 48390 - DNA, 398 bp, Homo sapiens
tgcatcttgtcactgcttgtctgacacgtggagagaaccttgctatccctctcaatgcaggaaagacgttcagcttcttctaagaagccctgagggagtgaagaagagtccaggcctgtggtcaaatggccaactttcactttcactaactttcacttgagcaagtgacgaaaacttttggaaactcagtggtcatccgtaaatgtgaataatcataataatgtcatctcatagatgtttgagaaaactggacaatatgttgtataccaaaatctattaataaatcatgtgggttttagaaatatgggttaatattatccctttcagggtctttttctcctgcccaggtagagttgatggtaccctcatatctgttattgctgggccctgaacatcgc

SEQ ID NO: 48391 - DNA, 706 bp, Homo sapiens
gacagaagagctgcaagaggacaaataacttactttgttgttcccctatgcatgtagccgcaaggaaaagaaagagaaatatgttaaacagaaatttattttaaaattatgagggttttttcttctactttctctggatattaaaaaaaataaaatgatgaggtttttcttgctagagtgaaatcaaaacaaatgatttaactattcactgacatctcatacatacacatacagcatccagagctcatggacaagtcaaagaatccacataggttacatgaaatcatacatttataacagcagaaacttagaacagttgccccctttctttctatttggaatacctggggtatgggaacgtggccagaaagaattggtttgaatcagtaataagtgaactgttagcgtgaaaggcagagcattttgtgtgccggcttgccctttcctgacagctcctcctccaacatgccaagcagtggaaaatttcatcagccagtgcatttttaaacaaacactgcatccttggtttcaaagaaggtggaaaaaaaaaaaaagaaggaaaagagagcagaggaaaggagtgggtggttctagggagacagggtaagcagaccaagttacgacctccatctggaccattcctttattttgtaaattatgagttttgccttaggttggcatgggaagcaaggactgtatagtgggg

SEQ ID NO: 48392 - DNA, 735 bp, Homo sapiens
gattaattagagacaagttttgatataaaaaatgggttctctcaggtcaagaagttacctatattcgtatcacttggtgaccacctacacttcatggccagaaaagcttagtgccatttggtcttgggaagacctgagactggtgctcaaaccagaagtctcagcagggcacagtggctcacacctgtaatctcaacactttgggaggctgaggcaggaggattgcatgagaccaggagttcaagactagtcttggcaacatagtgagaccccaaacctagcaaaaaaaagactgctgggcatggtggtgtgcaactgcagtcccagctactggggaggctgaggcaggaggatcacttgagcccagtaaatgaggttggagtgagctgtgattatgccaccgtaccccagcctgggtgacagagtgagaccctgtccttaaaaaaaggaaaaagaaaaagaaaaaaaaaatacctggatgtctctaggaaagaaaattgtaataatccttctagtcaagaagctttctcctcaaactaacagatctgtagtaaaggaataagtttaatgatatcatcagggaaagtatgaccactacaactaaaaagccctagtatggaaataaccaaatagaacaaagtgaaggagcccagcaggggtctgcagaacacagctgaatagcaagaaaggaaaatatttccttttaactctcttgttggccagataaaaaaaaaa

SEQ ID NO: 48393 - DNA, 528 bp, Homo sapiens
aaaattagacataatctatttttgccaccttgaatcctacatattacctacataagttattgcaggactgggagaattaaattatttgctgtatttatagtactcataatcgaatatagtatatgctatataagtgtcagcaaatcttttttttattcttgttcatgctgttttttttcctttctccttcttcattagagtgttattgtatttttgtacctgacaaacttgtattcattcttcaaaatgcatagtgtagaacacatggacacagggaggagaacatcacacacaaggcctgtcggggggtcgagggaaaggggagggagagcattaggacaaatacctaatgcatgcagggcttaaaacctaaatgacaggttgataggtgcaatgaaccaccatggcacatgtatacctatgtaacaagcctgcacgttcagcacatgtaacccaggacttgaagtaaaatttaaaaaaaagaaaaagcagagtgtaaggaaatagtctttggcatttgatgcatgc

SEQ ID NO: 48394 - DNA, 387 bp, Homo sapiens
aacaaattgtcttcctcacattttagaagcttataactaaagtgctagatgctggctttgctgatgttagcctgaactacttaaacttaacctgattttctgttttaaattccttagccctgattattcctttcctatcaaacatttgggcctgttagcctgaactacttaaacttaacctgattttctgttttaaattccttagccctgattattcctttcctatcaaacatttgggcctgttgagtcctccaaaatggggtcatcagaccagatcctgtgagcccaatctagccccacctgcgggaacacagcctcacacattcgtttacctggttttggctgcttgtgtgcttcagcagcaaaggagaatggttgggacagaga

SEQ ID NO: 48395 - DNA, 265 bp, Homo sapiens
aaatcagacactagtgcaggaaagaagtgaagctggccaggaggtggcagcaacagttcagcccaaggcaagtgctgctgggcagaatgaaggtccagcgtggccaagtcttcctgatctttcaggggcaaaggaaatctggatttttaatatgtggggtgttaaaatatacatatattatcatatataaaacatacatatatacatgtttctgcacagttcctggcttataactcctctagcccttgttacagtcttttaggtg

SEQ ID NO: 48396 - DNA, 205 bp, Homo sapiens
ggtaagcatgtttatttcaaaatactaaaataatttttttgaagtttcttaagttcaaaatttttatttttgtatatgtttttgaaaagaatatgttcaaaactcagaaatgaaagaacagacgcctcctagtcgccccatctcccaacttccccaatagaggtgacaagtgttagccttttgtttttgtgtgtgtgtgaccagt

SEQ ID NO: 48397 - DNA, 455 bp, Homo sapiens
taagtcatgtggggaagtggccagggtagggcatggtcatcgtgagcagggtcctgcagggtgaggccggggctgcagacgcgactgtacaggtctatgaagaccccatgtgtgatgaggagaccttctctgcacagtccctggacagaacacgagatgaggggtcctctggacgtcagctccagccacacccctacctggaggaagctgcttttaacagagcctccaactaatgccactgaagacattcccagctgctatccggggagtcatccagagtgagctcaactattctgtgatcctgcagtgggtggtgacaatggaccctgagcctgtgctgagctggaccttcagtggggtgccctgtgggatgggagagaagctgttcatccgacggttgtcctgtgagcagctgggcacctacatgtgcatagccacaaacagcaagaaacagc

SEQ ID NO: 48398 - DNA, 322 bp, Homo sapiens
tgtcccagcctggtccccacccaccaccaccactgacccgatgctagagaaggatgcggctggaggtgacttcccagccaacttggtagcctccaactaatgccactgaagacattcccagctgctatccggggagtcatccagagtgagctcaactattctgtgatcctgcagtgggtggtgacaatggaccctgagcctgtgctgagctggaccttcagtggggtgccctgtgggatgggagagaagctgttcatccgacggttgtcctgtgagcagctgggcacctacatgtgcatagccacaaacagcaagaaacagc

SEQ ID NO: 48399 - DNA, 430 bp, Homo sapiens
gattcagtaaatgtgacattgataaaatactttgatagaatactagcagtatattacatcaattgagccaattctttatagcatgattttcctccagcatggagtccaacctagaatcatgtattgcaattagttgtcatatctcttcagtccccttcaatctggaaaacctctccagcttttcttgcctttcacgacaataccattttttaaagataaaattccccctgtttttaataggaatgttcttgtttttggtttgtcttatgttctactgggttttttaaattttttttttcatacttttccaataacttttttgttattttttataggcattcattttttggatttaggtacaacacatactgttttctcactccaacattggggtatgtgtaatatttccctgttctttgattatagacat

SEQ ID NO: 48400 - DNA, 295 bp, Homo sapiens
ccattatcacagtgagtagtagcatccaaaggttaggtaatgccccttttcctagccgaaagactgaagaccgaattctcctaagattgttgggcttaccttaaattcttctattaaaatggaaaatgcccaaaccccagtctgtctgtccttagagccaggaaaaaggactctgagacgtacatgctgttggcatcagttaaatttcatgttcctagaggtcctacaatcctgtatgtaaagctacagtgagtaattgcaactgcattataattattttggtaatgactccctt

SEQ ID NO: 48401 - DNA, 544 bp, Homo sapiens
atgccatggtagggactttggaatttaattcaggtgatgtgggagtccctgccagatggatggagggtgaaataatgcttaagccctcagccttactccatctgccttgttcaggagtgactcctaggaggaggtggcaggaactggcacctctgatcctcagctctaaaagggtctgatgctttcacacctcaagagatttgcacaggccgttcccctgcctgggagcaccctcccatggctccttctggagaagtgtgccagctcattctgtaatcagaggaacgatgctttgctgagcactgtctacatgccactttgtatgtataaccccctcgattttaatttttaattttttttattatttatgtatttatttatttatttttgagacaggctctcactgtcgcccaggctggagtgcagtggtgcgatctcggctcactgtagccttcacctcccaggttcaagcgattctcatgcctcagcctcccaaggagcggggattacaggcacgcactactatgcccagcaatttttgtat

SEQ ID NO: 48402 - DNA, 474 bp, Homo sapiens
acccctggtcagttaaatcacagtctctggaaaatggagtccaagcttcaggttgtttgattttgaaaaggctcccctggtgattctgatgcgaagtctacacaggctctggccttttcctcctcctctgaacttatcacccacaactctatccttctccgtttctgttccagccacaacaatttccttactcttccttaaacatggcaagcatccacataagatgttcctgagagaaacactgctgaaacaagaaaaagcagtgacagcaagatgattcttgccatcatactgatgcgttttagttgaattttaaaacatatacaatgttaaaaaaaaatcagctttgaaatgtatgcctttttgtcttgatttaaaagcagtatgctatttttcctagttttatatgtgacagtctatgcttagtcattgtttaacaaaagatccaggtactagactttcttcaatatgtta

SEQ ID NO: 48403 - DNA, 529 bp, Homo sapiens
acttgaatgatatggcaaaattagaaatgcaattttagaagtaattacactgttgtgtaaatggccacctcttttgaagtctttgctacattgcttataaaacactgagttgaacatgagaaagccttttgtctgcagctgtacttttcaactggacatgaaccatgtacttttatggcacgtagatattcacatcaaatttctgatttgcagaccgattttatttttagttaacaaataagcttatcaaatgtggcttttgaactaaagcgcttttaattaaggagttataacagcatgttattttgagtagctgttactaaaatctgttgtgatggaacaatttggagtgagcatctgatatcagagataaagagagaagcatgcagtgagcatctggaagttcttgtaaaaaaaaaaacaaattaaacattctcatttgaatgcatttaaaatttttttaaattgccaattcctaagctttttctttgttagttgtagtttgctttctcgactgtataaaagaaaa

SEQ ID NO: 48404 - DNA, 297 bp, Homo sapiens
tgtgaaaattgatattaatattttattaagatgcattcaaataattatttatacatttatatgcataaacacccaaaacattttatacatggaatcatataacatagtattctcttgccattatttgtttgttttttaaaactcaaataagtatagatttacttttttttttacttcatagtatttaactttacttcaactctattatttcctttatcaatttcctcttgataaatgtttaaccttttgaaaatattttggtgttaacagtggttcaataaacattattttccattg

SEQ ID NO: 48405 - DNA, 244 bp, Homo sapiens
tgagacagagtctcgctctgccgcccaggctggagtgcagtgtcgccatctcagctcaatagtgaccacctaattttctaagcagttggtcacttttccatttttatgtaacttgacctcactgtagcatatgactttgctgttcattcactcgtttgaagctctgtcagagttgtgatctgtcatgattgtgcccagcaaaaggctggagtcgacctgagagcctcaaatagttagcacccat

SEQ ID NO: 48406 - DNA, 874 bp, Homo sapiens
agatttgccaaagaaatagaattgcagttcagtagttgagagggaggttttgctgggctctgatattttcagaggcaaatgcttttctttgtgcttgtatcaggtcatcaatgaagggagattaaaatgatcacatttttctcttagtgtcagatagcagttatttagtagacaaggattagactccaagttgtatcacagaccaggtatttgctatttttctttttagtattcttttaggcatctgataaatttttttatatgtaagtttgtctttcttgggctgtttccctttcctccccctgtctagtagctgatattttttcacgttcacagttgcaggcctccatttagttcatccattccgctgcacattattctcttccggggaccagcttccttggtgacttcttcccttgaagcccttattcctgtcagtcttacttagtcaagtttttgtctctttgtctcatcaccactggtgtgcttcatagacctagccgcccctctagcctaactgtagacaaggttggtgacggcagcggagatgacaatgatggtgttggtggtgggaataaatgcagtgctataattatatcatttccagagagatcgcatttctgactatgagccctagagtcaggctgcttagcttcaatgccagctctttcatttcttatttctgtgaccccaggcaaattgccttacctctcctagacaaggtctttcctcatcaatgaaacaggaatgaaaataatagtatttaccacatcataggattgttaggagatttaaatgaattaacacatgtcatataataatagcttaaaaacgttattttttatttttaaatttttgcactgccccttgcctg

SEQ ID NO: 48407 - DNA, 571 bp, Homo sapiens
agattttattcgcactgagtttggaactgtattttctcacagaagtcaagtcaaaagaacaatattataatggacttaaggaaaaacggttgagaagaataggaggcataaagggaaaagaaaggagtaagctaatttaaaggtttttggatactattcataacccattaataataataaaaggataatgacttcttcttgtggttataggaagacaggaaatactgatatttaagtggtcaactccctttagtaagaagtacagctttattttgatgtcaagttttcaaaaattttataaattaactcacttattcacccactcaatctatattgaggggctactatgtgttggttattgtgctaggtaatggggatatagggatgagcaaaataaaaaagattgctgtcttcatgaagtaattctagtgggataggaagataataaaacatgtaagtaaattaacaagataactatatattgtgataactattttgaataaataagatgttaccactttaaggaggtaacatcagaattcagatggaaaatgtaagcatatttttcttg

SEQ ID NO: 48408 - DNA, 1046 bp, Homo sapiens
caactgaactgcttgctccagagctattgacctcttgcccagcctcccagcttcctgaatccgtgagaacattcagtgaatcaatgaggacatccacatcctcattgagttctcctttgcccttcccgttccctgcctcagtcacaagaccctctccacatctctcaccctgtcttgccttgacgacctgtccaggcccatcatccacctgacctataaacttcaaacactttctggtgtttcctgcttccaaatattcctcaaaattgaggatcctgagttgaatatctggagttctcctttctgatttctataatggtcaacatgctctaaggcagattttccaagcatttctggacttgccagagacttcctcccttggcaggtctgaatcagaaaattcacacgctggctgggcacggtggctcatgccttggcctcccagggtgttgggattacaggtgtgagccactgagcccagccagaatctctacttttaacacatatcctggagaattcttatgatcaagtatgttggaggaatagctagaatgcctactggggtgataacagttttaaaaagtattatgttttacttcttcatgtatatttgcatgttttcctaacagaccctcaacgttgctagatgattggctatatggatgatttgactgggaggtagtggccctaatggagtaataagaaacgctgtgcatagatggttgagaaacagccctgggtgctgacacatcccaaacattaaataggccttatgaaatgtattttggtgttcttgagatacgaggatgaattttcaagaggacaatttagtctcattttaacttggaagatagaagagatggtcaagagtcttatccgttgtttatataaaaagactgtagaaaatgcgtcaaagcattcgtgagattaggcacctctacatgcttcttgaggttagacacctctacatgtttggtgtggtatctagcacagagtaagctctaaatacaacaaatagaatgaataaataaatgaatgaatgaacg

SEQ ID NO: 48409 - DNA, 672 bp, Homo sapiens
attatagatcagtttgcattttccagaattttatataaatggaatcatatgtactcatactgttttgtctggcatcttttactcagcaaagctattttaagattagccttgttattgcatttgtcaataattcattcctttttattgccaagtagtattcaattgtatagacatcacatttttaaaaatccattcactgttgatggacattttgggatattacaaataaagctgctgtggatattcatgaacaagtctttgtgtagacatacgcttttattttccttggataagtaggagtgatagttgaatcctgtgttaggtgtatgttgacctttttaagaacctgcctgttttccaaagtggttgtaccattttacattccccaccagtagtgtatgagagctgtcctcttcaaattgactggagaagctttgcttccatctcttcttcttggctaatagaaggtgcctcttggctgggcgtggtagctcacgcctgtaatcccaacactttgggaggcctaggcgggtggatcacctgaggtcaagagttcgaaaccagcctggccaacatgacaaaaccctgtctctactaaaaatacaaaaattagccgggcgcagtggtgggcgcctgtaatcccagctactagggaggctgaggcaggagaat

SEQ ID NO: 48410 - DNA, 490 bp, Homo sapiens
taagtgtaggggtatatgacttaacccttacctggcatggccttgggtcttgtttatcttttgatacctttttgccacaaaaagtcctttctgtcagtcttgatatctcttctttaacatcaatgctggtcggttgttgtgtctaaacttcaaaagggagggagtttaatgaggcatgtctgccctcctgtcctgttatgatcaggaactctgttttaaaggtttttctggggtcaccttggccatgagggtacgttcatgcagttggcagagggctcaggattttatttattttacatcactgactgaatgactttgaaattcatttttgctagtttgctaattttgatcatttgatgatgcatcctaataaagtcaacataaattacaaagcaaaacagtactgacatgcaaaacttactgtgatgaagtcattttgacaactaacattatttgagtcacaagttaaaacaaaaagcaagctctctat

SEQ ID NO: 48411 - DNA, 549 bp, Homo sapiens
tgacattgaagctttgtcctgcttgaaagcccatgaacgtcttcagctcccggcaaaagacgtgcgcctgtcaccaccctgggctcgccagcagaacctgatgacggggtcactcctgcctgcccctccctgggctgggtctgcccaccagggtcagtgtgggcttacagggctgaacctaacgtacccccgtgggccccctgtatgtcatatttttctctccccaggcccgaggccaacaatggtgcccccgctagccacagtgacctgccaactttactggtactaggcgcagagacacttcttaccacccttcctggcattcagaggtttggggcttgaaggagaaggagaggctgggtgagcctgtgaatcactgtagggaggaatggcaggcacctccacaagcaacagtcagatatgtctttgtttcagctgggtgcagtggctcacgcttgtaatcccagcactttgggaggcttaggcgggcagatcacaagcccatgagttcgagaccagcgtgggcaacgtggcaaaaccctgtctcta

SEQ ID NO: 48412 - DNA, 803 bp, Homo sapiens
caagaaggcccccaaaaggagccagcatcttgattttggacttcccagcctctagcacgatggagtcttgctctgtcccccaggctggagtgcagtggcatgatctcggctcactgcaagctccgcctcctgggttcatgccattctcctgcctcagtctcacgagtaactgggattacagtcatatgagaaaacggtctgaactttgatcttcattgggattcagatatcagagagtggcgctgaaggaggaacaattttaattagggacaaagaaggcctagaaagaggtttattctcaagtgaggagcacctctgcccagccgccccaccatctgggaagtgtggagcgcctctgcctggagcccagctgtctggaaagtgaggagctcctctgcccggtcgccaacctgtctgggaagtgaggagcgactctccttggtcgccacaatgtctgggaagtgaggagtgtctctgcctggccgctccattgtctgggaagcgaggagcgcctctgcctggccgccccactgtctgggaagcgaggagcgcctctgcctggccgccccactgtctgggaagtgaggagcgcctctgcctgatcgccccaccatcggggaagtgaaaagcccctccccctggcccgcgcctcccgccagccgcagcaccatctgagaagtgaggagagcctttgcccggctgctgtgcaaccctccaagtgtgaagtggcagccctgtgtgtgatctttctgccctccccaagtttgcattttcaatattaaagtttacttttaaattagaag

SEQ ID NO: 48413 - DNA, 592 bp, Homo sapiens
gaaggcaagttttcctgcttccatgacgatggagagcaggcatctcctttcctgagtttcagcttgcttctgacagggaaggtgagtgtgagttttttccagcttctaagatggcagagaacgatcaccagcctgagccttatttccaggtaagtagctgaattagagttttgtcttaaaatttttccttaatgattaaaatgtaagattacccaccagctgcttttaatttctccttagcattagaacactcagtaatcatatgaattgtgcatttgtttgttttgcttaactctttctgtttgtttatgtttggggttttattgttgttgtttcacttttctcccatctcttcctgacttggtcaaatccaaaggaatgttccaaattgtggggagcaaggcatctgaaatggctaaaactcctgtggctgccaaaaataaaaataaaaaaaaaatataaaaaaataaacacacacaaaaaatgaaaaacaaaaacaaaaaacacaaaaaagccaaaagaaaaaaccccaaaaaaaacaaaaaaaggcaaaacaacaacaacaacaacaacaacaacaacaaaaaaccca

SEQ ID NO: 48414 - DNA, 2638 bp, Homo sapiens
gtgaacgggttgtgggacctgtcgctgtgtgggggctgtcgagcactccccagaacgtaacaaatcctcaggggaactgatgggcggtcgcgcgggcactgggtcctccacaccctggagagccgttttccgttgccactcggctctggccggggtcacattctgcagcatgtctgttcattcccctgggcggggccctgcaccgactccagcccagcccctgctccctctgcggggaacgtggccccaggcagtgctgggccattggctgtcagtgctggtcctggcggctgcattcccagtccccttggtctctgtgacagtgggcggggccggccctcccaggatctgacggcgcaggtcctccccttctgtgtcctgcagatggacacccgctccgggagccagtgttccgtcaccccagaagccatactcaataatgaaaagctggtcttgccgccccgcatctccagagtgaacggctggtcgttacccctgcactacttccaggtggtgacctgggctgtcttcgtgggcctttcctcggccaccttcgggatcttcattcccttcctgcctcacgcgtggaaatacattgcctacgtggtgaccggggggatcttctcgttccacctcgtcgtccacctgatcgcgtcctgcatcgacccggccgactccaatgtcagactcatgaagaactattctcagcccatgcccctcttcgacagatcaaaacatgcacacgtgatccagaatcagttctgccacctgtgcaaggtcaccgtgaacaagaaaaccaaacactgcatttcctgcaataagtgtgtgtccggcttcgaccaccactgcaaatggatcaacaactgcgtgggaagccggaattattggttcttcttcagcactgtggcctcggccacagctggcatgctctgcctgatcgccatcctgctgtatgtcctcgtccagtacctcgtgaaccccggggtgctccgcacggaccccaggtatgaagatgtcaagaatatgaacacgtggctgctgttcctccccctgttcccggtgcaggtgcagaccctgatagtcgtgatcatcgggatgctcgtgctcctgctggactttcttggcttggtgcacctgggccagctgctcatcttccacatctacctgaaggccaagaagatgaccacctttgagtatctcattaataaccgcaaagaagagagttcaaaacatcaagcagtgaggaaagatccatacgtgcaaatggacaaaggagttctccagcaaggagctggcgccctgggctcatctgcacagggagtcaaagccaagagctccctgctgattcacaagcacttatgtcacttctgcacttcagtaaaccaggatggggattcgacggcacgggaaggggatgaagacccgtgtccatctgcacttggagccaaggccaggaactcccggctgatttgcaggcgcctgtgtcagttctccactcgtgtacacccagacgggggctcgatggcacaggaagcagatgatgccccgagtatatctacacttgggctgcaacaagaaacaacagagcccatgaaaactgacagtgctgaaagtgaagactgagattcaggagctcaggtgcccctgtgatccaggtcttctaccctgaaaccccaccctccatcaaggtcctgcctgtagagtctaccttgcaaagcctcctgctcctacccatgctacaggccaggaaccagagcccatcatctcagaggcccctggatgtccttcgaaggaaccaggaccctcagagcccagcatccatctctgtcatcatcttcatcacacccaaagaagagccagccttgcaggagggtttacatctccaggaagatgggctgccagcaactgcagaggatgcagccacctgcttaactgtgctgtccagccagccagccagctgcagggcctcttgctgcttaagagctgatgggccgggcatgttggctcacacctgtgagcacagtactgggaaatgggagcacagtactaggaaatgggagcacagtactgggaaatgggagcacagtactgggaaatgggggctcacagcactgcaaaatgggagcacagtattgggaaatgggagcacagtactgggaagtgggagcacagtactgagaagtgggagcacagtactgagaaatgggagtacactactgagaaatgggagcacagtactgggaaatgggcatacagtactgggaaatgggcatacagtactgagaaatgggagcacacagtactgggaaatgggagcccacagtactgggaaatgggagttcacagtactgggaaaggggagttcacagtactcggaaatgggagcataggtactgggaaatgggagcacagtactgggaaatgggagcatagtactgggaaaccccagacctggattctgagtttttcagcctagcccagacttcttatcttagtagacaaaaagagtcaataccagagaaccagaggcatcctctgtattttaatgaactctgcattttaatctgtttagtagtcattttttaaaagataatcagttttccaaatatatctataagttactacgtgaaatgggctg

SEQ ID NO: 48415 - DNA, 3495 bp, Homo sapiens
  misc_feature (1901)..(1901): n is a, c, g, or t
  misc_feature (2233)..(2233): n is a, c, g, or t
gtgaacgggttgtgggacctgtcgctgtgtgggggctgtcgagcactccccagaacgtaacaaatcctcaggggaactgatgggcggtcgcgcgggcactgggtcctccacaccctggagagccgttttccgttgccactcggctctggccggggtcacattctgcagcatgtctgttcattcccctgggcggggccctgcaccgactccagcccagcccctgctccctctgcggggaacgtggccccaggcagtgctgggccattggctgtcagtgctggtcctggcggctgcattcccagtccccttggtctctgtgacagtgggcggggccggccctcccaggatctgacggcgcaggtcctccccttctgtgtcctgcagatggacacccgctccgggagccagtgttccgtcaccccagaagccatactcaataatgaaaagctggtcttgccgccccgcatctccagagtgaacggctggtcgttacccctgcactacttccaggtggtgacctgggctgtcttcgtgggcctttcctcggccaccttcgggatcttcattcccttcctgcctcacgcgtggaaatacattgcctacgtggtgaccggggggatcttctcgttccacctcgtcgtccacctgatcgcgtcctgcatcgacccggccgactccaatgtcagactcatgaagaactattctcagcccatgcccctcttcgacagatcaaaacatgcacacgtgatccagaatcagttctgccacctgtgcaaggtcaccgtgaacaagaaaaccaaacactgcatttcctgcaataagtgtgtgtccggcttcgaccaccactgcaaatggatcaacaactgcgtgggaagccggaattattggttcttcttcagcactgtggcctcggccacagctggcatgctctgcctgatcgccatcctgctgtatgtcctcgtccagtacctcgtgaaccccggggtgctccgcacggaccccaggtatgaagatgtcaagaatatgaacacgtggctgctgttcctccccctgttcccggtgcaggtgcagaccctgatagtcgtgatcatcgggatgctcgtgctcctgctggactttcttggcttggtgcacctgggccagctgctcatcttccacatctacctgaaggccaagaagatgaccacctttgagtatctcattaataaccgcaaagaagagagttcaaaacatcaagcagtgaggaaagatccatacgtgcaaatggacaaaggagttctccagcaaggagctggcgccctgggctcatctgcacagggagtcaaagccaagagctccctgctgattcacaagcacttatgtcacttctgcacttcagtaaaccaggatggggattcgacggcacggggccacctcaccacacttccccaggatttcagggaacaggctcctgtgacttggaaataaaaagggatcagcccagcctggaggaacagcgacgctggtgtccaagccttgccccttgcctgcacttccagcaaagatttggagacacactcggtggaaatcgattgagcccccagcccaccctggcccagactcagccaccaaagttccctcactgcatgtggcacacgggctcatgggagtttctctgcctgtgtttgtccacgttgacaccttctgcacaggtgcatttgtgagtcccctcagtgtctctgcagcttctatgtgtggatgaatagtgaagccacatgaggcctggtctgaagcagagaagatccgctcagcatcatgttgaatcccaagcccgcgtctccgtgggctccaggacaatcctatgaaagtgacaccgtcgttcattgttcacatcggggaggagaattccatctgaaaatgcncgtgacttcactgacacccgcgtccgtggcacagccctgtgctgagctccacagacctacagtccatcgcctccccttggagtgggcccacagctgcagacagtgttgtccaaagaagatgctctgagtagatgaatggaacaaactggaaactccagaaacaagcccttctttacatttctaatgtttggcttaaatggaaggtgccaaggaaggggatgaagacccgtgtccatctgcacttggtgctgggcaccacaggcctgcagcttcttaggctctgggaggaggcgcagtggaaattgaggtcgccgtgaggtcgctccaatgtngccgtacactgttgctgcctggctaccttcccatctctgtcatcatggagagtgtgggcaggggacccctggccctcttccttcttctcctgccccggggggagcagcagagagccaaggggctggaggaggagccaaggccaggaactcccggctgatttgcaggcgcctgtgtcagttctccactcgtgtacacccagacgggggctcgatggcacaggaagcagatgatgccccgagtatatctacacttgggctgcaacaagaaacaacagagcccatgaaaactgacagtgctgaaagtgaagactgagattcaggagctcaggtgcccctgtgatccaggtcttctaccctgaaaccccaccctccatcaaggtcctgcctgtagagtctaccttgcaaagcctcctgctcctacccatgctacaggccaggaaccagagcccatcatctcagaggcccctggatgtccttcgaaggaaccaggaccctcagagcccagcatccatctctgtcatcatcttcatcacacccaaagaagagccagccttgcaggagggtttacatctccaggaagatgggctgccagcaactgcagaggatgcagccacctgcttaactgtgctgtccagccagccagccagctgcagggcctcttgctgcttaagagctgatgggccgggcatgttggctcacacctgtgagcacagtactgggaaatgggagcacagtactaggaaatgggagcacagtactgggaaatgggagcacagtactgggaaatgggggctcacagcactgcaaaatgggagcacagtattgggaaatgggagcacagtactgggaagtgggagcacagtactgagaagtgggagcacagtactgagaaatgggagtacactactgagaaatgggagcacagtactgggaaatgggcatacagtactgagaaatgggagcacacagtactgggaaatgggagcccacagtactgggaaatgggagttcacagtactgggaaatgggagcacagtactgggaaatgggagcatagtactgggaaaccccagacctggattctgagtttttcagcctagcccagacttcttatcttagtagacaaaaagagtcaataccagagaaccagaggcatcctctgtattttaatgaactctgcattttaatctgtttagtagtcattttttaaaagataatcagttttccaaatatatctataagttactacgtgaaatgggctg

SEQ ID NO: 48416 - DNA, 2381 bp, Homo sapiens
  misc_feature (200)..(200): n is a, c, g, or t
  misc_feature (787)..(787): n is a, c, g, or t
  misc_feature (1119)..(1119): n is a, c, g, or t
gggaaagaagcatggagagtttggcccctccatggaagctcgtggctgaaatagaggccaagaagatgaccacctttgagtatctcattaataaccgcaaagaagagagttcaaaacatcaagcagtgaggaaagatccatacgtgcaaatggacaaaggagttctccagcaaggagctggcgccctgggctcatctgcncaaggagtcaaagccaagagctccctgctgattcacaagcacttatgtcacttctgcacttcagtaaaccaggatggggattcgacggcacggggccacctcaccacacttccccaggatttcagggaacaggctcctgtgacttggaaataaaaagggatcagcccagcctggaggaacagcgacgctggtgtccaagccttgccccttgcctgcacttccagcaaagatttggagacacactcggtggaaatcgattgagcccccagcccaccctggcccagactcagccaccaaagttccctcactgcatgtggcacacgggctcatgggagtttctctgcctgtgtttgtccacgttgacaccttctgcacaggtgcatttgtgagtcccctcagtgtctctgcagcttctatgtgtggatgaatagtgaagccacatgaggcctggtctgaagcagagaagatccgctcagcatcatgttgaatcccaagcccgcgtctccgtgggctccaggacaatcctatgaaagtgacaccgtcgttcattgttcacatcggggaggagaattccatctgaaaatgcncgtgacttcactgacacccgcgtccgtggcacagccctgtgctgagctccacagacctacagtccatcgcctccccttggagtgggcccacagctgcagacagtgttgtccaaagaagatgctctgagtagatgaatggaacaaactggaaactccagaaacaagcccttctttacatttctaatgtttggcttaaatggaaggtgccaaggaaggggatgaagacccgtgtccatctgcacttggtgctgggcaccacaggcctgcagcttcttaggctctgggaggaggcgcagtggaaattgaggtcgccgtgaggtcgctccaatgtngccgtacactgttgctgcctggctaccttcccatctctgtcatcatggagagtgtgggcaggggacccctggccctcttccttcttctcctgccccggggggagcagcagagagccaaggggctggaggaggagccaaggccaggaactcccggctgatttgcaggcgcctgtgtcagttctccactcgtgtacacccagacgggggctcgatggcacaggaagcagatgatgccccgagtatatctacacttgggctgcaacaagaaacaacagagcccatgaaaactgacagtgctgaaagtgaagactgagattcaggagctcaggtgcccctgtgatccaggtcttctaccctgaaaccccaccctccatcaaggtcctgcctgtagagtctaccttgcaaagcctcctgctcctacccatgctacaggccaggaaccagagcccatcatctcagaggcccctggatgtccttcgaaggaaccaggaccctcagagcccagcatccatctctgtcatcatcttcatcacacccaaagaagagccagccttgcaggagggtttacatctccaggaagatgggctgccagcaactgcagaggatgcagccacctgcttaactgtgctgtccagccagccagccagctgcagggcctcttgctgcttaagagctgatgggccgggcatgttggctcacacctgtgagcacagtactgggaaatgggagcacagtactaggaaatgggagcacagtactgggaaatgggagcacagtactgggaaatgggggctcacagcactgcaaaatgggagcacagtattgggaaatgggagcacagtactgggaagtgggagcacagtactgagaagtgggagcacagtactgagaaatgggagtacactactgagaaatgggagcacagtactgggaaatgggcatacagtactgagaaatgggagcacacagtactgggaaatgggagcccacagtactgggaaatgggagttcacagtactgggaaatgggagcacagtactgggaaatgggagcatagtactgggaaaccccagacctggattctgagtttttcagcctagcccagacttcttatcttagtagacaaaaagagtcaataccagagaaccagaggcatcctctgtattttaatgaactctgcattttaatctgtttagtagtcattttttaaaagataatcagttttccaaatatatctataagttactacgtgaaatgggctg

SEQ ID NO: 48417 - DNA, 3032 bp, Homo sapiens
  misc_feature (1901)..(1901): n is a, c, g, or t
  misc_feature (2233)..(2233): n is a, c, g, or t
gtgaacgggttgtgggacctgtcgctgtgtgggggctgtcgagcactccccagaacgtaacaaatcctcaggggaactgatgggcggtcgcgcgggcactgggtcctccacaccctggagagccgttttccgttgccactcggctctggccggggtcacattctgcagcatgtctgttcattcccctgggcggggccctgcaccgactccagcccagcccctgctccctctgcggggaacgtggccccaggcagtgctgggccattggctgtcagtgctggtcctggcggctgcattcccagtccccttggtctctgtgacagtgggcggggccggccctcccaggatctgacggcgcaggtcctccccttctgtgtcctgcagatggacacccgctccgggagccagtgttccgtcaccccagaagccatactcaataatgaaaagctggtcttgccgccccgcatctccagagtgaacggctggtcgttacccctgcactacttccaggtggtgacctgggctgtcttcgtgggcctttcctcggccaccttcgggatcttcattcccttcctgcctcacgcgtggaaatacattgcctacgtggtgaccggggggatcttctcgttccacctcgtcgtccacctgatcgcgtcctgcatcgacccggccgactccaatgtcagactcatgaagaactattctcagcccatgcccctcttcgacagatcaaaacatgcacacgtgatccagaatcagttctgccacctgtgcaaggtcaccgtgaacaagaaaaccaaacactgcatttcctgcaataagtgtgtgtccggcttcgaccaccactgcaaatggatcaacaactgcgtgggaagccggaattattggttcttcttcagcactgtggcctcggccacagctggcatgctctgcctgatcgccatcctgctgtatgtcctcgtccagtacctcgtgaaccccggggtgctccgcacggaccccaggtatgaagatgtcaagaatatgaacacgtggctgctgttcctccccctgttcccggtgcaggtgcagaccctgatagtcgtgatcatcgggatgctcgtgctcctgctggactttcttggcttggtgcacctgggccagctgctcatcttccacatctacctgaaggccaagaagatgaccacctttgagtatctcattaataaccgcaaagaagagagttcaaaacatcaagcagtgaggaaagatccatacgtgcaaatggacaaaggagttctccagcaaggagctggcgccctgggctcatctgcacagggagtcaaagccaagagctccctgctgattcacaagcacttatgtcacttctgcacttcagtaaaccaggatggggattcgacggcacggggccacctcaccacacttccccaggatttcagggaacaggctcctgtgacttggaaataaaaagggatcagcccagcctggaggaacagcgacgctggtgtccaagccttgccccttgcctgcacttccagcaaagatttggagacacactcggtggaaatcgattgagcccccagcccaccctggcccagactcagccaccaaagttccctcactgcatgtggcacacgggctcatgggagtttctctgcctgtgtttgtccacgttgacaccttctgcacaggtgcatttgtgagtcccctcagtgtctctgcagcttctatgtgtggatgaatagtgaagccacatgaggcctggtctgaagcagagaagatccgctcagcatcatgttgaatcccaagcccgcgtctccgtgggctccaggacaatcctatgaaagtgacaccgtcgttcattgttcacatcggggaggagaattccatctgaaaatgcncgtgacttcactgacacccgcgtccgtggcacagccctgtgctgagctccacagacctacagtccatcgcctccccttggagtgggcccacagctgcagacagtgttgtccaaagaagatgctctgagtagatgaatggaacaaactggaaactccagaaacaagcccttctttacatttctaatgtttggcttaaatggaaggtgccaaggaaggggatgaagacccgtgtccatctgcacttggtgctgggcaccacaggcctgcagcttcttaggctctgggaggaggcgcagtggaaattgaggtcgccgtgaggtcgctccaatgtngccgtacactgttgctgcctggctaccttcccatctctgtcatcatggagagtgtgggcaggggacccctggccctcttccttcttctcctgccccggggggagcagcagagagccaaggggctggaggaggagccaaggccaggaactcccggctgatttgcaggcgcctgtgtcagttctccactcgtgtacacccagacgggggctcgatggcacaggaagcagatgatgccccgagtatatctacacttgggctgcaacaagaaacaacagagcccatgaaaactgacagtgctgaaagtgaagactgagattcaggagctcaggtgcccctgtgatccaggtcttctaccctgaaaccccaccctccatcaaggtcctgcctgtagagtctaccttgcaaagcctcctgctcctacccatgctacaggccaggaaccagagcccatcatctcagaggcccctggatgtccttcgaaggaaccaggaccctcagagcccagcatccatctctgtcatcatcttcatcacacccaaagaagagccagccttgcaggagggtttacatctccaggaagatgggctgccagcaactgcagaggatgcagccacctgcttaactgtgctgtccagccagccagccagctgcagggcctcttgctgcttaagagctgatgggccgggcatgttggctcacacctgtgagcacagtactgggaaatgggagcacagtactaggatacagtagggagatccaaaccgtatcagacgcgcctaatagatacagtaagagagtc

SEQ ID NO: 48418 - DNA, 3892 bp, Homo sapiens
  misc_feature (1995)..(1995): n is a, c, g, or t
  misc_feature (2298)..(2298): n is a, c, g, or t
  misc_feature (2630)..(2630): n is a, c, g, or t
atttttttcaaggatgagctttgccagctccacgtggaagtccctaaagctcctccttccacttcgaagcgtgactgatgcctccagggcctcacagccgcttctgaagcacttcctgaaagccagctccaccctggcgaggccctgacctcagcggacccaagcccaggacgatgcctgttgcgttcttctcccccagtagcaagtcaccttccccagcagcctccatgttgtctgggctctccctgtgggggatgccaggggagagtgagagagcagaggtggccaagatggcatgtgctgccttctctcctggaacatgctgcttccacagggcagtgccagtgtctccgtgtgaattcattgattgtggcctgagtgaattcctgggtttgctgttccagatgattctgcagggcttcaaaaccagcaaggccctgagcaaagctgctccttcttctcatgggctgaactcatcgtgatgtcactggctaaggggggcagcatggggtccagcccggcccaggcacatggagctgcggtcctgtcaggctgagtgtggtgtttgccttctaggatggccccgaggccaccagttccagagagggtctgtcaccgaaagacatccatgctgagtcacccaaagacatccatgctgaatccatccctctgccattctgccttgccccaccctctgccattctgccttgcctggccctctgccattctgcattacgcctgatttttggaagtgtggttttgagtgttggcagcccagtgtcacagaggaccatatcttagaaatgaccccaggcgagagctgtggctttcctgttctatttgaaggcagctgttttagggtgcagcgggtccagggacacagagtgggccatgagcaagggatgggtgctggggcctggcagagctggcaggctctgtgaccccggcacttaggaaggggtgggcaccgtgaccctggcactaaataaggaagggatgggtgctgtgaccctggcacttagtgaggaaggggtgggcactgtgaccccggcacttagtgaggaaggggtgggcactgtgaccccggcacttagtgaggaaggggtgggcactgtgaccctggcacttagtgaggaaggggtgggcactgtgaccccggcacttagtaaggaaggggtgggcactgtgaccctggcacttagtaaggaaggggtgggtgctggggccctggcacttaggaaaggatgggtgctggggcccggcagagccggcaggcactgtgaccccagcacttaggaaggggtgggtgctgtgaccccggcacttaggaaggggtgggcactgtgaccctggcactaaataaggaagggatgggtgctgtgaccctggcacttagtgaggaaggggtgggcactgtgaccccggcacttagtgaggaaggggtgggcactgtgaccccggcacttagtgaggaaggggggtgggcgctgtgaccccggcacttaggaaggggtgggcgctgtgaccctggctcttagtgagcaaggggtgggcgctgtgaccccagcacttaggaaggggtgggcactgtgaccccggcacttagtgacaatgttggagcctcacctcccagatccataaagcagggatcatgaaaaccaaccgaaggcagcagggcctacggggcactcagatgtcaagaatatgaacacgtggctgctgttcctccccctgttcccggtgcaggtgcagaccctgatagtcgtgatcatcgggatgctcgtgctcctgctggactttcttggcttggtgcacctgggccagctgctcatcttccacatctacctgaaggccaagaagatgaccacctttgagtatctcattaataaccgcaaagaagagagttcaaaacatcaagcagtgaggaaagatccatacgtgcaaatggacaaaggagttctccagcaaggagctggcgccctgggctcatctgcncaaggagtcaaagccaagagctccctgctgattcacaagcacttatgtcacttctgcacttcagtaaaccaggatggggattcgacggcacgggtgcatttgtgagtcccctcagtgtctctgcagcttctatgtgtggatgaatagtgaagccacatgaggcctggtctgaagcagagaagatccgctcagcatcatgttgaatcccaagcccgcgtctccgtgggctccaggacaatcctatgaaagtgacaccgtcgttcattgttcacatcggggaggagaattccatctgaaaatgcncgtgacttcactgacacccgcgtccgtggcacagccctgtgctgagctccacagacctacagtccatcgcctccccttggagtgggcccacagctgcagacagtgttgtccaaagaagatgctctgagtagatgaatggaacaaactggaaactccagaaacaagcccttctttacatttctaatgtttggcttaaatggaaggtgccaaggaaggggatgaagacccgtgtccatctgcacttggtgctgggcaccacaggcctgcagcttcttaggctctgggaggaggcgcagtggaaattgaggtcgccgtgaggtcgctccaatgtngccgtacactgttgctgcctggctaccttcccatctctgtcatcatggagagtgtgggcaggggacccctggccctcttccttcttctcctgccccggggggagcagcagagagccaaggggctggaggaggagccaaggccaggaactcccggctgatttgcaggcgcctgtgtcagttctccactcgtgtacacccagacgggggctcgatggcacaggaagcagatgatgccccgagtatatctacacttgggctgcaacaagaaacaacagagcccatgaaaactgacagtgctgaaagtgaagactgagattcaggagctcaggtgcccctgtgatccaggtcttctaccctgaaaccccaccctccatcaaggtcctgcctgtagagtctaccttgcaaagcctcctgctcctacccatgctacaggccaggaaccagagcccatcatctcagaggcccctggatgtccttcgaaggaaccaggaccctcagagcccagcatccatctctgtcatcatcttcatcacacccaaagaagagccagccttgcaggagggtttacatctccaggaagatgggctgccagcaactgcagaggatgcagccacctgcttaactgtgctgtccagccagccagccagctgcagggcctcttgctgcttaagagctgatgggccgggcatgttggctcacacctgtgagcacagtactgggaaatgggagcacagtactaggaaatgggagcacagtactgggaaatgggagcacagtactgggaaatgggggctcacagcactgcaaaatgggagcacagtattgggaaatgggagcacagtactgggaagtgggagcacagtactgagaagtgggagcacagtactgagaaatgggagtacactactgagaaatgggagcacagtactgggaaatgggcatacagtactgagaaatgggagcacacagtactgggaaatgggagcccacagtactgggaaatgggagttcacagtactgggaaatgggagcacagtactgggaaatgggagcatagtactgggaaaccccagacctggattctgagtttttcagcctagcccagacttcttatcttagtagacaaaaagagtcaataccagagaaccagaggcatcctctgtattttaatgaactctgcattttaatctgtttagtagtcattttttaaaagataatcagttttccaaatatatctataagttactacgtgaaatgggctg

SEQ ID NO: 48419 - DNA, 3476 bp, Homo sapiens
  misc_feature (1901)..(1901): n is a, c, g, or t
  misc_feature (2233)..(2233): n is a, c, g, or t
gtgaacgggttgtgggacctgtcgctgtgtgggggctgtcgagcactccccagaacgtaacaaatcctcaggggaactgatgggcggtcgcgcgggcactgggtcctccacaccctggagagccgttttccgttgccactcggctctggccggggtcacattctgcagcatgtctgttcattcccctgggcggggccctgcaccgactccagcccagcccctgctccctctgcggggaacgtggccccaggcagtgctgggccattggctgtcagtgctggtcctggcggctgcattcccagtccccttggtctctgtgacagtgggcggggccggccctcccaggatctgacggcgcaggtcctccccttctgtgtcctgcagatggacacccgctccgggagccagtgttccgtcaccccagaagccatactcaataatgaaaagctggtcttgccgccccgcatctccagagtgaacggctggtcgttacccctgcactacttccaggtggtgacctgggctgtcttcgtgggcctttcctcggccaccttcgggatcttcattcccttcctgcctcacgcgtggaaatacattgcctacgtggtgaccggggggatcttctcgttccacctcgtcgtccacctgatcgcgtcctgcatcgacccggccgactccaatgtcagactcatgaagaactattctcagcccatgcccctcttcgacagatcaaaacatgcacacgtgatccagaatcagttctgccacctgtgcaaggtcaccgtgaacaagaaaaccaaacactgcatttcctgcaataagtgtgtgtccggcttcgaccaccactgcaaatggatcaacaactgcgtgggaagccggaattattggttcttcttcagcactgtggcctcggccacagctggcatgctctgcctgatcgccatcctgctgtatgtcctcgtccagtacctcgtgaaccccggggtgctccgcacggaccccaggtatgaagatgtcaagaatatgaacacgtggctgctgttcctccccctgttcccggtgcaggtgcagaccctgatagtcgtgatcatcgggatgctcgtgctcctgctggactttcttggcttggtgcacctgggccagctgctcatcttccacatctacctgaaggccaagaagatgaccacctttgagtatctcattaataaccgcaaagaagagagttcaaaacatcaagcagtgaggaaagatccatacgtgcaaatggacaaaggagttctccagcaaggagctggcgccctgggctcatctgcacagggagtcaaagccaagagctccctgctgattcacaagcacttatgtcacttctgcacttcagtaaaccaggatggggattcgacggcacggggccacctcaccacacttccccaggatttcagggaacaggctcctgtgacttggaaataaaaagggatcagcccagcctggaggaacagcgacgctggtgtccaagccttgccccttgcctgcacttccagcaaagatttggagacacactcggtggaaatcgattgagcccccagcccaccctggcccagactcagccaccaaagttccctcactgcatgtggcacacgggctcatgggagtttctctgcctgtgtttgtccacgttgacaccttctgcacaggtgcatttgtgagtcccctcagtgtctctgcagcttctatgtgtggatgaatagtgaagccacatgaggcctggtctgaagcagagaagatccgctcagcatcatgttgaatcccaagcccgcgtctccgtgggctccaggacaatcctatgaaagtgacaccgtcgttcattgttcacatcggggaggagaattccatctgaaaatgcncgtgacttcactgacacccgcgtccgtggcacagccctgtgctgagctccacagacctacagtccatcgcctccccttggagtgggcccacagctgcagacagtgttgtccaaagaagatgctctgagtagatgaatggaacaaactggaaactccagaaacaagcccttctttacatttctaatgtttggcttaaatggaaggtgccaaggaaggggatgaagacccgtgtccatctgcacttggtgctgggcaccacaggcctgcagcttcttaggctctgggaggaggcgcagtggaaattgaggtcgccgtgaggtcgctccaatgtngccgtacactgttgctgcctggctaccttcccatctctgtcatcatggagagtgtgggcaggggacccctggccctcttccttcttctcctgccccggggggagcagcagagagccaaggggctggaggaggagccaaggccaggaactcccggctgatttgcaggcgcctgtgtcagttctccactcgtgtacacccagacgggggctcgatggcacaggaagcagatgatgccccgagtatatctacacttgggctgcaacaagaaacaacagagcccatgaaaactgacagtgctgaaagtgaagactgagattcaggagctcaggtgcccctgtgatccaggtcttctaccctgaaaccccaccctccatcaaggtcctgcctgtagagtctaccttgcaaagcctcctgctcctacccatgctacaggccaggaaccagagcccatcatctcagaggcccctggatgtccttcgaaggaaccaggaccctcagagcccagcatccatctctgtcatcatcttcatcacacccaaagaagagccagccttgcaggagggtttacatctccaggaagatgggctgccagcaactgcagaggatgcagccacctgcttaactgtgctgtccagccagccagccagctgcagggcctcttgctgcttaagagctgatgggccgggcatgttggctcacacctgtgagcacagtactgggaaatgggagcacagtactaggaaatgggagcacagtactgggaaatgggagcacaagtactgggaagtgggagcacagtactgagaagtgggagcacagtactgagaaatgggagtacactactgagaaatgggagcacagtactgggaaatgggcatacagtactgagaaatgggagcacacagtactgggaaatgggagcccacagtactgggaaatgggagttcacagtactgggaaaggggagttcacagtactcggaaatgggagcataggtactgggaaatgggagcacagtactgggaaatgggagcatagtactgggaaaccccagacctggattctgagtttttcagcctagcccagacttcttatcttagtagacaaaaagagtcaataccagagaaccagaggcatcctctgtattttaatgaactctgcattttaatctgtttagtagtcattttttaaaagataatcagttttccaaatatatctataagttactacgtgaaatgggctg

SEQ ID NO: 48420 - DNA, 561 bp, Homo sapiens
cggccgccccagtctccagaaatagtcacaagacatcggctctcacggtgttggtgtttagggaaagaagcatggagagtttggcccctccatggaagctcgtggctgaaataggtgcagagcccattttattaacgtttgttaagacggctcttttagataaacgggtgtatcaggttttgctttgcttccctgggctgctttgctgcctgcaggacaggccaggtgggtagggctctggccagcctgctgagctgtcctgtgggcactgtgcagggctgcagggatggtgacctgtctcagccccatcagaggctgtgctgagtggcactcacagcactcgtgttcacctcctgggcctggggctctcagcacgctcaggagtgtgtggtcccaggacccgctagccagcacctcggggtggccgccccactgcgtggtcctccgactgtggggtctctgtgcatcccccaaggtgcgccccacccagtgtccagatgtggggaaccccacaggccatctggaccctcagacagagcggcccctcctgagctggtctct

SEQ ID NO: 48421 - DNA, 1800 bp, Homo sapiens
cctgaggccagacggaactacaacatgtaccatccacgagaattgtacccgtccctgggggccggctaccgcctggggcccgcccaacctggggccgactccagcttcccacccgccctagcggagggctaccgctaccccgaactggacacccctaaactggattgcttcctctccgggatggaggctgctccccgcaccctggccgcgcacccacctctgccccttctgccccctgccatgggcactgagccggccccatcagctccagaggccctccattccctcccgggggtcagcctgagcctggagaaccgggagctatggaaggagttcagctctgtgggaacagaaatgatcatcaccaaagctgggaggcgcatgttccctgcctgccgagtgtcagtcactggcctggaccccgaggcccgctacttgtttcttctggatgtgattccggtggatggggctcgctaccgctggcagggccggcgctgggagcccagcggcaaggcagagccccgcctgcctgaccgtgtctacattcaccccgactctcctgccactggtgcacattggatgcggcagcctgtgtctttccatcgtgtcaagctcaccaacagcacgctggacccccacggccacctgatcctgcactccatgcacaagtaccaaccccgcatacacctagttcgggcagcccagctctgcagccagcactgggggggcatggcctccttccgcttccccgagaccacattcatctccgtgacagcctaccagaacccacagatcacacaactgaagattgcagccaatccctttgccaaaggcttccgggagaacggcagaaactgtaagagggagcgagacgcccgtgtgaagaggaaactgcggggcccagagccagcagccacagaggcctatgggagcggagacacaccaggtggtccctgcgactccaccctgggtggagacattcgtgaatcagatccagaacaggccccagcccccggggaagccaccgctgccccggcacctctgtgtggtggccccagtgctgaggcctacctcctgcaccctgcggctttccatggggcccccagtcaccttcccaccaggagccccagcttcccggaggctccagactccgggcgctcagccccctactcggctgcatttctggacgctgccgcacgggtcagggggctccgggtacccagcggctccaccggcggtaccctttgccccgcactttctccaagggggccccttccctctaccatacaccgcgcctgggggctatctggatgtgggctccaaacccatgtactgaaccactgctgggcccctctgcctccatcacaaacctcccgctcccttcccccagccctggagccccctcacctccaccggccccatcccccacaccaaatggccgccttgggcctgcccacccaccccctcaacttcacaccttgatttcactcccacccccctctggcttcaaagcctaaccaaggctgctgggagtccagctggggccggcttccccttcccggctctcacctccgtgtgaatggaaggggctctgcctggccaaatggggccacagaccagcatccccacttaccaggcctccccatgggctctggaggggctcaatccccacccccccacacacactggtgcaggccacaccagtctgttgttctgggaccagagtatttttgttaataaaactcaaaagccatccatgctcaggaaacattgggctcctgtgtttggccctgggcgggg

SEQ ID NO: 48422 - DNA, 384 bp, Homo sapiens
gacatgtgatccctaatattggaggttgggccttctgggaggtcatgggggcagattcctcctgaatggcttggtgatgagtgagttcttactctctaagttcatgtgagagctggctgtttaacagagttcggcccccttccctctctcaccatgcgatgcctgctcccacttcaccttcctccatgatggaagaaacttgaacccctcatcagatgcagatgctgcaccatgcttcttgtacagcctgcagaactgtgagccaaataaactgcttttctttataaattacgcagtctcaggtattcctttatagtaacacaaaatggactaacagaggtgccaaagcaattcattggtggaaaggactgacttttaacagac

SEQ ID NO: 48423 - DNA, 390 bp, Homo sapiens
aaaaaagtccaaatttgtacaagttcaactttatacaagtgaagtaagagaatctagaaacacagaaatattaactaaaacttcaggagccttgaaaaacaattttattgaaatacaggactcaaactaaacggaaatagattttgtgttaatattagcaactcagtagacagttatcaagccataagctaaactctccattttattttcttcttaaacttccttttacataatgaggaagtgatatcaatgaacagattacttatacctaccgtttctgcggaaataaaggagttagaatctagatcaggtataatgaacttgacagactttgtaaagttctgtaggcaactgggaatttcggttggactttgagtatggcagatcaaa

SEQ ID NO: 48424 - DNA, 271 bp, Homo sapiens
aaagctgcgagatagtggagaagatgcattccatggtgtttgctgaaaaccaaaattctgttttacagcatgaggttcctgtggcttcttacctactcagagtcatacaacagtttaggcagagaggtagagtctggtctcagatccggcacctatggataatgctgagctagctccctgcttccttgtgtacatagctgttgacctggtgcagtgaagaaggccttgggcagtcaggctttgccaaatctgattctgtgtcataccattt

SEQ ID NO: 48425 - DNA, 353 bp, Homo sapiens
aggctgttactttgtgtgaatcccttcacatgcccgtacctcacattcctcatctataaaatgaagaagttcaaatacatgattataagattatttccggtcctggtattctataactaaccttcctcaaagcagagagaaggggtgtatagtttaattgtattgttcccattcctacatcgattatatcatgtagtggcaaacatttgacctattttgttcctataggtatgtctgaaaattctgacatgaatgctttactcaaacatcacaaaaagtttattccagtaacttggacagtggtcctttctactattaggatcaggtagctattaatcaacaataggcatcct

SEQ ID NO: 48426 - DNA, 689 bp, Homo sapiens
ggacacagctgcactcgcccattctaaaaagtcagcgccctcaggcccgcgggtaaccacctcctcctgagcgtggtgaccagagcttagaggcaaagttaagagactcatcagattctgagctgctgcgggatattttgcagaagactgtgaggcatcctgtgtgtgtgaagcacccgccgtcagtcaagtatgcctggtgctttctctcagaactcatcaaaaagtcctcaggaggctcggtcacactctccaagagcacagccatcatctcccacggtaccacaggcctggtcacatgggatgccgccctctaccttgcagaatgggccatcgagaacccggcagccttcattaacaggactgtcctagagcttggcagtggtgccggcctcacaggccttgccatctgcaagatgtgccgcccccgggcatacatcttcagcgaccctcacagccggatcctcgagcagctccgagggaatgtccttctcaatggcctctcattagaggcagacatcactggcaacttagacagccccagggtgacagtggcccagctgggactgggacgtaggcaatggtccatcagctctctgccttccagccagatgttgtcattgcagcagacgtgctgtattgcccagaagccatcgtgtcgctggtcggggtctgcagaggctggtgcc

SEQ ID NO: 48427 - DNA, 334 bp, Homo sapiens
  misc_feature (280)..(280): n is a, c, g, or t
  misc_feature (297)..(297): n is a, c, g, or t
  misc_feature (328)..(328): n is a, c, g, or t
cccgaggagaacgcggggaccgaactcttgctgcagggttttgagcgccgcttcctggcggtgcgcacactgcgctccttcccctggcagagcttagaggcaaagttaagagactcatcagattctgagctgctgcgggatattttgcagaaggtttttgcttgtctgatgactgatggctccacccagacctgccaaccactcccgcggccccatccagaagtggctcagcgtgcatgaggaccatctccaacatccctgtgattgtacccccaaccanccagcagcaagaacctnttgcctagtcacctcccctctctttccccanctatca

SEQ ID NO: 48428 - DNA, 435 bp, Homo sapiens
aaacctatattataatggacctgaagaccataaggtagaagatcagaagaaaaagaaaatgcatacatttttatctttaaaacaattcacttttaagagtattttcttgaaaggtatacctttgatggagctgaatctagttgcttcaggcagatacaataggatacaataggataggacttcttgggtaaaaaaggtgtagtaatctgtgagactcaccggaaggagaaaggcaattatgcattaatttggctgaggccagggtagtaagcagattcattataaattctgacagcagaggaatacttgagaaatgcttatagttagatcatctatttttccaagcaatattcttcatgtcattccaccttgcaaaaactttgtggaatagaataggcatatgaagagcaatgaatagactttgcattagattgg

SEQ ID NO: 48429 - DNA, 689 bp, Homo sapiens
gctcctttgtgtcattgtatagttgtatgcacaaaaagtgcggaaggaaacatttaagaagttatagcttttattacagttcgagtctttagaatatcacaggagaacagaggagggaagattaatagtgagaatctcgtggttagagttctacatgattctgttcttaggactggagacatggaaatacggaggaatctttcagagctcactgttcgctagtgggagggcagtatttggtggaggcagggcagtcaggtagcacctgggggaaaaggatcttgacttcatgtttaaaacctgtttgacctcttcatccttcccactcacgttcccaccttgcccagttgtcaactgttgtgtatgcaggcagcatcagtttctgcccctcatttctctaagaatcttctaaaattggagattatcttgggtctctgagacaggaccttcttctcatccaccctcatatccctgcacagtctcagaactatggtaatgctgtggtaatctatagccacttgggtctggaggggagaaggagagactaggccatgtactggagcagatccaccttccaagcccccagctaagtgtgggtattacagatgaggtgaaggtgatcttttctcagggtccgggatgagaagctgaaaacctgaattagattataagtacttatggagattaaa

SEQ ID NO: 48430 - DNA, 1115 bp, Homo sapiens
tatgcagagtgctttatatcatctatgttacacttcactgtgacagcagtcctgtgagggagctatgagaggctcaaggtgctgtagttatagtaaggattctactcagatctgtctgggctcagagctttccccttcccataccccaccttactttggagtttatataatatttgagacaatatgtttgtgtgccttatttttttttaagtttcgtaagttctaagaaagcggcatttgttactttttagagagctcttccttgacactcccctaaaggcccaggctggatggggttgccctatcgccacggccgcttcaaagctgtcattgtgggttgccatagttatctgtgcagtgactgtctgacagcagtgttcactgtggaactgcaggctttatcagctcagaatccttatctgtgccaagcctagtgcctaactcatagtaggccctcttaaaaaattgagcaggcatgaatgagtggaaaccatgcttgttaatagcattatgtggcgataagaccatcattccttgacttgctccccaaaagtacaaagtttcaagcagacaaatgaacagatcattcttaaaattgaactaatctgggcaagcaaagagagttcaaagataaaagagggggacgcagtagtgcacaagggaaacattaaagcaaatattttcttttccacagaatcttttagaattcttgagggttacagttccagatatcattgctttaagtgtataaagtgtatttttaaaaagtgaaacccatacccatttaaaaattgaaaaatatgtaatcaagttgtatcagaacaaaaatgtgctttttgtgtaaaaagctaattaaatggagtcatcctatttagtgatttaaaaggatttgattaaaataatatccacttcaactactctcaaagggctgaggagagaggtttggtttccgtgcatcctggatggcctttgtctggtgtgattaaaggtatttcagtgcctgccatgagagaggcccctgccatttctgcagtttcagtgagaccgagaattcctgcagtgtcattccaactgtttgcagggtttagacagctgcgttcaggccacaaatatgg

SEQ ID NO: 48431 - DNA, 911 bp, Homo sapiens
aagattttaaatgtagaaatatttattggtttacaaatccttttaatcacttatacatgaaaagctttcatataattcaaaaagcaaattttaaattccaatgaaatagttcatcccgtggttgtgaaagagtgtttttagattgctgcacagaagcatgtttaacgtggaaatcagctcatggttttagttgttagggctacaagaaattgggggagacttcattccaagaaaacatgtagtctgtcaggctgttttcattcctctaaaagagacagttttctaagatgtttttgaaaatgagaaaatacgtaatagatctgcttaagaagtttcaaacttaatctgtgcttattacatgaatatgctaatgtaaaaccaggccttcagttagtgtttccttccttttagaatggtgtatgtaaagcaaaatataaactaatttctgacctgtcaaaggttttttcttaaaatttaaatttataatgtggtttggtttttctttcccactcaaacatgaatttgggtaataccaaaataaagctggatatataaattttatccaaaatttagaactctgttgttaagaaatctgttgaccacataaccatgtttctgagaaaatacatgattttttgcatctttaaaaaaaattagcactaagaagctaagatgaagttgtttttgtaatttgatttttttttccttaaaatactgttttggagttaaaagttgtagcaaaactggtataagaaagatgttttaagatatatttaagtcttgtctcatactctattgactaagctagcccggtgactagggtagatgtatttaaagaataacttttcccccttaaaatctcaatattccacatcctgttagacttcttgagtattaaatacatcttctat

SEQ ID NO: 48432 - DNA, 874 bp, Homo sapiens
agtaataggaaaccaagaatccagcctggtgatggctggagggagtgattgaagttagctgatgccatggggagttagccaggcagcaaaaatgtctggaaacccgatgtggccaagactgggctgtccagaagctcatcagagatagactcaatcagtactttctctcccaccttcctgaacaagaagaaaaaaatatgagagaattgagtttgtagtgttccctttttctccccccaggctggagtgcagtggcactgtttcagctcactccaggctcagcctcccaggttcaagtgatccttccacctcagccccccgagtggctgggactacaggtgtgcaccaccacgctccactatttttgtagtttttgtagagacaggggtctcactttgttggccaggccggtctcaaacttctgggctgaagcgatctgcttgccttggcctcccaaaatgctgggattacgggcatgagccactgcacctggccgagtttgtaatgatttcattcgatggcgacagagacataaataataacagcagcaacaacaataaacacttgttctctgccaggtgttaagcaaaacacattgtatgccttttctcatttaaacttacaacaaccatataaggaaactactattattattatttccattttacccatgagaaaactgaatgaatctcagagaggagcaaactatgtcaaaagtcacataattggatagtgagattatggtgtttgtactgaaatatgtttaacttcagagctcatgctctgaacacatactatactgctcatttattcatttattcacatatatattgtgcaaccacagtgtgccaggcactgggctgaaacaggagga

SEQ ID NO: 48433 - DNA, 298 bp, Homo sapiens
ttggaacaagaaatttacttctcagtagttttgcaaattaagtgtttaacttcgtctctatagaattaatgcctcggaggtggggagagggaggcagaggagaggctttcaaggccagttcacaagtttgacacttaaagtgatagtagcaagtttttctctaactgcaagagtgtgaagttctgtttccacctaattgcagtttgcatcctgcaagtgtattgatttagacattaaaacaacttaaatgtttagcagtaaaaagttgtttaatcattaaaccactaccattttcttt

SEQ ID NO: 48434 - DNA, 407 bp, Homo sapiens
tcatcagagatgccttccctggccactgtatctagactagcactcccatcccttactctacctgacgtttgtcatcacttgacatttattcacttgcttattaaaaatcattttcttctcccactagaacgtgagagcaaaagctttgattgttgtcattgctctgtctccagtagcaagaacagtatctgacacacgttaggtgctccatagatgtttgttagaggaatgaataaataaatataacagggaattggtctaatcaggaggtttggaaaaacttcactgaggccaggtgcagtggctcacgcctataatcccagcactttgggaggccaaggtgggcagatcgtgaggtcaagagatggagaccatcctggccaatgtggtgaaaccccgtctctact

SEQ ID NO: 48435 - DNA, 300 bp, Homo sapiens
cggggagggaggacccttcctcgcctctccagcttctgggaattgccagcaagcccgtattgcctggcttaaagctgtgtttcactcgcctctgtctctgtcaccacgccacacggcctccttccctagtgtaaggacactagacactggatttagagcccaccctaacacagtatgacctcatttgaactaattccatctacaaagaccctgtttccaaataaggtcacattctgaggtcccagtggacgtgaattttggaaggatgctattcaacccagtacaccttctataggctaa

SEQ ID NO: 48436 - DNA, 365 bp, Homo sapiens
tttatatttcactaggagtaggaggataaaagggatagatagaatagtctcattcaaaagttcctaagaccagctgatgatgagaatcacctgtttattaaaacgaattctcatacccaacctcagacatgattaatgggaatttcttagtggtaatgcctcggatatgtatcttttaaaacaacaagccctcttaggtgagtctgataatcacctgaatttggaaactattcaatcagaattagattaattggattctggacacagctatttttattagttatatgatcttggacaagttactaaaaacctgtatgggtctatattttccattgaccattaattttctgttggtacataatatt

SEQ ID NO: 48437 - DNA, 383 bp, Homo sapiens
tttggttgttaggatataaagaaaaataaaactcatgaaactaaatgagatcaccaaaagacagagtatatagaactaagaatggaacccttaaatattccaatattagaaagttagaagaggataaagctacaacgatgctcaagaaggcggcggcagagaggtgctatctattgcaagaaaacctgtcaactcaatgaaagtgtttcaaaaaagaaaagctgcattaaacatgtgccgattttaaaaacacatcttaatttaagaaacattaaaatagaaaaaaaatttacatatctcaattgatgtaattcactaatgtctacccaaaaggagagctaaacatattaaaacagaacagagaatgtataaaacaaatgaat

SEQ ID NO: 48438 - DNA, 378 bp, Homo sapiens
gcttcggggagaaagtggatggaagaggctccacgctggcttagtcacactgatgtatgaataaacgggcaagtaatggatgacctggggttcatgccagccaactcacctgcacacctgctttcacaagcacttgacaaggcacctacctttcttaatgtgccaagtacataatctctctgattctgtaaaaagattagctgttaggaagattacaaaactttgggtacaaaaataagagtatttttagaattttgttctccatgtgttaattttatcttcagtgggttttgtttgttttgctacctctgccccacatcataatttatgtgtgtgtttgtgtgtgtgtgctgaatagatgatctctaagtaggaaaa

SEQ ID NO: 48439 - DNA, 852 bp, Homo sapiens
ctagaaagtctattttgtctaatttaagcataactaccattgaactcctttggctattatttgcatggaatatcattttctatcctttcacttttagcctatgctcttaattcataattgagtctcttgtaagcagcatattacgaggtttaaaagtttcatttatccactctgtctgctttagtctcttttggctgttataacagaatatcacagactggtaattaataaagaacagaattttatttgactcatgattctggaggctgggaaggtaaaagaacgttactggtatctgttgaaggtctagttgctggataataacatggccaaagatgtgagggagagacagcttttttttttttaatatataacagatccattcttagtgcttatagcttaattaatttttaaaggttccacctcttaattctttcacattggccattttatcctaaattttggagatgacattcagtctacagaagtatctgtttagtagataatttaatctttttatttgtaaggtagtgataggtaagcagttactattgtacatttgtagttttctgtccattttaagtttgcttcttttttttctggttctgtctttcctgtgggtattgttcatttttgttgagacaaagttatgctttcttgctcagactgaagttcagtggcatatcacagctcactgtagcctcaatctcctgggctcaagcaatcctccccccttagccacccaagtagcttggactacttggacacgtaccacaacacccaaggagcttatgattcttccaccttggcctccaaaagtgttggaattataagcaggagccactgtatcca

SEQ ID NO: 48440 - DNA, 436 bp, Homo sapiens
tttttttttttaacctatgaacccaggacactagagccactttagtctaattttctgctctttaattattttaacactccagaggaggactggttttctcctgtgtttttttaatatatggcaagtggaacctctaatcgaccaccctgtttttcagcctaactcaggcttgtggtaaaattatcagttcccactttctttgctgcattctcaaatgcaacacaggagaacagctttcccttgcaaattcacaatgctgttaactatttgtcctttattatacatttcattaaagttttctattattggatttctttctacttctccctacagttctgcccatatttgctttttatatttagaagcctcccttttgggtgcataaatatatatagctatattcacttgacaaattaacctctattattattgtatg

SEQ ID NO: 48441 - DNA, 600 bp, Homo sapiens
tctgcccatatttgctttttatatttagaagcctcccttttgggtgcataaatatatatagctatattcacttgacaaattaacctctattattattgtatggtaaactcatttcatgcttgtgagagacattgctagaaagtctattttgtctaatttaagcataactaccattgaactcctttggctattatttgcatggaatatcattttctatcctttcacttttagcctatgctcttaattcataattgagtctcttgtaagcagcatattacgaggtttaaaagtttcatttatccactctgtctgctttagtctcttttggctgttataacagaatatcacagactggtaattaataaagaacagaattttatttgactcatgattctggaggctgggaaggtaaaagaacgttactggtatctgttgaaggtctagttgctggataataacatggccaaagatgtgagggagagacagcttttttttttttaatatataacagatccattcttgttaaaattagcccattcccataataagaacattaatccattcatgagggcagagtgcttatagcttaattaattttta

SEQ ID NO: 48442 - DNA, 570 bp, Homo sapiens
atttatacttgtttcctaagctttcctgcatttgccaccttaagcagagtcaagttcagttctcctggtgccctccaggtatcttaggctggattcccctctgacaaccacattgtggtttccataacaagcagctctgactagttctgtatccccaggcactagcatggtccccagtggctggcagcttaaactatgtgtgggtggtttctgggccagagtacctagaaggcttgggccttaaccctgtagcactcagttgcctttggtagactactcattctggtcttcaaccaccagttggctggagcacctcagcatttgcgttgagtttagcaggttaggactagccagagtgttaaactgcaagaaaaggaagcttaagcacacagtttagaagataaagggttatacgcaaaaatccaacatactccactttagagggccagactgtaacttgccaggtttcttgcccatggtcgtaacgctagcagggaaagcagaaccaaaatcagaacatggataacttgccttggcaacacagtgagaccccttctctaccaaaaaaaa

SEQ ID NO: 48443 - DNA, 339 bp, Homo sapiens
caagacctgaattgtctgaaatgacattcagcacctgaactctttgacactttggcacctccataaatctagaaatttctctgagttgtggtgcataggaaaccttgagggacaacccaggagtaactgtgagaaaaagggtgtcccagggagtaaatagatctcacagctcagaactgtagggacaggatgtcattttgcaccacagcaagtaggggaaagcagctctcaagcctaactgtgaaacgcccccacaaaccacctcctcctcccactccctcactgctgcctgccatggctacctctaacgcagcaaagcaaaactacaaaacatctctc

SEQ ID NO: 48444 - DNA, 863 bp, Homo sapiens
agaagaaagatgttacctgttctttcctggactgtggctatcagggtgccccaccacgatcactaatacatgtaccctgtttccatttagctgggcttgggccagagtccttccgttgtcacacgtcatatgaggctgtctgctgaggaattgtcttctgcttcatcgttagcatgttgaaatattgctttccaaagcatattctactttatcatttgtatttatgtaaaataatggaatggttattctaaccgtgcagtttcctatccttggttatttaattgcggaaagataacagtgggttttattttgctaaaatctgctaggaattgtgcaaaatctttgtgaaatgcccaatttcctagcttaagttatagatgtttgtatataagagaaaaagcctattgctaaaagcagcaatgtctttatcgatgcaaaaagctttaaacttactggccgtgtagtcagtaaaatgcatcagaacgtggcaaaaattgagaaaagcattgaagttttaaaatctgctatgcagttttcttcaactcccttgcaagatacttaatttgagtagaagacagaataaagtgttcccgttgaggaaagtgacagggaggaccgttcagaacgtgtttggaatctgagcagtcctgtcacgctctagtctgtgatgtggtggtgtgtccatggtaccactttatagaacttgaagaatgctgcttctgtgaataaaatacattttattcttggcatttcatttgtgagttttgagatgtgtaaaacgtgttaatggtttctttctcttacacaattacttgttctttttttttaagtacctacaagactctgaagcacataatcactta

SEQ ID NO: 48445 - DNA, 537 bp, Homo sapiens
  misc_feature (2)..(2): n is a, c, g, or t
  misc_feature (6)..(6): n is a, c, g, or t
  misc_feature (8)..(8): n is a, c, g, or t
  misc_feature (10)..(11): n is a, c, g, or t
  misc_feature (13)..(13): n is a, c, g, or t
  misc_feature (22)..(22): n is a, c, g, or t
  misc_feature (120)..(120): n is a, c, g, or t
  misc_feature (440)..(440): n is a, c, g, or t
  misc_feature (465)..(465): n is a, c, g, or t
  misc_feature (467)..(467): n is a, c, g, or t
  misc_feature (519)..(519): n is a, c, g, or t
  misc_feature (530)..(530): n is a, c, g, or t
  misc_feature (537)..(537): n is a, c, g, or t
gntctnantnnanatttcctgnaaaatagattaaaacttacaaagtgatacaagatttgtgctttcagccagaaattgtcttttaattggccagtacaaagacaagagaagctaaggganatggaataccatttgtgtcatttccatcacaccatttcttattctcagcacttactgagtgtgtaactgctgagagatttgccaggtgttcactcacagattgatagctccatgtataattccaaatgatagagatggagtgttgtgtcctctgatagcagaagcagcagccactgccttccccacaaacctgtcacaaagaaatcagtggggattggattttgccctgacctggataaaaggacacttcatcacagcaacagcctgctgggagaggagggaatagaccctgctcttgctgctgcagatgcctgcaaagnatctttacttggaggggtcttggancncctttctccgcagctacaccaagtgccaggtatatgtgcacatatacagtanccacctgcttncactgtn

SEQ ID NO: 48446 - DNA, 1295 bp, Homo sapiens
aaggctcaaggcagctgccttgctctcaatgcacggactaaggtttaaggacctcatttcaacgctcaaaaacaaaccccaagcacagggcaggccagctgagccccgcggtctgctgtgagctgccggcctcctctcctgagtcctgcccgtgccatggctccccgctaatccaccaggcagcgcctcgccctcctcctgtccctcgcgctgcctgagcctccagccaactcatcccaaggccaaggtaacctgagcagagatagcacggcacatctttaattgtgggggggatggagagataagagtgatgatcgcatgtgtttacaatacacagagacgcccagtgctggcaagactataataaagcgagcgtactcacaccactgcggctggcaccaaaaaccgggattgcagtggaaatgtttttggaaagcagtttggcaactgtcaacaaagcgactacagaacagttgtcaatgagacacagaaatacgaaggagaggagggagggcagaaacccagttaacaatgtaagcgggcacggagggaagatcagcgtgcaaagctaggtcggcaagacgtgcaaggtgcacccacagccataacaatccctccccagaccccaacgtgtcctcacggtggtggcagtggccccccgcactacagaagaacaatgcgaggcgagctcaggcgcgctgatggtggtttccgatacaactccccactcaaagaaccccggagagctcttgattccatctctcagtagggtcctgaagtccatgctgtctgaagacacagggtctccccctgcgtctgtgccaggacagagggactgccaccagccaagctgcaatccttttaaacgctaaaaacggccgggcttggtggctcatgcctgtagtcccagcagtttgggtggatgaggcgggtggatcccctgtggtcgggagttcaagatcagcctgaccaacacgaataaaccccttctctactaaaaatacaaaattaggccgggcacagtggctcaggcctgtaatcccagcactttgggaggcagaggcgggaggatcacctgaggtcaggagttcgagaccagcctgaccacatggagaaatcccgtctctactaaaaatacaaaaaaactagccgggcttgttggcgcatgcctgtaatgccagctacttgggaggctgaggcaggagaatcgcttcaacctgcaaggcagaggttgcagtgagctgatagcatgccattgcactccagcctaggcaacaagagtgaaatttcgtctc

SEQ ID NO: 48447 - DNA, 486 bp, Homo sapiens
ctgagatagaaatctaagatgagctgtcctggcagcaggaaagagagcgtcaggctgggaagcaggtgccacctgcttggaccccagaattcacccggctcaggcctctgctgcaggaaggatccctcgcctcccacataactctcgtctctgccaccttctctctgggccggtgcaagtcgctgggttgccaggcctggcttcagacagggtcgggtggaccaggtggggtttgcgccatcagatcatcttaggtgtcttacccattacaaagaagtgggaaagagatagcacctgtcgatgatagagctgcctgcagccctcagaccagccctgtccctcacctggggtgcagtcctgctacttagagcagtactgcctttgattcccttcacagctttccccctttcttcctttgtccttcttccctctggttttctcttccccttcttctcttcttccccttctccctctctctcatcatta

SEQ ID NO: 48448 - DNA, 610 bp, Homo sapiens
tttcctgccaagtgtaatcttaggaccacatctgaaatctgtgttatgtatgggtttagttattttatttgttatttcccaataatgatagcctttgcaaaaaccatccatcagaaagaggacataccttaaccatggagcccttggtactttcctcttcataccacagtatggcttgtgattccaaggaaaaagttgtgtaataaccttacaagcagcttcagttccttcctggtaaacctgtggtccgtggaacatgtgttttgatccagcagttcctctgccacctggaatcttgagataagtgtgtgggtcagtgtgcatgtgtgcccatacatgcttatgaggaggtcagtgtgtgaggggaatcaggaagtctcttttttatttttaaatgaaatcaagtaaaacttaaccttggcttcaaaaatatctctcaaatactgtaaacaatacctttgatactttttagaaagagattatggccaggcgtagtggctcacgtctgtaatcccagaactttgggaggccgaggtgggcagaccacctgaactcaggaatttgagaccatcctgggcaacatggtgaaacccatctctactaaatacca

SEQ ID NO: 48449 - DNA, 417 bp, Homo sapiens
caaaaaaaactaaaatatatgccactggcttgaaggccaggcagcaaggaaacttctcagaggctagaaggatggcaatccttaacaagcagtacaaaatatttggtaaaagtcagttataataacttgaaaagcagataatgtatttaataaacctacagctctagaggaagaggttaaaaaaactggacatttcctaacaggtataggaaaaaatgctcatcatgactaaccatcaggaaaatgcaaatcgacaccacaataaaatttcacctcactcaagtgagaacgtctattagaaagacaaaaagtaacaaatgctggtgaggatgcagagaaaaaaagaactctcacacactgtcagtgggaacgtaaatcagtacagccattacagaaaacagcatggagagggtcctc

SEQ ID NO: 48450 - DNA, 795 bp, Homo sapiens
  misc_feature (451)..(451): n is a, c, g, or t
ctcctgacctcgagtgatctgcccactttggcctcccaaaatgctgggattacaggcatgagccaccacacctggccatattgtgatatagctaacatagaatagaactcactttaagtgtacagcttgatgagttttaacatatatatacacacactgtagtcatgtaaccactgccccatcaagatacagaacatttcatcacccctagaacttcccttgtgacttttagctgtcaattacttctctctaccccccacattccccactcctgttcctaacaagcactgatctgcttttgcactaaagtcttgcctttcttaaagtttcctatagatgcagtcatacagatgtagtatcttgtgtctcacttcttttgctcaacacaatgtttttgaaattcatccatattccccgtccgggagggaggtgggggggggtcagcccctgncccggccagccgccccgtccgggaggtgaggggcacctctgcccggccgcccctactgggaagtgaggagcccctctgcccggccaccaccccgtctgggaggtgtacccaacagctcattgagaacaggccaggatgacaatggcggctttgtggaatagaaaggcgggaaaggtggggaaaagattgagaaatcggatggttgccgtgtctgtgtagaaagaagtagacatgggagacttttcattttgttctgcactaagaaaaattcctcttgccttgggatcctgttgatctgtgaccttacccccaaccctgtgctctctgaaacatgtgctgtgtcc

SEQ ID NO: 48451 - DNA, 370 bp, Homo sapiens
tgactacaatatttaaactgctctgcccaaaaatacaacagcaagaaaggaagcttcatctactaatcatttgcatacctctataaatacttctgattcttactagcatacagacatcaatttcacctaacttttgagaagtgtatacatattctttttggtgctattttggatcccatcctttttattaagtgtagcttcagatgttctctaccgatgtaattcatgcatttgtcttttgatgcttgccatcttgtgttaatgtgtgggagcttgccattccaccttccaatttgaggtcatagggctgggtgatgaacattacagagctataaatatttctggtttttgttttgttttgacaaatgac

SEQ ID NO: 48452 - DNA, 358 bp, Homo sapiens
tgtaatttattgtggttttgggcaaaaagacttagaaataataaaactctgatatcttagtttacaaatatttaaattttcacattaaagagccttaaaagtttatttgaagcacgtaacagtatttttctttaccctgatctgtgaccaaccctatacattcttattcctagaaggaagactcttataggcactatcacagtgatatagagattcatgatgcagactgtaccgaaccaccttacagtatgctgtttgttcattagacacttgtcagcagaaatggttgaagaaacattataaaacacacatgggtcctttcaacaaatgatgtcagttcaacatctacatgaaaaaa

SEQ ID NO: 48453 - DNA, 409 bp, Homo sapiens
gctactcgggaggctaaggcaggagaatcgcttgaacccgggagatggaggtttcagtgagctgagatcgtgccactgcactccagcctgagcaacagagagagactctgtttcaaaaaaaaaaaaatattttttaagctatctcctacaggaagaatattttctgtttgtggatttgcctattctagatatctaatatacatggcattatatatgtggctttgtgactggctttcttgtagcataatgtttcaaggtccgtccatgttgtagcatgtatcagcacttcgttcctgaatagtatttcattgtatggataccacattttatctgttcattagttgatgggcatttgggttatttttatcttttggctattgtgaataatgccactatggatagcccactt

SEQ ID NO: 48454 - DNA, 258 bp, Homo sapiens
aggggaggagaatgaactttggtgcacagcaagcagtctctgccacagggaatgacacgatcctttgatcatagcaaacaagtccatttcatctcctaaaggtaataaataattggactacattacaaagcagtaactctggctgggcgcgttagctcacgcatgtggtcccagcattttgggaggccgaggcgggcagatcacttgaggccaggagttcaagaccagcccagccaacgtggtaaaaccccatctcta

SEQ ID NO: 48455 - DNA, 680 bp, Homo sapiens
aaaagaataaagtgaattggtgttggagagagcattaaaaagagagagagaaagagaagagccaataaaaacatgtggtttctaaatgtagatccactaatttctctttgtggcagtcatttggtctatattgtttgaatgcactaggagacattgtacatattaatgaaattaggtttgttaagcttgtttgctagagatgtaagccctagtaaaaaaacttcaactttgagatctgacagtctcaggtctgccacttactagctgtgtgatcttgaacaaggaattttgcctcttttgagcatcagttttctcttctgtaagacgagagaaataatacctagcctagtgtggttgttatgaaaattatatgagatgatgtatttatgcatcctacaaagtctctgacacatagtagttgatgaatcactcttagttctattttcaagtaagtaaagctgctgatctcatagcccatatttttataaaaatgtactttcctccttggtaattgtgattctgctgtcttctgtctacttcttgggactctggtgccgagaacctttctgaccccttcctgcctgccccatggtacgctcagagagtagagacttcgcctattttgtccactgctctagactcactaccaggtgctcaataagtatttgaggtgtatatgt

SEQ ID NO: 48456 - DNA, 313 bp, Homo sapiens
atcaaggcaccagcagacacagtatctggggagggcctgcttcctggttcactggcggctggccatctcctgaagtggtgaaggactctctggagtcccctttgtaaaggctctaattccattcgtgaaggctgtaccctcatgacctaatcacacaccaaatgcctcacctccaaatagcatcaccttggcgatcaggtttcaacataggaatttaaggaggtcagaaacattcagttgttagcagcatcatactgaaatctatagctcagggcagcacccagatggaggtgggaaagccttaaattcttag

SEQ ID NO: 48457 - DNA, 458 bp, Homo sapiens
cctcacaaacaactgtggtaacaatacaaggtggtgattatcacctgcttggagactgagggaccccagaattggtcaggccctagggttcaaagcccagctcccatctggagccaaaatcactcccctttcccaatgaggaaagatcaagcgtgaggcctccgtaccttctccccatctgtagaaacgatcagcttttatgatcatgtccacccaggctgacatggttgctgcggacggccactgccagggcggtttttccctgctgcaattaagaggcaagaagagaagccagagtttctacaggaggggtacacaagggtttctagcactgaggacaaaccctcctgcccacaggaagtgctttccagcagtctacgctgagagcagaaaggttttctggttttctgggcatgaaggggatatggaaaagtcacaaatagaataaagcaatagca

SEQ ID NO: 48458 - DNA, 385 bp, Homo sapiens
gagagtgatagaggtgaccaaataaattagtgaaacaaagaattgttgaataaataggactagtaaattaattatttgaaaaggtaaaagaaagtaaattaaaacaataaaataagtcataaacatatttgcttaaattataaatgtcatacgatacttaaggtcaagtagcaaggtcctcataaaaataactgataagtggaacctaaataaaattgtcaaaaaattagactcataatcataaaaagtaaaataagaattatagtaataacaatagcacctatcatttgctgaaattctacattctctcaaaaaacctgctaagtgaattatttataatagcacacgtaaccatctattaatcacattactctgtaaacttcaa

SEQ ID NO: 48459 - DNA, 322 bp, Homo sapiens
tgggaagctaaagagctcagctcaaaaccttctaaggggagaaccaagggatctcccaaagcatttacaggctgaggagaaagagaccatgggcttccaatcaaaagaccatgctcaaagggaaggtccaactagggactgagttttagtaaaataacaggccagccctgacccagatcaatccctcatgaaaccaaggtccttcacccctcactccatatgcctaaccaagggcaaagagagcttttgctttgatgaaaaacacgacaatccagaggttttacagtcctttatgcacaagtccagcaaacactcacaattt

SEQ ID NO: 48460 - DNA, 492 bp, Homo sapiens
ttttggtttttgagtgtgtcctttttagctttgaaccagttttgagtttctggggaaaacttgggaaataggaattcttggactttacactgaactcacttagtttcaaaaagatctcaggcagcctaggctaacctgattgtcttgagcagattgggagactccaagtccccagacaaaacctgctgttatttggaccttttctcacccccagaaactgaggtgattcccaggacaggtgtttattcctctgaccaggagatctaggtggtctgctagtaccttcaaggtcctctgcagtattttctgtgatttgggggctacagtgagctccctgaaacattctgcaaacatttgagtgttgcaaaaccccacagggacctgaaatgttgtcctttacccattaatttacagcaatactacatgtagaaagaattggggcccatttttttgtttgtttgtttgtttgtttgttttgagacggagtcttgc

SEQ ID NO: 48461 - DNA, 2424 bp, Homo sapiens
  misc_feature (4)..(4): n is a, c, g, or t
  misc_feature (9)..(9): n is a, c, g, or t
  misc_feature (11)..(11): n is a, c, g, or t
ctcncagcngncagagagaggaggttgtctgggacagactgctcctgacagaaggtcaaccccacagaggagggcatgagagttctgactcagctggtggccacctacccccagggctttaaggtctggatgggacccatctcccccctcctcagtttgtgccaccccgacatcatccggtctgtcatcaacgcctcagctgccattgcaccaaaggacaagttcttctacagcttcctggagccctggctgggggatgggctcctgctgagtgctggtgacaagtggagccgccaccgtcggatgctgacgcctgccttccatttcaacatcctgaagccctatatgaagattttcaatgagagtgtgaacatcatgcacgccaagtggcagctcctggcctcagagggtagtgcctgtttggatatgtttgagcacatcagcctcatgaccttggacagtctacagaaatgtgtcttcagctttgacagccattgtcaggagaaacccagtgaatatattgccgccatcttggagctcagtgcccttgtatcaaaaagacaccatgagatcctcctgcatattgacttcctgtattatctcacccctgatgggcagcgtttccgcagggcctgccgcctggtgcacgacttcacagatgccgtcatccaggagcggcgccgcactctccctagccagggtgttgatgacttcctccaagccaaggccaaatccaagactttggacttcattgatgtactcctgctgagcaaggatgaagacgggaagaagttatctgatgaggacataagagcagaagctgacacctttatgtttgagggtgagggccccagtgtggggctagagaggggaccgggatctctcccttccaggaacagggtgggtagacccccacaaccttcccatcccccttcccccatcctccctgaggccctcaatgcatgggtgctgtctaccttcgggtgctgaagcagcccagagacccaagcctgccttgctgccccccaggccatgacaccacggccagtggtctctcctgggtcctgtaccaccttgcaaagcacccagaataccaggagcgctgccggcaggaggtgcaagaacttctgaaggaccgtgagcctaaagagattgaatgggacgacctggcccatttgcccttcctgaccatgtgcatgaaggagagcctgcggctgcatcccccagtcccggtcatctcccgccatgtcacccaggacattgtgctcccagacggccgggtcatccccaaaggcattatctgcctcatcagtgttttcggaacccatcacaacccagctgtgtggccggaccctgaggtctacgacccctttcgctttgacccagagaacatcaaggagaggtcacctctggcttttattcccttctcggcagggcccaggaactgcatcgggcagacgttcgcgatggcggagatgaaggtggtcctggcgctcacgctgctgcgcttccgcgtcctgcctgaccacaccgagccccgcaggaagccggagctggtcctgcgcgcagagggcggactttggctgcgggtggagcccctgagctgagttctgcagagacccactctgaccccactaaaatgacccctgattcatcaaaagtgaagcctagaattaccctaagaccctgttccacagtcctgtattccatcctagatatctactcaaaataattgagacaagtgttcaaacagaaagacgcttgtgcgtgaatgttcatggcggccctattcacagtagccaaacgatgaaaacaaccccaagctatatattaccagatgaaaggataaacaaaatgtggtccatccatacaatggagtattacacagccataaaaaggaatgaagcagtgatccctactacactgtggatgaaccttgaatgcatgatactgaatgaaagacgtcagatgcaaaaggtcacatagtgtactgtccttttatacgaaatttccagaacaggccaatctgaagagatgcatagcggattggtggctttcagcagctgtggggaggtgggactgaggagcgactgctaatcagtatggggtttcctcccgggatggtgaaaatgttccggacctagatagtgacgaaggtagcacgacactgtgagtgcactaaatgctattgaattggacactttgaaatggtgaatttcgtggtatgtgaattctacctcaatcaaaaaaatttgctattttatctcacatacattttttttctgtccaggttgttcatataataatatgctgtgagcatctttccatgacattaaatcatcttaggaaacattattttgtggtcctcaaaatgtgtgtgttaagtgttcaaatcagtcttaatttaaaaaaagacatcatatt

SEQ ID NO: 48462 - DNA, 2225 bp, Homo sapiens
  misc_feature (4)..(4): n is a, c, g, or t
  misc_feature (9)..(9): n is a, c, g, or t
  misc_feature (11)..(11): n is a, c, g, or t
ctcncagcngncagagagaggaggttgtctgggacagactgctcctgacagaaggtcaaccccacagaggagggcatgagagttctgactcagctggtggccacctacccccagggctttaaggtctggatgggacccatctcccccctcctcagtttgtgccaccccgacatcatccggtctgtcatcaacgcctcagctgccattgcaccaaaggacaagttcttctacagcttcctggagccctggctgggggatgggctcctgctgagtgctggtgacaagtggagccgccaccgtcggatgctgacgcctgccttccatttcaacatcctgaagccctatatgaagattttcaatgagagtgtgaacatcatgcacgccaagtggcagctcctggcctcagagggtagtgcctgtttggatatgtttgagcacatcagcctcatgaccttggacagtctacagaaatgtgtcttcagctttgacagccattgtcaggagaaacccagtgaatatattgccgccatcttggagctcagtgcccttgtatcaaaaagacaccatgagatcctcctgcatattgacttcctgtattatctcacccctgatgggcagcgtttccgcagggcctgccgcctggtgcacgacttcacagatgccgtcatccaggagcggcgccgcactctccctagccagggtgttgatgacttcctccaagccaaggccaaatccaagactttggacttcattgatgtactcctgctgagcaaggatgaagacgggaagaagttatctgatgaggacataagagcagaagctgacacctttatgtttgagggtgagggccccagtgtggggctagagaggggaccgggatctctcccttccaggaacagggtgggtagacccccacaaccttcccatcccccttcccccatcctccctgaggccctcaatgcatgggtgctgtctaccttcgggtgctgaagcagcccagagacccaagcctgccttgctgccccccaggccatgacaccacggccagtggtctctcctgggtcctgtaccaccttgcaaagcacccagaataccaggagcgctgccggcaggaggtgcaagaacttctgaaggaccgtgagcctaaagagattgaatggtctacgacccctttcgctttgacccagagaacatcaaggagaggtcacctctggcttttattcccttctcggcagggcccaggaactgcatcgggcagacgttcgcgatggcggagatgaaggtggtcctggcgctcacgctgctgcgcttccgcgtcctgcctgaccacaccgagccccgcaggaagccggagctggtcctgcgcgcagagggcggactttggctgcgggtggagcccctgagctgagttctgcagagacccactctgaccccactaaaatgacccctgattcatcaaaagtgaagcctagaattaccctaagaccctgttccacagtcctgtattccatcctagatatctactcaaaataattgagacaagtgttcaaacagaaagacgcttgtgcgtgaatgttcatggcggccctattcacagtagccaaacgatgaaaacaaccccaagctatatattaccagatgaaaggataaacaaaatgtggtccatccatacaatggagtattacacagccataaaaaggaatgaagcagtgatccctactacactgtggatgaaccttgaatgcatgatactgaatgaaagacgtcagatgcaaaaggtcacatagtgtactgtccttttatacgaaatttccagaacaggccaatctgaagagatgcatagcggattggtggctttcagcagctgtggggaggtgggactgaggagcgactgctaatcagtatggggtttcctcccgggatggtgaaaatgttccggacctagatagtgacgaaggtagcacgacactgtgagtgcactaaatgctattgaattggacactttgaaatggtgaatttcgtggtatgtgaattctacctcaatcaaaaaaatttgctattttatctcacatacattttttttctgtccaggttgttcatataataatatgctgtgagcatctttccatgacattaaatcatcttaggaaacattattttgtggtcctcaaaatgtgtgtgttaagtgttcaaatcagtcttaatttaaaaaaagacatcatatt

SEQ ID NO: 48463 - DNA, 2367 bp, Homo sapiens
  misc_feature (4)..(4): n is a, c, g, or t
  misc_feature (9)..(9): n is a, c, g, or t
  misc_feature (11)..(11): n is a, c, g, or t
ctcncagcngncagagagaggaggttgtctgggacagactgctcctgacagaaggtcaaccccacagaggagggcatgagagttctgactcagctggtggccacctacccccagggctttaaggtctggatgggacccatctcccccctcctcagtttgtgccaccccgacatcatccggtctgtcatcaacgcctcagctgccattgcaccaaaggacaagttcttctacagcttcctggagccctggctgggggatgggctcctgctgagtgctggtgacaagtggagccgccaccgtcggatgctgacgcctgccttccatttcaacatcctgaagccctatatgaagattttcaatgagagtgtgaacatcatgcacgccaagtggcagctcctggcctcagagggtagtgcctgtttggatatgtttgagcacatcagcctcatgaccttggacagtctacagaaatgtgtcttcagctttgacagccattgtcaggagaaacccagtgaatatattgccgccatcttggagctcagtgcccttgtatcaaaaagacaccatgagatcctcctgcatattgacttcctgtattatctcacccctgatgggcagcgtttccgcagggcctgccgcctggtgcacgacttcacagatgccgtcatccaggagcggcgccgcactctccctagccagggtgttgatgacttcctccaagccaaggccaaatccaagactttggacttcattgatgtactcctgctgagcaaggatgaagacgggaagaagttatctgatgaggacataagagcagaagctgacacctttatgtttgagggtgagggccccagtgtggggctagagaggggaccgggatctctcccttccaggaacagggtgggtagacccccacaaccttcccatcccccttcccccatcctccctgaggccctcaatgcatgggtgctgtctaccttcgggtgctgaagcagcccagagacccaagcctgccttgctgccccccaggccatgacaccacggccagtggtctctcctgggtcctgtaccaccttgcaaagcacccagaataccaggagcgctgccggcaggaggtgcaagaacttctgaaggaccgtgagcctaaagagattgaatgggacgacctggcccatttgcccttcctgaccatgtgcatgaaggagagcctgcggctgcatcccccagtcccggtcatctcccgccatgtcacccaggacattgtgctcccagacggccgggtcatccccaaaggcattatctgcctcatcagtgttttcggaacccatcacaacccagctgtgtggccggaccctgagtcagagttcccacctccctcccctaggaactgcatcgggcagacgttcgcgatggcggagatgaaggtggtcctggcgctcacgctgctgcgcttccgcgtcctgcctgaccacaccgagccccgcaggaagccggagctggtcctgcgcgcagagggcggactttggctgcgggtggagcccctgagctgagttctgcagagacccactctgaccccactaaaatgacccctgattcatcaaaagtgaagcctagaattaccctaagaccctgttccacagtcctgtattccatcctagatatctactcaaaataattgagacaagtgttcaaacagaaagacgcttgtgcgtgaatgttcatggcggccctattcacagtagccaaacgatgaaaacaaccccaagctatatattaccagatgaaaggataaacaaaatgtggtccatccatacaatggagtattacacagccataaaaaggaatgaagcagtgatccctactacactgtggatgaaccttgaatgcatgatactgaatgaaagacgtcagatgcaaaaggtcacatagtgtactgtccttttatacgaaatttccagaacaggccaatctgaagagatgcatagcggattggtggctttcagcagctgtggggaggtgggactgaggagcgactgctaatcagtatggggtttcctcccgggatggtgaaaatgttccggacctagatagtgacgaaggtagcacgacactgtgagtgcactaaatgctattgaattggacactttgaaatggtgaatttcgtggtatgtgaattctacctcaatcaaaaaaatttgctattttatctcacatacattttttttctgtccaggttgttcatataataatatgctgtgagcatctttccatgacattaaatcatcttaggaaacattattttgtggtcctcaaaatgtgtgtgttaagtgttcaaatcagtcttaatttaaaaaaagacatcatatt

SEQ ID NO: 48464 - DNA, 2435 bp, Homo sapiens
  misc_feature (4)..(4): n is a, c, g, or t
  misc_feature (9)..(9): n is a, c, g, or t
  misc_feature (11)..(11): n is a, c, g, or t
ctcncagcngncagagagaggaggttgtctgggacagactgctcctgacagaaggatgtcccagctgagcctgtcctggctgggcctctggccagtggcagcatccccttggctgctcctcctgctggtcggggcctcctggctcctggcccatgtcctggcctggacctacgccttctatgacaactgccgccgccttcggtgtttcccacaacccccaagacggaactggttttggggacaccagggcatggtcaaccccacagaggagggcatgagagttctgactcagctggtggccacctacccccagggctttaaggtctggatgggacccatctcccccctcctcagtttgtgccaccccgacatcatccggtctgtcatcaacgcctcagctgccattgcaccaaaggacaagttcttctacagcttcctggagccctggctgggggatgggctcctgctgagtgctggtgacaagtggagccgccaccgtcggatgctgacgcctgccttccatttcaacatcctgaagccctatatgaagattttcaatgagagtgtgaacatcatgcacgccaagtggcagctcctggcctcagagggtagtgcctgtttggatatgtttgagcacatcagcctcatgaccttggacagtctacagaaatgtgtcttcagctttgacagccattgtcaggagaaacccagtgaatatattgccgccatcttggagctcagtgcccttgtatcaaaaagacaccatgagatcctcctgcatattgacttcctgtattatctcacccctgatgggcagcgtttccgcagggcctgccgcctggtgcacgacttcacagatgccgtcatccaggagcggcgccgcactctccctagccagggtgttgatgacttcctccaagccaaggccaaatccaagactttggacttcattgatgtactcctgctgagcaaggatgaagacgggaagaagttatctgatgaggacataagagcagaagctgacacctttatgtttgagggccatgacaccacggccagtggtctctcctgggtcctgtaccaccttgcaaagcacccagaataccaggagcgctgccggcaggaggtgcaagaacttctgaaggaccgtgagcctaaagagattgaatgggacgacctggcccatttgcccttcctgaccatgtgcatgaaggagagcctgcggctgcatcccccagtcccggtcatctcccgccatgtcacccaggacattgtgctcccagacggccgggtcatccccaaaggcattatctgcctcatcagtgttttcggaacccatcacaacccagctgtgtggccggaccctgaggtctacgacccctttcgctttgacccagagaacatcaaggagaggtcacctctggcttttattcccttctcggcagggcccaggaactgcatcgggcagacgttcgcgatggcggagatgaaggtggtcctggcgctcacgctgctgcgcttccgcgtcctgcctgaccacaccgagccccgcaggaagccggagctggtcctgcgcgcagagggcggactttggctgcgggtggagcccctgagctgagttctgcagagacccactctgaccccactaaaatgacccctgattcatcaaaagtgaagcctagaattaccctaagaccctgttccacagtcctgtattccatcctagatatctactcaaaataattgagacaagtgttcaaacagaaagacgcttgtgcgtgaatgttcatggcggccctattcacagtagccaaacgatgaaaacaaccccaagctatatattaccagatgaaaggataaacaaaatgtggtccatccatacaatggagtattacacagccataaaaaggaatgaagcagtgatccctactacactgtggatgaaccttgaatgcatgatactgaatgaaagacgtcagatgcaaaaggtcacatagtgtactgtccttttatacgaaatttccagaacaggccaatctgaagagatgcatagcggattggtggctttcagcagctgtggggaggtgggactgaggagcgactgctaatcagtatggggtttcctcccgggatggtgaaaatgttccggacctagatagtgacgaaggtagcacgacactgtgagtgcactaaatgctattgaattggacactttgaaatggtgaatttcgtggtatgtgaattctacctcaatcaaaaaaatttgctattttatctcacatacattttttttctgtccaggttgttcatataataatatgctgtgagcatctttccatgacattaaatcatcttaggaaacattattttgtggtcctcaaaatgtgtgtgttaagtgttcaaatcagtcttaatttaaaaaaagacatcatatt

SEQ ID NO: 48465 - DNA, 1851 bp, Homo sapiens
aggctgtacggcccggaattttgggatgtgcctgtttggatatgtttgagcacatcagcctcatgaccttggacagtctacagaaatgtgtcttcagctttgacagccattgtcaggagaaacccagtgaatatattgccgccatcttggagctcagtgcccttgtatcaaaaagacaccatgagatcctcctgcatattgacttcctgtattatctcacccctgatgggcagcgtttccgcagggcctgccgcctggtgcacgacttcacagatgccgtcatccaggagcggcgccgcactctccctagccagggtgttgatgacttcctccaagccaaggccaaatccaagactttggacttcattgatgtactcctgctgagcaaggatgaagacgggaagaagttatctgatgaggacataagagcagaagctgacacctttatgtttgagggccatgacaccacggccagtggtctctcctgggtcctgtaccaccttgcaaagcacccagaataccaggagcgctgccggcaggaggtgcaagaacttctgaaggaccgtgagcctaaagagattgaatgggacgacctggcccatttgcccttcctgaccatgtgcatgaaggagagcctgcggctgcatcccccagtcccggtcatctcccgccatgtcacccaggacattgtgctcccagacggccgggtcatccccaaaggcattatctgcctcatcagtgttttcggaacccatcacaacccagctgtgtggccggaccctgaggtctacgacccctttcgctttgacccagagaacatcaaggagaggtcacctctggcttttattcccttctcggcagggcccaggaactgcatcgggcagacgttcgcgatggcggagatgaaggtggtcctggcgctcacgctgctgcgcttccgcgtcctgcctgaccacaccgagccccgcaggaagccggagctggtcctgcgcgcagagggcggactttggctgcgggtggagcccctgagctgagttctgcagagacccactctgaccccactaaaatgacccctgattcatcaaaagtgaagcctagaattaccctaagaccctgttccacagtcctgtattccatcctagatatctactcaaaataattgagacaagtgttcaaacagaaagacgcttgtgcgtgaatgttcatggcggccctattcacagtagccaaacgatgaaaacaaccccaagctatatattaccagatgaaaggataaacaaaatgtggtccatccatacaatggagtattacacagccataaaaaggaatgaagcagtgatccctactacactgtggatgaaccttgaatgcatgatactgaatgaaagacgtcagatgcaaaaggtcacatagtgtactgtccttttatacgaaatttccagaacaggccaatctgaagagatgcatagcggattggtggctttcagcagctgtggggaggtgggactgaggagcgactgctaatcagtatggggtttcctcccgggatggtgaaaatgttccggacctagatagtgacgaaggtagcacgacactgtgagtgcactaaatgctattgaattggacactttgaaatggtgaatttcgtggtatgtgaattctacctcaatcaaaaaaatttgctattttatctcacatacattttttttctgtccaggttgttcatataataatatgctgtgagcatctttccatgacattaaatcatcttaggaaacattattttgtggtcctcaaaatgtgtgtgttaagtgttcaaatcagtcttaatttaaaaaaagacatcatatt

SEQ ID NO: 48466 - DNA, 1843 bp, Homo sapiens
cagagaggaaggccatgaggtgagggctctggccatggtgaccaagaggggtctaggagtgcaagatggacttggatttctggaaaaaggatgaatcttcagagactgtctcagattagactcaagagcccttagagctagtgtgactttttatgggggtgggggttggggggggttactgccttctctccaggatgaagacgggaagaagttatctgatgaggacataagagcagaagctgacacctttatgtttgagggtgagggccccagtgtggggctagagaggggaccgggatctctcccttccaggaacagggtgggtagacccccacaaccttcccatcccccttcccccatcctccctgaggccctcaatgcatgggtgctgtctaccttcgggtgctgaagcagcccagagacccaagcctgccttgctgccccccaggccatgacaccacggccagtggtctctcctgggtcctgtaccaccttgcaaagcacccagaataccaggagcgctgccggcaggaggtgcaagaacttctgaaggaccgtgagcctaaagagattgaatgggacgacctggcccatttgcccttcctgaccatgtgcatgaaggagagcctgcggctgcatcccccagtcccggtcatctcccgccatgtcacccaggacattgtgctcccagacggccgggtcatccccaaaggcattatctgcctcatcagtgttttcggaacccatcacaacccagctgtgtggccggaccctgaggtctacgacccctttcgctttgacccagagaacatcaaggagaggtcacctctggcttttattcccttctcggcagggcccaggaactgcatcgggcagacgttcgcgatggcggagatgaaggtggtcctggcgctcacgctgctgcgcttccgcgtcctgcctgaccacaccgagccccgcaggaagccggagctggtcctgcgcgcagagggcggactttggctgcgggtggagcccctgagctgagttctgcagagacccactctgaccccactaaaatgacccctgattcatcaaaagtgaagcctagaattaccctaagaccctgttccacagtcctgtattccatcctagatatctactcaaaataattgagacaagtgttcaaacagaaagacgcttgtgcgtgaatgttcatggcggccctattcacagtagccaaacgatgaaaacaaccccaagctatatattaccagatgaaaggataaacaaaatgtggtccatccatacaatggagtattacacagccataaaaaggaatgaagcagtgatccctactacactgtggatgaaccttgaatgcatgatactgaatgaaagacgtcagatgcaaaaggtcacatagtgtactgtccttttatacgaaatttccagaacaggccaatctgaagagatgcatagcggattggtggctttcagcagctgtggggaggtgggactgaggagcgactgctaatcagtatggggtttcctcccgggatggtgaaaatgttccggacctagatagtgacgaaggtagcacgacactgtgagtgcactaaatgctattgaattggacactttgaaatggtgaatttcgtggtatgtgaattctacctcaatcaaaaaaatttgctattttatctcacatacattttttttctgtccaggttgttcatataataatatgctgtgagcatctttccatgacattaaatcatcttaggaaacattattttgtggtcctcaaaatgtgtgtgttaagtgttcaaatcagtcttaatttaaaaaaagacatcatatt

SEQ ID NO: 48467 - DNA, 520 bp, Homo sapiens
atgggagcaagcatttcccattttcatgcccaaatgttgccttttccaagaccactctggcctgccacacccctatcctgtgcccatataaaccccaagctctacaagcagaggaacagaagagcagcagagtagcaaaatggcatggcagaggagagaagagaaggagcatctgaatgtcaggaggagttcggctgaggacggttggaaagcagataagccggggatggctgaactccaggggaagatcatcttcccactccatcccctttccagctccacatccattcctctgagagccaactccattcacttcagtaaaatccccaccttcactattcctttcaggtttgatgttgacctggattctttcctaggatggccagacaaaggacgggttaccaaggaggaggcagaattttaaaagggctgttcaccctggattcttccattgagtggaatagccatccacgaaaagcaactgctaaagagcactaattgtaacacacccctagatgct

SEQ ID NO: 48468 - DNA, 528 bp, Homo sapiens
agctttttccaaatcatgtaattttttaaaaaatctcctaactagatttcatatactcctcccattaaagctacttacttaaatgaagatcttgaaaaaacaaatacatatattgaattttattgctgagactgcctaaagacttaagacatgaaaaatcttatcagtaaactgttataaaaacaacaacaaaagccctatatgtaaatgtaaaccaagcaccttttaatttctctatgaaggttagataatgctggtggccttgcaagtaggcctccaaaaggggctggccatgctgtggcaccgggtccacttcccgctcttagttctacctctaacaaggagacagagaatctagaactactgccaggattgttacagaaggacacattacaattttccttaactgttatttgtttttcatgtttaatattgtttataaaaaaagttacttcactgtaaaaaaaaaaaagttgtacataaacttgatcactgtaagataatcaaattgcatttcagttgcaagta

SEQ ID NO: 48469 - DNA, 811 bp, Homo sapiens
gtcaccctgagtgccaccaggtcccctctgcctttggtccagaagagtgagttgtccaaaccagccagcatctggctccagccctccaaccctggcgaccagaccccatggggtgccatcaacggccccgcgacaggcatcaattcaaaccccaggacactctcgacagctccaaccatccggagggctgtgcagatggcaggaaccaaggaccctccctggcagctgaagagggcagttacggttgggcgtggtgaccagaacacacccagcagcctgcgaagcctccccgtccccagcctgtgctcctgattcccgccagacgcttgtgagcctgtgtgggtggcaggaggccccgtcttgccgtgcctacctgtcgcacagatgcctctgcacgctgcagacggtgcctctcctctcctatggaccctcgtcgggggcaggcagcggccgggtccaaacttgctgctgtcctcgaggctggcactgctatctccagggctgggttgactcaagccagacagggggaaggaattggttctgcaggacagtgagagggtctgtgtcccggcacccctgggacagcgctcggctgcctgtgctcactgcatgagaaaactcagagggtgcattctccctctggcatggctgtgtctgggcgccttgggctgcggcagggggcaggccccacgtggggaagcctcgtgcttggtcagctttctgtctctcccaggccagtgacaactggcttcccgaggaaggaggtgaggtaccagggaccctgggcaggacctggtgtcgggcagggcgg

SEQ ID NO: 48470 - DNA, 413 bp, Homo sapiens
gtttttttttaacatgtcaatcattccccgtgccatttacctagcactgagaccacaatatgcgtgaactttaacttcacttttcaaccttgtcttactgttaacattgacaggcgtttttgtttagactgaaatgttgcctctggaactgacaaaatgcagtggtttgcattctcttgcatggaaagaaaaactcaacttacaaaacagagaagtggaacacaatagctttttttttttaatgtcagaattataattatcttgagccttaggcccctcacatatttttctgtctcgtttgtgtaaacgactctgtcatgcttcagtatttgtgaaaagagtctgaaaattacagacacaagtgtttagaaatttccccttaaccctccctgaaatgacaataaacaaaaaaa

SEQ ID NO: 48471 - DNA, 745 bp, Homo sapiens
attttaaataaagtaggcaacggtatagtaatatccttcccccaagacacagagttaaggcaacttaatatgtttgtatgtaagaggggaaaaaaaggtgacacagatgtaaaccggaaggcccaaggttcttatctttgggcagaggattacatctgggtgctttttattttccatttgctcatcggttttctgaaatttccacagcagactgttaccttggtagtgagaaacaaaatgatacttgatttttcaaagagggtcatttatacctgtccccagcctcttccgcctcccaagtgaaatggggcttgccagctgattcatttatgttctttcttgttttctaagttagtatattgctcaaaacagcccttgcgagctctaggagctcaggagcagtttggtgtccctcaaagcagccccttccctaaagctacagcctctgggttaaggacatgtagcagaggtactagtgtgagatgtctgggttttctggtttgttcttggacccacaaagcgcagagagctcccaaacatgttctcaggatgggcgaggatagaaggtgtaagtcttggtgcctatctgcaagtgaaggtgtttttaagacaccatgtgcgtgagcatgtgacccatgtggtttatgatgctgactttttcctctggggaaatgcgaaatacttaaagctcttatctgtctgtactgattttgaaagccaagagcctaagattttgacaattagt

SEQ ID NO: 48472 - DNA, 471 bp, Homo sapiens
tgacttcgatataaaataaaagacgagcctgcagctgtctgcagagaagaggaaatcataacaagagaagcggcacagtctaacctctcaccaggtcacaggccccacgagggcaggtactctcctttgttccctgccatgacccctagagcaatgccctgcccacatgggagctcagtagcaaactaactaaatgaacacactggactaaggacttcagggaggggacagggcagccatccgcctgttctgggtgagcctggtgaatcactctagtcagtgagcagataggtgagaggaggtgattaaccccaaatttccctttcaacgtgacatgtctctgtgtgaacgcaggcgctaatgaaaaaacaaacccagccacagaacggcctccaatagtggagaaaaacaacccagaggtgtaatgactattgcaaaaagctgaatcctttaggccaaaacaagcacccc

SEQ ID NO: 48473 - DNA, 213 bp, Homo sapiens
tttgacacaggtaaacagaatgcaaagtttattctcatttttagctagagggcacaagtcctagtacataaactcaaacgaaaacataagcaaaaagattaaagtaatgcgcactgagtcatgaacccagaatagacagctctgaaagaaaattagagtatgggtgagcaaaaacgttatttcctagagaggataccaccttaaacacaactt

SEQ ID NO: 48474 - DNA, 233 bp, Homo sapiens
ggaagactgaggcaggaggattgcttgggccccagaggttgaggccgtagtaagccatgactgtgccactgcatgccaccctgagctgcctcagaagggagaagtttctttctactgtttctggccccaccccacccccaagggccagcagggaatccctctggaatttcctaaggaaacttcttttcaaaagacaagaactcctccctaggaggctcatcaaacaaccagga

SEQ ID NO: 48475 - DNA, 541 bp, Homo sapiens
agcaattcactgcatccctctgtgcctcagtttcccattctgtaaatcagagatcatgcatgctacctcaaaggttgttgtgaacattaaagaaatcaacacatggaaatcaaccaacatgggtcctggaacagggcgttgtgctcagtgctttctggtctctcttccttgaatagaaaggtcctgctggcaagttctctcaaggctggggatgaccaggcacaaaaaacagggcagcaatatgttggtgtcactccccttcccaaaactcttcgaagactccctaggaaagaccagcccctcagcctggcacttggttcatgatgtgggatcttatatccttgccagagtcatatctttgcccacttttacctgcaatccttgcatcatattcctttggctccagtccttcatttatgagacccataggaatccttccaacagccaaagagttgagtctaactctttcctgcccaaacccattcacggccccctggccttagacaatatatcacaagcatctcccctgacacataaagtc

SEQ ID NO: 48476 - DNA, 350 bp, Homo sapiens
gcctttactatttactgttcttatgtaaatccaaaggagaccatagtcagcagtgttttccaaacatttttaatcatgaagtttttgtttcatttttagaagtactttatgggtaaagtgttccataaaacatattttgggaaatgtaaaagctaatatatgcaacaaaaattacttaagacttttaggtttcaatatatttcattctctgcttatatgtgtgtgaacatccacacaaagccagaaacataagccaacaactggttcaacaatatgccataaaaatcaaactcacagtctataatatagaataaggacttttaaaactagcatgggtgtattttggttcc

SEQ ID NO: 48477 - DNA, 370 bp, Homo sapiens
gaattggcattattaatattatataatattctgatgtatttgactgatgaatatttgagagtggctagtaactattaatgacattattagttcatcaaaaccacactactttggaaaagtgggtcatttgattgtaatcagaattttaagaaagttggtagaaatttacaatgaagatagtttgctaatatattaatagtgttgatagctaggaagtatatttggaggaattttcccctttaaaaaaaaagtctgggtgtggtggctcacacctgtaattccagcactttgggaggccaagataggaggatcacttgaggccaggagtttgagaccagcctggtcaacatagcgagaccctgtctctgtt

SEQ ID NO: 48478 - DNA, 341 bp, Homo sapiens
attattttaaaatatttattttatgtacaaaaaggtaacatggtttctctcattgggtgggtgccttagataatccattcgtggaagatcacttagtccaacttaatgaaatctatatccttcacgtatgatggaaacactggtggcatgtaacgaggctcaatttccagatcagactgtgcccagtttcagcagacacaatagcaagaaccctggctgacttttcgcgggtggctccagtagagctgctggtgaatcatcttgctttcaggagtgcgacagggcaaaaggaacaataattcttcatatccatctactacagtttcaaagcacttcagtta

SEQ ID NO: 48479 - DNA, 324 bp, Homo sapiens
caaaaaccaatggaagagaaacacttcaaaatgggtgagaacagagaacagcatgaaatatggacagcagacagccctgtatgcaatgaaaatgcaggtgcatggtcactagaaaagatgcctcattctttgaatttttggctctttgaaacacctgtgtgacattaaattttttactgaaatgtggtattattaagtcttgcgtttaagtttataatcagaaacaaaaacaccatgtcctgttaaggaaagagttattctgacaacggttagcaggataaagaagattttactcaggagtattgcaataggtgtcaagattcc

SEQ ID NO: 48480 - DNA, 449 bp, Homo sapiens
tgagacagagtttcactcttgttgcctaggctggagtgcaatggtgccatctcggctcactgcaacctctgcttcctgagttcaagcaactctcctgcctcagcctcccgagtagctgggattacaggtgcccaccaccacgcctggctaatttttttgtatttttggtagagacagggtttcaccatattggccaagctggtcttgaactcctgacctcaggtgatccacctgcctcagcctcccaaaagtgctgggattacaggcttcagccaccgtgcctggccacttattagcttcttagaatcaacccatatgttattgtgtcatcctttcctaaaattatattttcagattagaacatgaaaggttaaaaactgaaagggcaaacccaaaccaaacactgtctgctattttgatattaattaaaaacagggtcaaactcctga

SEQ ID NO: 48481 - DNA, 706 bp, Homo sapiens
cgtttcttggacactgtgctttcccgtttgtaactcaggtttgatcaggcagttggtgaagaccgtccctctatgggtgtccctagtagtgtggggacatgttccctactcagcgcatcctgtctgtgcctggagatccctaagtggggcctagtgtgggttgaatctaagtagttaacagggttgcgcatttgcaggggcagcatctttccagtgagtgatgtgttaaattcccatgtctttgtgcagtgaagcaggactaagaatggatttctggactttttggaagtttacccctttctgaattgcttctgtaagtggcagtgccatttaggatgtactgcataagtttttggctgggattttaggactgaaatacatgtaggtggccatcaaatcagggtttcattgtatcacattaaataaacatgataagttagccaggtgtagtgactactggggcctatagtcccagctgcttgggaggccaaggtgggaggatcacttgagcccgggaggttgaggctgcagtgagccatcatctcgccattgcattccagcctgggcgacagaaaaagaccctgtctcataaatagataaataagaacatgatgatttttaaaaagtcataaacccagacaaagcccgggtttccaatgggagcataccaagttaaactcgagggggggcccggtccccaattttg

SEQ ID NO: 48482 - DNA, 325 bp, Homo sapiens
gcagcttaatttttaacagctctaagatgttttttcatacaaagataccatgatttatttaatgaaatgcatgtattttagtattatgggtgttgattggataaacgtaccaccaccccaacagcagcacatttctcttatttcgacattcactgccttaaaacatttaaaaattattctgggatttgtggtaagttcagaaaaacacttgaaacagattcagttgctcccaggctaagtgtttatgagaacttgaggagtgtgggcacaactctcagtctctctctgcactccagcctgggcaacaaagcgaggttttgtataa

SEQ ID NO: 48483 - DNA, 439 bp, Homo sapiens
ctgcaactactgggaatgcactttccactgagattgctgagctggtctagtaagtctcaactcaaagagaaaaacagagcttagagagaccacgttttgatgaatcatgtgagcccctgggtcctgccaaaccttaattcagaacacctgtagacttttccgttttatgagctaatacgattattttagctgtttactttaaatttctgtcatttatttgagacagagtctcactctgtggccaggctggtctccaactcttgacttcaggtgatccacccaccttggcctcccaaagtgttgggattacaggcatgagccactgcgtccagccatgacatttattttttaaaacgtgacccataatgccattttcctttgccaactagacttttgatttgtgactatgcctgaggggaccacacaaggaagggtgtta

SEQ ID NO: 48484 - DNA, 816 bp, Homo sapiens
cttgtgttcatcaactaattaatggataaaatgtggtatatcaatacaatggattattattcagccataaagaatggatgaaattgttatatggtacaacatagatgagccttagaaacatgctaaatgaaagaaggcacataaaggcccatgttgtatggtcccatctatatgaagtgtccagaataggcaaatccacagagatgggaagcatactagtggttgccaggggttgaagggagaggggaactgggactcactgcgaataggtactgctaatggcatgatggagatgttctgtaattttagtggcgatggctgcacagcacagtgaatatacttaaaatcaatgagttttattctttaaagtggtaaattttatggtatatgaattatctccatgagagatctatccatatattgtttactaaaacaagttttagttccccaagtaattatattccaaggaacataggaggggcaaaaataattctaaagacataaagaaagaaacaggatattttctaaatatttttatcttgagacagaacttggttttttttttggctttagcttggaaaatctcgtgtcatagataaatctttctcctatcttgaaattggtcttatcaaggaactacccgcattgagatatgaagctctgggcctctctggtagccttgcacacccttcattcatcacctggtcccccagataagacagccctgacctcagaatacaccttggatttaacattctatgggacatttatttctagtctaccccctcccccgacccgccggaaacaatgcctttc

SEQ ID NO: 48485 - DNA, 835 bp, Homo sapiens
gtctaagtgtttccggtggattcccagggactgtcggaggtgtggactctgcctgcctacctggtctgggaagatgttctaccatatctccctagagcacgaaatcctgctgcacccgcgctacttcggccccaacttgctcaacacggtgaagcagaagctcttcaccgaggtggaggggacctgcacagggaagtatggctttgtaattgctgtcaccaccattgacaatattggtgctggtgtgatccagccaggccgaggctttgtcctttatccagttaagtacaaggccattgttttccggccatttaaaggggaggtcgtggatgctgttgtcactcaggtcaacaaggttggactcttcacagaaattgggcccatgtcttgcttcatctctcgacattccatcccttcagagatggagtttgatcctaactccaacccaccatgttacaagacaatggatgaggatattgtgattcagcaggacgatgagatccgcttaaagattgtggggacccgtgtggacaagaatgacatttttgctattggctccctgatggacgattacttggggcttgtaagctgagcctggtggcctcctacccttggtcctactctaggaagtgtgattgtcacacttatcatgttgtccagaggtccagtctggctgctgttgtggaggcaaggaaggcaactcatcccagaaggcatctggtgcttcttgtagcttaactactgcctcctcatttttcagtatgtgttctaagtataaaaagtccttggttctcaaaaaaaaaaaaaactcgggttttggtggaaagaaagaata

SEQ ID NO: 48486 - DNA, 795 bp, Homo sapiens
gtctaagtgtttccggtggattcccagggactgtcggaggtgtggactctgcctgcctacctggtctgggaagatgttctaccatatctccctagagcacgaaatcctgctgcacccgcgctacttcggccccaacttgctcaacacggtgaagcagaagctcttcaccgaggtggaggggacctgcacagggaagtatggctttgtaattgctgtcaccaccattgacaatattggtgctggtgtgatccagccaggccgaggctttgtcctttatccagttaagtacaaggccattgttttccggccatttaaaggggaggtcgtggatgctgttgtcactcaggtcaacaaggttggactcttcacagaaattgggcccatgtcttgcttcatctctcgacattccatcccttcagagatggagtttgatcctaactccaacccaccatgttacaagacaatggatgaggatattgtgattcagcaggacgatgagatccgcttaaagattgtggggacccgtgtggacaagaatgacatttttgctattggctccctgatggacgattacttggggcttgtaagctgagcctggtggcctcctacccttggtcctactctaggaagtgtgattgtcacacttatcatgttgtccagaggtccagtctggctgctgttgtggaggcaaggaaggcaactcatcccagaaggcatctggtgcttcttgtagcttaactactgcctcctcatttttcagtatgtgttctaagtataaaaagtccttggttctca

SEQ ID NO: 48487 - DNA, 749 bp, Homo sapiens
tggtttagcggtcctctctttgaagaacatggttttgttttgttttgttttgttttgttttgttttgtttattagagatgcagtatcactctctcacccagtctggaatgtagtagctcaatcatagctcactgcaacctcaaattcctaggctcaagtgatcttcccacctcagcctcccaagtagctagaactacaggtgcatgtcaccatgcccagctatttatttatttatttatttatttatgtagaaacagagtcccacttcgttgcctaggctggtctcaaactcctggcttcaagcaattctcccacctcgacctcccaaagtgctgagattacaggtgtgagccaccacacctggcctgaagatcacatatgtcacgtaaagtctattaagcttgactacactcagggtacagtgcagatgctgggtcccatggcgctcaagagggaaggagtccctggacctgcctcggtagaactttatcagttctatctcattgtctcctttaagccccacggcgatcctatcttcccaatgacacactgtctcttttcctatatcattaacaggtaagaatcaagttgtaaacagaagaattaggaagccaaaaagcaggaaagctgagcaacacactcaaaatctaatcgctgcctgagaaatcaggaattgactctaaacacttggacacagcatgtcaccaacacagtccaactctagtgaggaggaggagagcgaggaagag

SEQ ID NO: 48488 - DNA, 442 bp, Homo sapiens
cagcctctgcttcactaggagtggactgactacaggctgagctgggaccctgcggagcacgacggcatcgattcgctccgcatcacggcggaatccgtgtggctccctgacgtggtgctactgaacaacaatgatgggaattttgacgtggctctggacattagcgtcgtggtgtcctccgacggctccgtgcgttggcaacccccgggcatctatcgcagcagctgcagcatccaggtttccggcctccacattggaagctgaaggagctcttacaaatcctccctttccttagacatcctgactccccggcgactcccatccttcatccttcccccattatctaatccccatgaccctcacctcgtctaccctcctggttttccattgagtgttctgtacactttctttgacttctagtcttactcagtgaccgccctcc

SEQ ID NO: 48489 - DNA, 961 bp, Homo sapiens
gtcacttcccctgtgctggcggtcccagcggctctctgagcgaagtcactgagcgagccgccaggctatgaccccaggggctctgctgatgctgctgggggcgctgggggcgccgctcgccccaggcgtccgcggctcggaggcggagggtcgactccgggagaaacttttctctggctatgatagctccgtgcggccagcgcgggaggtgggagaccgtgtcagggtcagcgttggtctcatcctggcgcaactcatcagcctgaacgagaaggatgaagagatgagcacaaaggtgtacttagacctggagtggactgactacaggctgagctgggaccctgcggagcacgacggcatcgattcgctccgcatcacggcggaatccgtgtggctccctgacgtggtgctactgaacaacaatgatgggaattttgacgtggctctggacattagcgtcgtggtgtcctccgacggctccgtgcgttggcaacccccgggcatctatcgcagcagctgcagcatccaggtcacctacttccccttcgactggcagaattgcactatggtgttcagctcctacagctacgacagctcggaggtcagcctgcagacaggcctgggtcctgacgggcaagggcatcaggaaatccacattcatgaagggactttcattgagaatggccagtgggagattatccacaagccctctcggctaatccagcctccaggcgatcctaggggagggagggaaggacagcgccaggaagtcatcttctacctcatcatccgccgcaagcctctcttctacctggtcaacgtcattgccccatgcatcctcatcactcttctggccatcttcgtcttctacctgccaccagatgcagagagaagatggggctctcaatctttgtacagctgacccagagtagcaccagcacgattccacgggatcctcaga

SEQ ID NO: 48490 - DNA, 2249 bp, Homo sapiens
  misc_feature (1728)..(1729): n is a, c, g, or t
  misc_feature (2011)..(2012): n is a, c, g, or t
  misc_feature (2015)..(2015): n is a, c, g, or t
  misc_feature (2019)..(2019): n is a, c, g, or t
  misc_feature (2023)..(2023): n is a, c, g, or t
  misc_feature (2026)..(2026): n is a, c, g, or t
tgagatggaccagcctttggtgaagattggatcgaaatcagaccaatggacaagctctggccgtgggtggtggacgggcctggagtagaactggaacgagaaggatgaagagatgagcacaaaggtgtacttagacctggagtggactgactacaggctgagctgggaccctgcggagcacgacggcatcgattcgctccgcatcacggcggaatccgtgtggctccctgacgtggtgctactgaacaacaatgatgggaattttgacgtggctctggacattagcgtcgtggtgtcctccgacggctccgtgcgttggcaacccccgggcatctatcgcagcagctgcagcatccaggtcacctacttccccttcgactggcagaattgcactatggtgttcagctcctacagctacgacagctcggaggtcagcctgcagacaggcctgggtcctgacgggcaagggcatcaggaaatccacattcatgaagggactttcattgagaatggccagtgggagattatccacaagccctctcggctaatccagcctccaggcgatcctaggggagggagggaaggacagcgccaggaagtcatcttctacctcatcatccgccgcaagcctctcttctacctggtcaacgtcattgccccatgcatcctcatcactcttctggccatcttcgtcttctacctgccaccagatgcaggagagaagatggggctctcaatctttgccctgctgacccttactgtgttcctgctgctgctggctgacaaagtacctgagacctcactatcagtacccattattatcaagtacctcatgtttaccatggtcctcgtcaccttctcagtcatccttagtgtcgtggttctcaacctgcaccaccgctcaccccacacccaccaaatgcccctttgggtccgtcagatcttcattcacaaacttccgctgtacctgcgtctaaaaaggcccaaacccgagagagacctgatgccggagccccctcactgttcttctccaggaagtggctggggtcggggaacagatgaatatttcatccggaagccgccaagtgattttctcttccccaaacccaataggttccagcctgaactgtctgcccctgatctgcggcgatttatcgatggtccaaaccgggctgtggccctgcttccggagctacgggaggtcgtctcctctatcagctacatcgctcgacagctgcaggaacaggaggaccacgatgcgctgaaggaggactggcagtttgtggccatggtagtggaccgcctcttcctgtggactttcatcatcttcaccagcgttgggaccctagtcatcttcctggacgccacgtaccacttgccccctccagacccctttccttgaagactggagggttgagaccaggccccctgccagttgaagtgagagagtttggtgatactgtcaagccctatccttctctgcctcttaactccttcacgaggaatctgggcctcttatttcgtttctggggactgcattggactgagggctgggtaggcaggtgtcttggacccacctgaaatgcagtatcatctgatttactctttgggatcttgaagaagctcttttgggtatcaacacctaggtcgccagtgaaatagaacacagaacaggaactagattataagccttatgaggtcaagaaatgtgacttggccgggcgcggnngctcacgcctgtaatcccagcactttgggaggccaaggcgggcggatcacctgaggtcgggagtttgagaccagcccgaccaacatggagaaaccctgtctctactaaaaatacaaaattagccaggtgtggtggtacatgcctgtaatcccagctactagggaggctgaggcaggagaatcactcgaacccgggaggcagaggttgcagtgagtcaagatcacgccattgcactccagcctgggcaacaagagcgaaactccatctcaaaaaaaaaaaatnnctngttnctgnagnatgcccagtgccacgcacaggtgctgacctatagtaagtgcttaacatttgttgaataggggaaagaaatttccggaagtaaatacagcaattaataatgtttataagctgggcatggtcgctcaggccagtaatcccagtgacttaggaggctgaggtgggaggattacttgaaacccacagtttgagaccagcctgggcaacatagtgagaccctgtctct

SEQ ID NO: 48491 - DNA, 2420 bp, Homo sapiens
  misc_feature (1899)..(1900): n is a, c, g, or t
  misc_feature (2182)..(2183): n is a, c, g, or t
  misc_feature (2186)..(2186): n is a, c, g, or t
  misc_feature (2190)..(2190): n is a, c, g, or t
  misc_feature (2194)..(2194): n is a, c, g, or t
  misc_feature (2197)..(2197): n is a, c, g, or t
gtcacttcccctgtgctggcggtcccagcggctctctgagcgaagtcactgagcgagccgccaggctatgaccccaggggctctgctgatgctgctgggggcgctgggggcgccgctcgccccaggcgtccgcggctcggaggcggagggtcgactccgggagaaacttttctctggctatgatagctccgtgcggccagcgcgggaggtgggagaccgtgtcagggtcagcgttggtctcatcctggcgcaactcatcagcctgaacgagaaggatgaagagatgagcacaaaggtgtacttagacctggagtggactgactacaggctgagctgggaccctgcggagcacgacggcatcgattcgctccgcatcacggcggaatccgtgtggctccctgacgtggtgctactgaacaacaatgatgggaattttgacgtggctctggacattagcgtcgtggtgtcctccgacggctccgtgcgttggcaacccccgggcatctatcgcagcagctgcagcatccaggtcacctacttccccttcgactggcagaattgcactatggtgttcagctcctacagctacgacagctcggaggtcagcctgcagacaggcctgggtcctgacgggcaagggcatcaggaaatccacattcatgaagggactttcattgagaatggccagtgggagattatccacaagccctctcggctaatccagcctccaggcgatcctaggggagggagggaaggacagcgccaggaagtcatcttctacctcatcatccgccgcaagcctctcttctacctggtcaacgtcattgccccatgcatcctcatcactcttctggccatcttcgtcttctacctgccaccagatgcaggagagaagatggggctctcaatctttgccctgctgacccttactgtgttcctgctgctgctggctgacaaagtacctgagacctcactatcagtacccattattatcaagtacctcatgtttaccatggtcctcgtcaccttctcagtcatccttagtgtcgtggttctcaacctgcaccaccgctcaccccacacccaccaaatgcccctttgggtccgtcagatcttcattcacaaacttccgctgtacctgcgtctaaaaaggcccaaacccgagagagacctgatgccggagccccctcactgttcttctccaggaagtggctggggtcggggaacagatgaatatttcatccggaagccgccaagtgattttctcttccccaaacccaataggttccagcctgaactgtctgcccctgatctgcggcgatttatcgatggtccaaaccgggctgtggccctgcttccggagctacgggaggtcgtctcctctatcagctacatcgctcgacagctgcaggaacaggaggaccacgatgcgctgaaggaggactggcagtttgtggccatggtagtggaccgcctcttcctgtggactttcatcatcttcaccagcgttgggaccctagtcatcttcctggacgccacgtaccacttgccccctccagacccctttccttgaagactggagggttgagaccaggccccctgccagttgaagtgagagagtttggtgatactgtcaagccctatccttctctgcctcttaactccttcacgaggaatctgggcctcttatttcgtttctggggactgcattggactgagggctgggtaggcaggtgtcttggacccacctgaaatgcagtatcatctgatttactctttgggatcttgaagaagctcttttgggtatcaacacctaggtcgccagtgaaatagaacacagaacaggaactagattataagccttatgaggtcaagaaatgtgacttggccgggcgcggnngctcacgcctgtaatcccagcactttgggaggccaaggcgggcggatcacctgaggtcgggagtttgagaccagcccgaccaacatggagaaaccctgtctctactaaaaatacaaaattagccaggtgtggtggtacatgcctgtaatcccagctactagggaggctgaggcaggagaatcactcgaacccgggaggcagaggttgcagtgagtcaagatcacgccattgcactccagcctgggcaacaagagcgaaactccatctcaaaaaaaaaaaatnnctngttnctgnagnatgcccagtgccacgcacaggtgctgacctatagtaagtgcttaacatttgttgaataggggaaagaaatttccggaagtaaatacagcaattaataatgtttataagctgggcatggtcgctcaggccagtaatcccagtgacttaggaggctgaggtgggaggattacttgaaacccacagtttgagaccagcctgggcaacatagtgagaccctgtctct

SEQ ID NO: 48492 - DNA, 256 bp, Homo sapiens
  misc_feature (245)..(245): n is a, c, g, or t
cgctgactggttctctggcagctctagtgactctctcctccatccaggtcacctacttccccttcgactggcagaattgcactatggtgttcagctcctacagctacgacagctcggaggtcagcctgcagacaggcctgggtcctgacgggcaagggcatcaggaaatccacattcatgaagggactttcattgagaatggccagtgggagataatcacaagcctgtcgggctagtcgggtaantcctgagagtc

SEQ ID NO: 48493 - DNA, 2039 bp, Homo sapiens
  misc_feature (1518)..(1519): n is a, c, g, or t
  misc_feature (1801)..(1802): n is a, c, g, or t
  misc_feature (1805)..(1805): n is a, c, g, or t
  misc_feature (1809)..(1809): n is a, c, g, or t
  misc_feature (1813)..(1813): n is a, c, g, or t
  misc_feature (1816)..(1816): n is a, c, g, or t
tgagatggaccagcctttggtgaagattggatcgaaatcagaccaatggacaagctctggccgtgggtggtggacgggcctggagtagaactggaacgagaaggatgaagagatgagcacaaaggtgtacttagacctggagtggactgactacaggctgagctgggaccctgcggagcacgacggcatcgattcgctccgcatcacggcggaatccgtgtggctccctgacgtggtgctactgaacaacaatgatgggaattttgacgtggctctggacattagcgtcgtggtgtcctccgacggctccgtgcgttggcaacccccgggcatctatcgcagcagctgcagcatccaggtcacctacttccccttcgactggcagaattgcactatggtgttcagctcctacagctacgacagctcggaggtcagcctgcagacaggcctgggtcctgacgggcaagggcatcaggaaatccacattcatgaagggactttcattggagagaagatggggctctcaatctttgccctgctgacccttactgtgttcctgctgctgctggctgacaaagtacctgagacctcactatcagtacccattattatcaagtacctcatgtttaccatggtcctcgtcaccttctcagtcatccttagtgtcgtggttctcaacctgcaccaccgctcaccccacacccaccaaatgcccctttgggtccgtcagatcttcattcacaaacttccgctgtacctgcgtctaaaaaggcccaaacccgagagagacctgatgccggagccccctcactgttcttctccaggaagtggctggggtcggggaacagatgaatatttcatccggaagccgccaagtgattttctcttccccaaacccaataggttccagcctgaactgtctgcccctgatctgcggcgatttatcgatggtccaaaccgggctgtggccctgcttccggagctacgggaggtcgtctcctctatcagctacatcgctcgacagctgcaggaacaggaggaccacgatgcgctgaaggaggactggcagtttgtggccatggtagtggaccgcctcttcctgtggactttcatcatcttcaccagcgttgggaccctagtcatcttcctggacgccacgtaccacttgccccctccagacccctttccttgaagactggagggttgagaccaggccccctgccagttgaagtgagagagtttggtgatactgtcaagccctatccttctctgcctcttaactccttcacgaggaatctgggcctcttatttcgtttctggggactgcattggactgagggctgggtaggcaggtgtcttggacccacctgaaatgcagtatcatctgatttactctttgggatcttgaagaagctcttttgggtatcaacacctaggtcgccagtgaaatagaacacagaacaggaactagattataagccttatgaggtcaagaaatgtgacttggccgggcgcggnngctcacgcctgtaatcccagcactttgggaggccaaggcgggcggatcacctgaggtcgggagtttgagaccagcccgaccaacatggagaaaccctgtctctactaaaaatacaaaattagccaggtgtggtggtacatgcctgtaatcccagctactagggaggctgaggcaggagaatcactcgaacccgggaggcagaggttgcagtgagtcaagatcacgccattgcactccagcctgggcaacaagagcgaaactccatctcaaaaaaaaaaaatnnctngttnctgnagnatgcccagtgccacgcacaggtgctgacctatagtaagtgcttaacatttgttgaataggggaaagaaatttccggaagtaaatacagcaattaataatgtttataagctgggcatggtcgctcaggccagtaatcccagtgacttaggaggctgaggtgggaggattacttgaaacccacagtttgagaccagcctgggcaacatagtgagaccctgtctct

SEQ ID NO: 48494 - DNA, 510 bp, Homo sapiens
tatgtgaagcaagagattatgactctcaaccttccgaagaaattttaatgcagttcattctggtagaacaatacctgcaattgaacgtccacgtcagggttctctgcttacagagtaaattctctaaagtcatgtacaagaacaaaatagcctccctatgtgctttgaatgctattggttctcagtagaaattagatcgtggtcatctcaaatgcaaacaataggaattatattttctaagatctggtttcttaagccaacattaaatgttaaaagtgatgccgtttggcagtttctagacatgtgatattttaaacaaaaagaagccactttgttatctttagggagataaaaacaattttcatttggtcttcaggaacaaaataagcaacttccttttacaattttaaccataaactgttttgttacttgaatattgtgttgtagccaacaagtttgaatatacagtcatgttcttgtcttgaaattttagtattgataacatagtat

SEQ ID NO: 48495 - DNA, 407 bp, Homo sapiens
gacatgaggcccctccggcaggcactgcgtgagaatgcccagtgttcttgtggccgatgctggctaagctcctactgggtgcccagcctcaggcctggtgcaggtgggacagagctgtcaatcatcagtcccatccgtcagtctgtccgtcccccatccagccgtccaggatagaactgtggtttggcgcacaggttctggagggctgggttgaaacccactccaccaaatccttgctgtttgtcctttggtgcattgccccaccttgccagcctcagtttcttcatctatgaaatggatataataacagttcttacctcatagggttgttgggaggattaaatcacttaatataggtaatgccttaggcacagtgcctgccacatattaaatgcttgctaaatgtt

SEQ ID NO: 48496 - DNA, 480 bp, Homo sapiens
gtaagggaggtgaattcagcacctgaagatgctggctgtgcaattgagaagtggggaaggggagaatgcatgatgagagattaataccaacctcagggggctctccctatgtgtcccgttgcttattcctgcctgctgataattctgttcccagaaaactttgaagtttatttcccagcattatcacaacagtaatggaactcccagtaaaaattttagtgacccgttgtttgatttaaattatttattgcattacatattttagcatttttgaagtaagagatactgtagttctgttaaggatgaaaaccaagtcaaacccataagcagtcagacttgttttaaattggatggtaccagaggtttttaagagccacctgaaaaaatagaaaaataaagacacgaaatggtttttgaggttttacataatccatgtttctacaggcgacatgggagctaggagagtaaaaatagggcaaa

SEQ ID NO: 48497 - DNA, 280 bp, Homo sapiens
cagggccactggggtctcccaggagcacctccagccctgccccccatgcccagattgtggggagcacagggctcgctccactgtccatggaagaggttggaaattcagcccagccatccccaccccagggacaggcctcccaggagctcacactcaacccccacaaactgacgtggacttggggtcccaggcatctttcctcccagacccgagagcagccagaaacaaaccctccagaaacctgcctttcactggtacaaataaatcgacaaagagggca

SEQ ID NO: 48498 - DNA, 644 bp, Homo sapiens
cagggccactggggtctcccaggagcacctccagccctgccccccatgcccagattgtggggagcacagggctcgctccactgtccatggaagaggttggaaattcagcccagccatccccaccccagggacaggcctcccaggagctcacactcaacccccacaaactgacgtggacttggggtcccaggcatctttcctcccagacccgagagcagccagaaacaaaccctccagaaacctgcctttcactggtacaaataaatcgacaaagagggcaaatcctttctctttctggaggcctaatgtcagtgatacataattgcacatcacagtattttattattttgttgatatgaaatatttcagttgtttagttgtttttaactttcaaataaggatttgcatttcgttgagaagaaaagatgatttccaagacatggactattgccagatattctaaaccctattttggttaaattacagcacccagattttagtaacaaagcacattgattttatattcaaagcatttttatatttagtctcttaaccttttgtaattcccacccacagcttgcagtgcaggaaccctttttgtgtcccttgttgtcagtggggtgcctgcctgggcccaataattt

SEQ ID NO: 48499 - DNA, 268 bp, Homo sapiens
atatttattattattttagaaaaacagttgtagaagagacatcaattaatttgccggtcttgtccaatctccctttctaactgttctgcttgctagctcagcactatatgtgtgcttccgtaatgattgattggataaaaaatgggcacacgccttagggaaagctgattcatctgccagccagcaaccagcaggttaggagtcagacaggagctataagttcatgtactgttgatactgagttcccacacacatgcacactcacatg

SEQ ID NO: 48500 - DNA, 422 bp, Homo sapiens
ttaggttttaaccatgagattccctaaacacaatgaagtcgttatgcctgaaagaggaaaaggttctgacccacttttcattttaaaaacattaagaacttaaaaggaacaaagggaggggaaagacaagaagtacgatgccagcatcccttaaattattgtaaagtatgtttaggacatcatcaggagtctgcataaatttaattcaatttccaccatcgtccacactacaggatccacacagagtagctaatttaacatttgtttaccaaatattaatatatataaatttcaggctgggcacagtgtcacgcctgtaaccccagcactttgggaggccaaggcaggcagatcacttgagctcaggagcagcctggccaacatggcgaaaccccctctctacttaaaaaagaaaaaaaaaa

SEQ ID NO: 48501 - DNA, 264 bp, Homo sapiens
cacagctatttccatttctccacagcagagcgtttcccaccatcatctcagaatgcaatgagctgactgaatagtttacctagaatgagcttgctgagcaccagtaagtcaagcatcaaagttccagaggtgttgccagagccagatgatcaagcaggtattttactcaagttaggtctaagattgagtctgggagattagctaaggcatgaaaaaccccctaatcacatggggtctagagtctggacacccaaaagcaacatt

SEQ ID NO: 48502 - DNA, 221 bp, Homo sapiens
ataaactgtatttcccaggagtgttctaaatatccatgcaagaaaagactggggtttaatgagtccctgctttctgtaggtacagatgacatgtcaggctaattttggtcccttggggattatgaaggcctggaccttcccatgagcttggttcagggccttcccagcaggtcagagctcatgacatcaaacaaatcagagttgatacctgagcttttgag

SEQ ID NO: 48503 - DNA, 409 bp, Homo sapiens
ggcaggtcacagggtctctctgtgttgcccaggctggtctcaaattcctggcctcaagtgatcctcctcccttggcctcccactttcctactcttttagatttctgttgcagggctaaagaaatggacaacctttggataagagccaccaagccctaagtgatgttcagaaaggaaagcccagcagctacttaaatgggttcaggaacatttgggatttttctctcttgaagttcttttacagcttggggaactcccaagaggactgagacattgtcctgtttgcctctgcatttccagcgcctagaacagagctggtgcatacagaaggcaagcagctcagtgcatatttattgaatgaacaaacaaagccttctcaaagttcaggtttctttgccatgctttggggc

SEQ ID NO: 48504 - DNA, 653 bp, Homo sapiens
tcagctccaggactctgcagaccggcatcccttgtgagagggaagatgcttccatcaccagcctggggtggctctcctcctcaagccgggccccaaatgcactggcagctttatcccactttctacagcgatgggtctccaatcgttcctcaaatggagccttgccttcccccatccttgaagcattaatgagatagatgttttgtgcaggctctgctgagggggaggtcctgcttccccagatggaggtcagcccaccagagctgctgttctaaaattatcccctgcacatccctcaaaagcatcaaatggtcataataactcatatttacaaagcaccatcgcattcactgcatgggatcccacagggctttacaaacgcaacaaactaatacacacgctaactagaaggcgcctctcgccaatccctgcaaggcagccacctctggggtgaacggtagcagctgttgatctgcacggagccccaggacacaatggccaggccagggagggaagaatggccggactctgggaggccctacgctgccccaggccaacacactcagcctgtgttattctgatctgacagtgtcttttgattctgccgtctctctacctgttatccaaggattcacagctttgactgccgagcg

SEQ ID NO: 48505 - DNA, 459 bp, Homo sapiens
tgccttacggttctgggtaaagaattagggacatgatgcagtaaatgttaattaaatagtcttggcagaaaatgaccacaggtaatttcagtaagtatatcctaaataaataataaaatatgcagaaacgatttctaaggaaatttgagcacaaatgtttgctcattagaacactggaagggtcagtaatcagaactgtgtgcatatacaaatcacaggtctgggaagatcccataggtcgaaaatgtgtccttggacaaatggctcctctaataggctatctacgggggtgtggagcattaagagcaggtttactggagagacaaagataacaatagggtttgggaaaggcagaccctttaaaaaaggctgattttttgataagcagggaaaaagttatttaattttagtaatagtagtgaccctatataaagatcattatacagataatggaggctg

SEQ ID NO: 48506 - DNA, 323 bp, Homo sapiens
gcacctggcctgttccgggacagatcgcaaggctgagggttaagtaacacctggagtggttaggaggctgggcacctccttgtgaatctcccgggctgcgtggcgggtggcgggtggctggcaggggagggacccttggcactgctgtggctttgtatttgctgccagcggggcctttgatgccccaggggctgctcgcccagccaagggcattgtagaacacaaaagctgcagaaagcagcacaaataaagtgaaagcgacccaggaaactgccagggagcttatcagcctgtttcctgatcataggtatggggtgtaggga

SEQ ID NO: 48507 - DNA, 1000 bp, Homo sapiens
cggtttctagtcattttcactgccagcaggtgccctttctatgcataatagacttcacaagtgtaattaacacatgaggaccactgctgccagtttttcttcaggtacatgctgctaggagttttcaggacaacagtgtaggccataagagctttttacatggcgcctgaagatgaagtcttcgttgacttctggacaaagacatgttaaatggagctgagcccagaccctgctgttggtatcacaggtcacagtcattgagtccagaaaccccagaagctgtattgcagctttctgtggaccagaggccatgacagcaaagctctagtttgcatgcagttaataaatgaaaagtaggatactgaaaaccctaccattatgtggaggaccaattgcgcattcacaaatacgacatacaatcatctgagttaactttaattagagctataatcacagattttaattatctggaaaaaatcagtttagtacaaatgggctgccctaaatatttctcaaattatttttttttgtgtcccttcctatttttggagtggacaatagtgtggaaagtgcctaggttttggattcaggcagacctggattcaaatcttagtcttatctcttattaactatgtaaccattaaaaatctgttttaactctgtgatctgcaatatctttctgtaaaatgggtataacttacctactttgaaaagtggctatagcaattagagttattagtcaagtggcacctaggggccattagtaaatgatgattgcttttttcaccattattataaacatgggacatggattttggtttccagaaggtttaactcacattaagcattattcttacttctgttgccttgagagctcaggggaaaactttataattcatcttctctttttatccctcagattgtttttattttgattttttttttatttaacttgagttattgtatggttgttttcatttgcagctgtggcataagaatg

SEQ ID NO: 48508 - DNA, 441 bp, Homo sapiens
gcctgcctcggcctcccaaagtgctgggatcacaggtgtgagctactgcgcccggtttcctctttcttttaaatatcatacagtaaacaaggaatgatgggtccacaggaagagagaccaccatgtcttcagatctcctcacagccttgccctccagagtttagatgtggagggaatagattaaaggcaaacttcttgttttgctgtttatctttggacctgtcaggctgtaactgtgtgtttttctcctgtggtgtggggcactgcgtgagtttaagcaccaatcacatacatccacatgtacctgcacttctgttcccagaaggaagaccgtgagtgtgagttgtccaggtccttgatattttgaacaaataattgaacagaaagcacaaaggaatgaaaaacgggaaggaagcagcaaaagcaagaatttattaaagt

SEQ ID NO: 48509 - DNA, 401 bp, Homo sapiens
gggttaaaaactgactttacaactttactcaggatatacttttttagactatgttaataaaatgtgcatataaagaaggccaacaagtcacgattaaggtgaattctacctatgcgtcagttctagggatttgcatctgttgttttttgttgttgttgtttaagcaattgaagctgtatttaaggtaaccttttaaatagcttttagtttttgtttgagcatgtttttctatttaaggacccttatgcagagattatcaaaagaactacttttaggatataaactattttacaagtttaacagttaggaaatggcttcttttttgtttgtttgtttgtttgtttgtttgttttttgagatggagtctcactccagcgtgggggacagagcaagagtccgtc

SEQ ID NO: 48510 - DNA, 656 bp, Homo sapiens
tgcggggggcctggtttggggaaatttcctgactccccaagatgaatgagcatgatttctgtttttctgctttccacatggagccttttaataagctccacatgagttaagatattctcaaggaacttctgtctttgcaacaataaaagagacctaattaatataacctttttaataattgcacaacactgtactcattagctagcatatgaatttatgtgttgtgttaaaatggtccatttaacttatcgatttctacgactttagcctctaggcctggggttatgcatgttatccacatcttcagtgtagagacacaggaaattatccgtaacttttcgtcaaatgaatgaatgaaacagccactctaaaaaactacaaacacatgcactagtctttaatcatccctatttacagtgcttcatttgcataaaatagggtgcttaatatggcaaatacatgacacacatacacacacacacacatattttaataagagaagtgactgctccttctgctaactcagaaatgcaagacagaaagtttctctcaaatagctattttttctatgaagaatcattcagggtctctctcacttacataaaagcagggaaaatagactcattggaccaatgctatccccactcttcagcctc

SEQ ID NO: 48511 - DNA, 701 bp, Homo sapiens
caactagtatctataatattccagagataaattctgggtaattccaacataggtgaggaattagtatagagcagagagagatgagaatgtccagaactactattcttgaggatgagaaaggtgaacaattgtaagtttatgtaatttatggggaaaaataaaaatagagatcctaataagttaatggaacaactaacagaaacggaaaattgaatgtataactttgaaacatactacgtcagttaggaaaggcttgctggcaggtaagaaaaatctgcaaattagcgtattaagcaagatggaggcttacatctttctgaaaagaatttctgacgtaggcagtcaatccattgctgacgtagcagctccatggcaatattaaacccagctgacctaccccttcctttttaggacatttctcagatatcatacatcaaacctcctttgtatctcattggctaatcatatgacaatacctggctttcaggaaggctgggatgtactgtatagcaggactgcatcatgtccagctaaaaactggggttctcaaactaaggaaggaggggaaaatagctagcaggaggcgactagcaaactgccacacctgcaaaaggaaaattaatggaaggcaaaaatgaaggggggaaaaaataagaagtatggtaattagaaagcatgttagaacatgtggaaaaaggggg

SEQ ID NO: 48512 - DNA, 929 bp, Homo sapiens
caactagtatctataatattccagagataaattctgggtaattccaacataggtgaggaattagtatagagcagagagagatgagaatgtccagaactactattcttgaggatgagaaaggtgaacaattgtaagtttatgtaatttatggggaaaaataaaaatagagatcctaataagttaatggaacaactaacagaaacggaaaattgaatgtataactttgaaacatactacgtcagttaggaaaggcttgctggcaggtaagaaaaatctgcaaattagcgtattaagcaagatggaggcttacatctttctgaaaagaatttctgacgtaggcagtcaatccattgctgacgtagcagctccatggcaatattaaacccagctgacctaccccttcctttttaggacatttctcagatatcatacatcaaacctcctttgtatctcattggctaatcatatgacaatacctggctttcaggaaggctgggatgtactgtatagcaggactgcatcatgtccagctaaaaactggggttctcaaactaaggaaggaggggaaaatagctagcaggaggcgactagcaaactgccacacctgcaaaaggaaaattaatggaaggcaaaaataaaaaaaaaaaaaaaaaaaagggggttcttttcggcgcggccaaccagggacgaaggctcatgtcaaaagtggggcgggcctcttctcggccaggggttaaccccgggccccaaggggtgataaacgaaacatacgtggatcgcacacgaaacacaattccaccacacacatccaacaacaaaacacaccacacaccgcacccccaacccacccaacagaacaacataacaaacaccacccacaaaccaccgcacaccacaccaacacaacacccaacacacacagcaccccc

SEQ ID NO: 48513 - DNA, 303 bp, Homo sapiens
gacaaacctcagtgacttctgggtcgcacattcttgcctgggaagaccctgttcttacctggtaaggcacaattgaaactatgattggtccacttcacagacgaggcagcttgttttctcccctggtgtgttattagttttaatggacatatttgtgcaatcagtgtgtacagttcatgttggtaagcatctggcatattttcattattttagaataatgctatgctgagctcacatttcagcttcttgtcaaaaatagtaatattctggtatggcagatttccttctggggcagtacttccc

SEQ ID NO: 48514 - DNA, 471 bp, Homo sapiens
tcccagtcactcaggagtctgcggcaggaagatcacttgagcccaggagctcgaggctaaagtgagccacgattgtaccactgcactccagcctgggcaacagagcaagaccctgtctcaataaataaataataaataaataaataaaggcacaaagatttcccatatactccctaccccaccccccccccacccccacacatacacaacctctctccgtagatttgttgttaatgtttgtctgcataggttgtacctctggtatgtaatttttgttttaatcgtttgtaacaagttaatttgtttttaaacaggcaacctgcacttccccaaccccagaaagtgctgataatgaagagtttatttgctcccaaaacaaagctaagttttcatctcaccagtgggagtattaccctctgtgtttttaggtcattaaatatttgcaataaaaaatacaattaataatttagt

SEQ ID NO: 48515 - DNA, 2556 bp, Homo sapiens
  misc_feature (2046)..(2046): n is a, c, g, or t
gcctggcggttgctttgtctctccttcgccggagccggctcttcctgttagtctccgctgctagttcttggctctgggaggcccaggtggctctgcagcagcctctgccaccctgtgacctgcgagtattgggacatccctagctgacgccaggacacccgggaagccgaggaatggtgagtggactgcgcctggcttcccgaagtggagaagagggctggttgaaacctgctgtggcgcgactcgggcctccacgccatcggctccggaacctgcggaccgagtcgccgtggcgtagccggggctcagtcctcttctgttcagggccgggccgggcggggcgggcagcggaacccctgcatcctgtctgtacctgcgggcgccacttccgccggccggatccctgtcgggaacccctcgcctcccctatccaggactcggtggcttttgaggatgtggctgtgaactttacccaggaggaatgggctttgctagattcttctcagaagaatctctacagagaagtgatgcaggaaacctgcaggaacctggcttctgtaggaagccaatggaaagaccagaatattgaagatcacttcgaaaaacctgggaaagatataagaaatcatatcgtacagagactgtgtgaaagtaaagaagatggtcagtatggagaagttgtcagccaaattccaaatcttgatctgaacgagaacatttctactggattaaaaccatgtgaatgcagtatttgtggaaaagtctttgtacgtcattccctccttaataggcatatcctagctcactcaggatacaaaccatatggagagaagcaatataaatgtgaacagtgtgggaaattcttcgtttctgttccaggtgttagaagacacatgataatgcacagtggaaatccagcttataaatgtacgatatgtgggaaagctttttattttctcaattcagttgaaagacatcagagaactcacacaggagaaaaaccctataaatgtaaacaatgtggtaaagcattcactgtttccggttcttgtctaatacatgaacgaactcacactggagagaaaccctacgaatgtaaggaatgtgggaaaacattcagattttcttgttcttttaagacgcatgaaaggactcacactggagaaagaccctataaatgtaccaaatgtgataaagccttcagctgttccacttcccttcgttaccatggaagcattcatactggagagagaccctatgagtgtaaacaatgtggcaaagcctttagtcgtttgagttccctttgtaaccatagaagtactcataccggagagaaaccctatgaatgtaaacaatgtgatcaagccttcagtcgcctcagttcccttcacctccacgaaagaattcatactggagaaaaaccctatgaatgtaagaaatgcggtaaagcctacactcgttccagtcaccttactcgccatgaaagaagtcatgatatagaggctgggtgtagtgactcagcctataatcccagcactttgggaggccaaggcgtgtggattgcttgagcccaggagttcataaccagcctggattaaaacaatgtgaaacaacctgggcaacatggtgaaaccctgtctttacaaaaaataaaataatgccgggcacggtggcttacgcctgtaatcccagcactttgggaggccgaggcgggtggatcacgaggtcaggagatcgagaccatcctggccaacacggtgaaaccccgtctctactaaaaatacaaaaaattagctgggcgtggtggcgggcgcctgtggtcccagttactcggggggctgaggcaggagaatggcatgaacccgggaggcggaacttgcggtgagccgagatcgcaccactgcacttcagcctgggtgacagagtgagactctgtctcaaaaaataagataaaataaaataaaaaaataattagctgggcatggtggcacattgcagttgtcttagttgtttttcaaggacatgaaaagccgtgcgcaaggcggnggaagccctgtgcatgcagatcacgaggtcgggagattgagaccatcctggccaacatggtgaaacctcgtctctactaaaaacacaaaaattactgggattacaggcgcccaccactatgtccagctaattttttgtatttttagtagagacagggtttcaccatgttggctaggctggtcttgaactcctgacctcatgatttgccccccctcagcctcccaaagtgctgggattacaggcatgagccactgtgcccagcggagtaagtttaatttgtatgtattgttctgtgattaatggaccagtgagtaatgattgctaattgttgcgattttcttactagcctcacttggcaaattttggttatcccttgtccattatacacattccacctttttttattaaaggaaaaactactcttggtgtaaagatgtttattttttgctaataatgagttggtattaattcctaagtacataaagtttatcatagagtatcatctcgtga

SEQ ID NO: 48516 - DNA, 2237 bp, Homo sapiens
  misc_feature (1727)..(1727): n is a, c, g, or t
gcctggcggttgctttgtctctccttcgccggagccggctcttcctgttagtctccgctgctagttcttggctctgggaggcccaggtggctctgcagcagcctctgccaccctgtgacctgcgagtattgggacatccctagctgacgccaggacacccgggaagccgaggaatggactcggtggcttttgaggatgtggctgtgaactttacccaggaggaatgggctttgctagattcttctcagaagaatctctacagagaagtgatgcaggaaacctgcaggaacctggcttctgtagaaatcatatcgtacagagactgtgtgaaagtaaagaagatggtcagtatggagaagttgtcagccaaattccaaatcttgatctgaacgagaacatttctactggattaaaaccatgtgaatgcagtatttgtggaaaagtctttgtacgtcattccctccttaataggcatatcctagctcactcaggatacaaaccatatggagagaagcaatataaatgtgaacagtgtgggaaattcttcgtttctgttccaggtgttagaagacacatgataatgcacagtggaaatccagcttataaatgtacgatatgtgggaaagctttttattttctcaattcagttgaaagacatcagagaactcacacaggagaaaaaccctataaatgtaaacaatgtggtaaagcattcactgtttccggttcttgtctaatacatgaacgaactcacactggagagaaaccctacgaatgtaaggaatgtgggaaaacattcagattttcttgttcttttaagacgcatgaaaggactcacactggagaaagaccctataaatgtaccaaatgtgataaagccttcagctgttccacttcccttcgttaccatggaagcattcatactggagagagaccctatgagtgtaaacaatgtggcaaagcctttagtcgtttgagttccctttgtaaccatagaagtactcataccggagagaaaccctatgaatgtaaacaatgtgatcaagccttcagtcgcctcagttcccttcacctccacgaaagaattcatactggagaaaaaccctatgaatgtaagaaatgcggtaaagcctacactcgttccagtcaccttactcgccatgaaagaagtcatgatatagaggctgggtgtagtgactcagcctataatcccagcactttgggaggccaaggcgtgtggattgcttgagcccaggagttcataaccagcctggattaaaacaatgtgaaacaacctgggcaacatggtgaaaccctgtctttacaaaaaataaaataatgccgggcacggtggcttacgcctgtaatcccagcactttgggaggccgaggcgggtggatcacgaggtcaggagatcgagaccatcctggccaacacggtgaaaccccgtctctactaaaaatacaaaaaattagctgggcgtggtggcgggcgcctgtggtcccagttactcggggggctgaggcaggagaatggcatgaacccgggaggcggaacttgcggtgagccgagatcgcaccactgcacttcagcctgggtgacagagtgagactctgtctcaaaaaataagataaaataaaataaaaaaataattagctgggcatggtggcacattgcagttgtcttagttgtttttcaaggacatgaaaagccgtgcgcaaggcggnggaagccctgtgcatgcagatcacgaggtcgggagattgagaccatcctggccaacatggtgaaacctcgtctctactaaaaacacaaaaattactgggattacaggcgcccaccactatgtccagctaattttttgtatttttagtagagacagggtttcaccatgttggctaggctggtcttgaactcctgacctcatgatttgccccccctcagcctcccaaagtgctgggattacaggcatgagccactgtgcccagcggagtaagtttaatttgtatgtattgttctgtgattaatggaccagtgagtaatgattgctaattgttgcgattttcttactagcctcacttggcaaattttggttatcccttgtccattatacacattccacctttttttattaaaggaaaaactactcttggtgtaaagatgtttattttttgctaataatgagttggtattaattcctaagtacataaagtttatcatagagtatcatctcgtga

SEQ ID NO: 48517 - DNA, 2298 bp, Homo sapiens
  misc_feature (1788)..(1788): n is a, c, g, or t
gcctggcggttgctttgtctctccttcgccggagccggctcttcctgttagtctccgctgctagttcttggctctgggaggcccaggtggctctgcagcagcctctgccaccctgtgacctgcgagtattgggacatccctagctgacgccaggacacccgggaagccgaggaatggactcggtggcttttgaggatgtggctgtgaactttacccaggaggaatgggctttgctagattcttctcagaagaatctctacagagaagtgatgcaggaaacctgcaggaacctggcttctgtaggaagccaatggaaagaccagaatattgaagatcacttcgaaaaacctgggaaagatataagaaatcatatcgtacagagactgtgtgaaagtaaagaagatggtcagtatggagaagttgtcagccaaattccaaatcttgatctgaacgagaacatttctactggattaaaaccatgtgaatgcagtatttgtggaaaagtctttgtacgtcattccctccttaataggcatatcctagctcactcaggatacaaaccatatggagagaagcaatataaatgtgaacagtgtgggaaattcttcgtttctgttccaggtgttagaagacacatgataatgcacagtggaaatccagcttataaatgtacgatatgtgggaaagctttttattttctcaattcagttgaaagacatcagagaactcacacaggagaaaaaccctataaatgtaaacaatgtggtaaagcattcactgtttccggttcttgtctaatacatgaacgaactcacactggagagaaaccctacgaatgtaaggaatgtgggaaaacattcagattttcttgttcttttaagacgcatgaaaggactcacactggagaaagaccctataaatgtaccaaatgtgataaagccttcagctgttccacttcccttcgttaccatggaagcattcatactggagagagaccctatgagtgtaaacaatgtggcaaagcctttagtcgtttgagttccctttgtaaccatagaagtactcataccggagagaaaccctatgaatgtaaacaatgtgatcaagccttcagtcgcctcagttcccttcacctccacgaaagaattcatactggagaaaaaccctatgaatgtaagaaatgcggtaaagcctacactcgttccagtcaccttactcgccatgaaagaagtcatgatatagaggctgggtgtagtgactcagcctataatcccagcactttgggaggccaaggcgtgtggattgcttgagcccaggagttcataaccagcctggattaaaacaatgtgaaacaacctgggcaacatggtgaaaccctgtctttacaaaaaataaaataatgccgggcacggtggcttacgcctgtaatcccagcactttgggaggccgaggcgggtggatcacgaggtcaggagatcgagaccatcctggccaacacggtgaaaccccgtctctactaaaaatacaaaaaattagctgggcgtggtggcgggcgcctgtggtcccagttactcggggggctgaggcaggagaatggcatgaacccgggaggcggaacttgcggtgagccgagatcgcaccactgcacttcagcctgggtgacagagtgagactctgtctcaaaaaataagataaaataaaataaaaaaataattagctgggcatggtggcacattgcagttgtcttagttgtttttcaaggacatgaaaagccgtgcgcaaggcggnggaagccctgtgcatgcagatcacgaggtcgggagattgagaccatcctggccaacatggtgaaacctcgtctctactaaaaacacaaaaattactgggattacaggcgcccaccactatgtccagctaattttttgtatttttagtagagacagggtttcaccatgttggctaggctggtcttgaactcctgacctcatgatttgccccccctcagcctcccaaagtgctgggattacaggcatgagccactgtgcccagcggagtaagtttaatttgtatgtattgttctgtgattaatggaccagtgagtaatgattgctaattgttgcgattttcttactagcctcacttggcaaattttggttatcccttgtccattatacacattccacctttttttattaaaggaaaaactactcttggtgtaaagatgtttattttttgctaataatgagttggtattaattcctaagtacataaagtttatcatagagtatcatctcgtga

SEQ ID NO: 48518 - DNA, 345 bp, Homo sapiens
agacagggtctcactctgttacccaggctggaatgcagtggtgtgatctgggctcactgcagccacaacacccccaggctcagatgatcctccttgtctcagcctcccaaagtgctgggattataggcgtgagccacctcacctggcagtactgtgttcttaatgtatatcatagttaacccccactcccttattttcttactaaataataggtgtgaaaattaaatttttgacatatatggctctagcagaggattgcttttacagagaaataggtgcctgtcttctactttgtagaggactcttacctgttgttttcttctcaagagctgctcacaggttagt

SEQ ID NO: 48519 - DNA, 361 bp, Homo sapiens
attcatggaaatgctctgccagaggctcgggaatctctgcagagaacattttctgtactgcaggatgacagaggctgtcgagaataaaatgaagctgagtgcttgtggttgggattccttctttttcctcttttattgtttctccttagctttgtgcccaggtcatttgtctatcttccttcccttgaaatccctcctgctttggggccctgcactgcctctggagcatccagttctgagattccaatcacagggccaggcatgaaacacggccatccctcaggcacacggctgctgggatatggcaagcttgttaacacggcaggacaacccaagatgccatgttcctaaagaaaatggg

SEQ ID NO: 48520 - DNA, 222 bp, Homo sapiens
tatcccacacaaggacttattctagaggctgcctttgagttgaaaccccagtgaaacacagtgggaagggctggcttgcttggtggcagctcagaggtcccccaggtttgaaaggctcatgccaccctcttcccctgctctgggaccttcccagtggtgaaaagggaaggcagcagaaagagaatgctcccctttctgtcaaggccgaaagtgtccacctgg

SEQ ID NO: 48521 - DNA, 1714 bp, Homo sapiens
ggcggaagcggaagagcaggtctccaggggagcgatggcagccgggggtctgagccgctccgagcgcaaagcggcggagcgggtccggaggttgcgggaggagcagcagagggagcgcctccgccaggtgtcgcgcatcctgaggaaggcggcggcggagcgcagcgccgaggagggccggctgctggccgagagcgcggacctggtaacggagctgcagggccggagccggcggcgcgagggcctgaagcggcggcaggaggaggtgtgcgacgacccggaggagctgcgggggaaggtccgggagctggccagcgccgtccggaacgccaaatacttggtcgtctacacaggcgcgggaatcagcacggcagcgtctatcccagactaccggggccctaatggagtgtggacactgcttcagaaagggagaagcgttagtgctgccgacctgagcgaggccgagccaaccctcacccacatgagcatcacccgtctgcatgagcagaagctggtgcagcatgtggtgtctcagaactgtgacgggctccacctgaggagtgggctgccgcgcacggccatctccgagctccacgggaacatgtacattgaagtctgtacctcctgcgttcccaacagggagtacgtgcgggtgttcgatgtgacggagcgcactgccctccacagacaccagacaggccggacctgccacaagtgtgggacccagctgcgggacaccattgtgcactttggggagagggggacgttggggcagcctctgaactgggaagcggcgaccgaggctgccagcagagcagacaccatcctgtgtctagggtccagcctgaaggttctaaagaagtacccacgcctctggtgcatgaccaagccccctagccggcggccgaagctttacatcgtgaacctgcagtggaccccgaaggatgactgggctgccctgaagctacatgggaagtgtgatgacgtcatgcggctcctcatggccgagctgggcttggagatccccgcctatagcaggtggcaggatcccattttctcactggcgactcccctgcgtgctggtgaagaaggcagccacagtcggaagtcgctgtgcagaagcagagaggaggccccgcctggggaccggggtgcaccgcttagctcggcccccatcctagggggctggtttggcaggggctgcacaaaacgcacaaaaaggaagaaagtgacgtaatcacgtgctcgatgaagaacagttggcactttgcagatggccagtgtcacggtgaaggctgggttgcccccacgggtctagggagaacgaactctttggggatgacattttcaccgtgacatttttagccatttgtccttgaggaagccccttgcactgctgcggttgtaccctgatacggcctggccatcgaggacacctgcccatccggcctctgtgtcaagaggtggcagccgcacctttctgtgagaacggaactcgggttatttcagccccggcctgcagagtggaagcgcccagcggcctttcctcgctcaccaggccagtctcagggcctcaccgtatttctactactacttaatgaaaaagtgtgaactttatagaatcctctctgtactggatgtgcggcagaggggtggctccgagcctcggctctatgcagacctttttatttctattaaacgtttctgcactggc

SEQ ID NO: 48522 - DNA, 2521 bp, Homo sapiens
ggcggaagcggaagagcaggtctccaggggagcgatggcagccgggggtctgagccgctccgagcgcaaagcggcggagcgggtccggaggttgcgggaggagcagcagagggagcgcctccgccaggtgtcgcgcatcctgaggaaggcggcggcggagcgcagcgccgaggagggccggctgctggccgagagcgcggacctggtaacggagctgcagggccggagccggcggcgcgagggcctgaagcggcggcaggaggaggtgtgcgacgacccggaggagctgcgggggaaggtccgggagctggccagcgccgtccggaacgccaaatacttggtcgtctacacaggcgcgggaatcagcacggcagcgtctatcccagactaccggggccctaatggagtgtggacactgcttcagaaagggagaagcgttagtgctgccgacctgagcgaggccgagccaaccctcacccacatgagcatcacccgtctgcatgagcagaagctggtaagagccctgggtggctggtacacttgccagggaccaggcagagcaccttggtgcccagtgggcaactaactgcacccgccctctgtctgccagttgactcccatgatgagcacccaccaagcgggttaggccgcgggtttgatcctcctgtgcttgactctccaggacagaaggggagctccccctctgaaccatcccatccgcagccagcctcagcctcagagctgctggtggcctttcccctttgtgattcccttgcatttttctgtggacctcagaagccatcctagtcacaggggaggcttataggacatctctggggaccttctgctgaacaccctcaaccaatggggtgtagtggttgatctgcctaggtccccagggacctgaaatgtcatgacccaagagagcatggatctggggcagagtggcccttgccaaaccccgagccacttcccaaccttgccgggacggtgcaacctcttgccctcccagccactccaggtgcatcagggctggaggaaggacagcccctccccaccacaggccctcttgactcctggtggttggacctgttgtgtgttttactttctaaggctctctggggggacggagctgcccctggttttgggagccatcggcggggctcagaacagcctcgctgtggccgggtactgacctccccaccaccactggcagccatccctccccttgccacccgttctgccttcgtgcagcatgtggtgtctcagaactgtgacgggctccacctgaggagtgggctgccgcgcacggccatctccgagctccacgggaacatgtacattgaagtgagcagtcctgcagggacccagggtctccatgggcaggcgggtcccactcactgtgccctcttgcctctaggtctgtacctcctgcgttcccaacagggagtacgtgcgggtgttcgatgtgacggagcgcactgccctccacagacaccagacaggccggacctgccacaagtgtgggacccagctgcgggacaccattgtgcactttggggagagggggacgttggggcagcctctgaactgggaagcggcgaccgaggctgccagcagagcagacaccatcctgtgtctagggtccagcctgaaggttctaaagaagtacccacgcctctggtgcatgaccaagccccctagccggcggccgaagctttacatcgtgaacctgcagtggaccccgaaggatgactgggctgccctgaagctacatgggaagtgtgatgacgtcatgcggctcctcatggccgagctgggcttggagatccccgcctatagcaggtggcaggatcccattttctcactggcgactcccctgcgtgctggtgaagaaggcagccacagtcggaagtcgctgtgcagaagcagagaggaggccccgcctggggaccggggtgcaccgcttagctcggcccccatcctagggggctggtttggcaggggctgcacaaaacgcacaaaaaggaagaaagtgacgtaatcacgtgctcgatgaagaacagttggcactttgcagatggccagtgtcacggtgaaggctgggttgcccccacgggtctagggagaacgaactctttggggatgacattttcaccgtgacatttttagccatttgtccttgaggaagccccttgcactgctgcggttgtaccctgatacggcctggccatcgaggacacctgcccatccggcctctgtgtcaagaggtggcagccgcacctttctgtgagaacggaactcgggttatttcagccccggcctgcagagtggaagcgcccagcggcctttcctcgctcaccaggccagtctcagggcctcaccgtatttctactactacttaatgaaaaagtgtgaactttatagaatcctctctgtactggatgtgcggcagaggggtggctccgagcctcggctctatgcagacctttttatttctattaaacgtttctgcactggc

SEQ ID NO: 48523 - DNA, 836 bp, Homo sapiens
taggtagagccggtgttagtttcatcgtgacctgcagtggaccccgaaggatgactgggctgccctgaagctacatgggaagtgtgatgacgtcatgcggctcctcatggccgagctgggcttggagatccccgcctatagcaggtggcaggatcccattttctcactggcgactcccctgcgtgctggtgaagaaggcagccacagtcggaagtcgctgtgcagaagcagagaggaggccccgcctggggaccggggtgcaccgcttagctcggcccccatcctagggggctggtttggcaggggctgcacaaaacgcacaaaaaggaagaaagtgacgtaatcacgtgctcgatgaagaacagttggcactttgcagatggccagtgtcacggtgaaggctgggttgcccccacgggtctagggagaacgaactctttggggatgacattttcaccgtgacatttttagccatttgtccttgaggaagccccttgcactgctgcggttgtaccctgatacggcctggccatcgaggacacctgcccatccggcctctgtgtcaagaggtggcagccgcacctttctgtgagaacggaactcgggttatttcagccccggcctgcagagtggaagcgcccagcggcctttcctcgctcaccaggccagtctcagggcctcaccgtatttctactactacttaatgaaaaagtgtgaactttatagaatcctctctgtactggatgtgcggcagaggggtggctccgagcctcggctctatgcagacctttttatttctattaaacgtttctgcactggcaaaacaaaaaaaaaaa

SEQ ID NO: 48524 - DNA, 1641 bp, Homo sapiens
ggcggaagcggaagagcaggtctccaggggagcgatggcagccgggggtctgagccgctccgagcgcaaagcggcggagcgggtccggaggttgcgggaggagcagcagagggagcgcctccgccaggtgtcgcgcatcctgaggaaggcggcggcggagcgcagcgccgaggagggccggctgctggccgagagcgcggacctggtaacggagctgcagggccggagccggcggcgcgagggcctgaagcggcggcaggaggaggtgtgcgacgacccggaggagctgcgggggaaggtccgggagctggccagcgccgtccggaacgccaaatacttggtcgtctacacaggcgcgggaatcagcacggcagcgtctatcccagactaccggggccctaatggagtgtggacactgcttcagaaagggagaagcgttagtgctgccgacctgagcgaggccgagccaaccctcacccacatgagcatcacccgtctgcatgagcagaagctggtgcagcatgtggtgtctcagaactgtgacgggctccacctgaggagtgggctgccgcgcacggccatctccgagctccacgggaacatgtacattgaagtctgtacctcctgcgttcccaacagggagtacgtgcgggtgttcgatgtgacggagcgcactgccctccacagacaccagacaggccggacctgccacaagtgtgggacccagctgcgggacaccattgtgcactttggggagagggggacgttggggcagcctctgaactgggaagcggcgaccgaggctgccagcagagcagacaccatcctgtgtctagggtccagcctgaaggttctaaagaagtacccacgcctctggtgcatgaccaagccccctagccggcggccgaagctttacatcgtgaacctgcagtggaccccgaaggatgactgggctgccctgaagctacatgggaagtgtgatgacgtcatgcgactcccctgcgtgctggtgaagaaggcagccacagtcggaagtcgctgtgcagaagcagagaggaggccccgcctggggaccggggtgcaccgcttagctcggcccccatcctagggggctggtttggcaggggctgcacaaaacgcacaaaaaggaagaaagtgacgtaatcacgtgctcgatgaagaacagttggcactttgcagatggccagtgtcacggtgaaggctgggttgcccccacgggtctagggagaacgaactctttggggatgacattttcaccgtgacatttttagccatttgtccttgaggaagccccttgcactgctgcggttgtaccctgatacggcctggccatcgaggacacctgcccatccggcctctgtgtcaagaggtggcagccgcacctttctgtgagaacggaactcgggttatttcagccccggcctgcagagtggaagcgcccagcggcctttcctcgctcaccaggccagtctcagggcctcaccgtatttctactactacttaatgaaaaagtgtgaactttatagaatcctctctgtactggatgtgcggcagaggggtggctccgagcctcggctctatgcagacctttttatttctattaaacgtttctgcactggc

SEQ ID NO: 48525 - DNA, 1550 bp, Homo sapiens
cgcgtgcgcgcgcgggcgcccccggtttcgggagcagctggggcgacgggcggtcccgggtggggcggcccggggcggtgaccaccctggcgtcttggcaggtgtgcgacgacccggaggagctgcgggggaaggtccgggagctggccagcgccgtccggaacgccaaatacttggtcgtctacacaggcgcgggaatcagcacggcagcgtctatcccagactaccggggccctaatggagtgtggacactgcttcagaaagggagaagcgttagtgctgccgacctgagcgaggccgagccaaccctcacccacatgagcatcacccgtctgcatgagcagaagctggtgcagcatgtggtgtctcagaactgtgacgggctccacctgaggagtgggctgccgcgcacggccatctccgagctccacgggaacatgtacattgaagtctgtacctcctgcgttcccaacagggagtacgtgcgggtgttcgatgtgacggagcgcactgccctccacagacaccagacaggccggacctgccacaagtgtgggacccagctgcgggacaccattgtgcactttggggagagggggacgttggggcagcctctgaactgggaagcggcgaccgaggctgccagcagagcagacaccatcctgtgtctagggtccagcctgaaggttctaaagaagtacccacgcctctggtgcatgaccaagccccctagccggcggccgaagctttacatcgtgaacctgcagtggaccccgaaggatgactgggctgccctgaagctacatgggaagtgtgatgacgtcatgcggctcctcatggccgagctgggcttggagatccccgcctatagcaggtggcaggatcccattttctcactggcgactcccctgcgtgctggtgaagaaggcagccacagtcggaagtcgctgtgcagaagcagagaggaggccccgcctggggaccggggtgcaccgcttagctcggcccccatcctagggggctggtttggcaggggctgcacaaaacgcacaaaaaggaagaaagtgacgtaatcacgtgctcgatgaagaacagttggcactttgcagatggccagtgtcacggtgaaggctgggttgcccccacgggtctagggagaacgaactctttggggatgacattttcaccgtgacatttttagccatttgtccttgaggaagccccttgcactgctgcggttgtaccctgatacggcctggccatcgaggacacctgcccatccggcctctgtgtcaagaggtggcagccgcacctttctgtgagaacggaactcgggttatttcagccccggcctgcagagtggaagcgcccagcggcctttcctcgctcaccaggccagtctcagggcctcaccgtatttctactactacttaatgaaaaagtgtgaactttatagaatcctctctgtactggatgtgcggcagaggggtggctccgagcctcggctctatgcagacctttttatttctattaaacgtttctgcactggc

SEQ ID NO: 48526 - DNA, 2690 bp, Homo sapiens
ggtcgctagagcaaactcagacacacactctgcgctcttggagttgggaaacccacctgcgttggctttttgtgggaggtggccttgattgggccttgaaggatgggtgagatttacagaaggttggaatgaggcactccaagcaaagaacagcagaggctcagcagcaagaatgcaaaaagggagttcactactgactcaaatacccggagccctggggtttagtctcctccctccacaagtcacatgtaaaagtccagtcatgctgggcgcggtggctcatgcctataatcctagcactttgggaggccgaggtgggcggatcatgaggtcagtagttcaagaacaacctggccaacacggtgaaaccctgtctctactaaaaatacaaaaattagtcgggcatggtggtgggcacctgcaatcccagctactcgagaggctgaggcaggagaatcacttgaaactggaaggcggaggttgcagtgagccgagatcatgccactgcattccagcctgggcgaaagagctaaactccgtctctcaaaaaaaaaaaaaaaaaaaaaagtccagtcatgtaattatgtaacagtcacgtgacctgttatggaacttccaatggcaactaaaagcacatgcagctagtggatttcatcggagtgtttgaggttcccgtcttgaatgtgactgtcggaactactgtccgggggggtggtgcatttttctgagtttaagcaggagtcgggagtccccaaaagggaacacaagacaccttgatcctggcatatcttgtgtgccctctgtgggcctcagtttgtttcacaggattgaaaacctgggaagttagatgctcatctcatctgaagaagttgttctgcctttgttaaggtggagcgggaatagtcagcactgggacatgagaatggacagtcgcctggacccacctagggattcaccatttgctaaatgtgtgagctgtgggctcggccctgggggcactttaggaacatgactagtcttcccctgcagtgtggaggacacatgtgccacagagcccagctttgtgctcggtgccagagaggcttccggaggcaggcagggctgcgtgcagcctggaaggatgagccaggccaggcgggaaacggaagtccaggtagaagggaggagccgaattggggtacactccatatgggctcaggcaggtcagcctgtggaatgaatagaggccaacatgcaggccagcccggaatgcggcaggagtgacagtggctttccgtttctgggaattctgccagtacctacagtggtgccttttgacttggcttaccttttttctcgacatgcaggcagcgtctatcccagactaccggggccctaatggagtgtggacactgcttcagaaagggagaagcgttagtgctgccgacctgagcgaggccgagccaaccctcacccacatgagcatcacccgtctgcatgagcagaagctggtgcagcatgtggtgtctcagaactgtgacgggctccacctgaggagtgggctgccgcgcacggccatctccgagctccacgggaacatgtacattgaagtctgtacctcctgcgttcccaacagggagtacgtgcgggtgttcgatgtgacggagcgcactgccctccacagacaccagacaggccggacctgccacaagtgtgggacccagctgcgggacaccattgtgcactttggggagagggggacgttggggcagcctctgaactgggaagcggcgaccgaggctgccagcagagcagacaccatcctgtgtctagggtccagcctgaaggttctaaagaagtacccacgcctctggtgcatgaccaagccccctagccggcggccgaagctttacatcgtgaacctgcagtggaccccgaaggatgactgggctgccctgaagctacatgggaagtgtgatgacgtcatgcggctcctcatggccgagctgggcttggagatccccgcctatagcaggtggcaggatcccattttctcactggcgactcccctgcgtgctggtgaagaaggcagccacagtcggaagtcgctgtgcagaagcagagaggaggccccgcctggggaccggggtgcaccgcttagctcggcccccatcctagggggctggtttggcaggggctgcacaaaacgcacaaaaaggaagaaagtgacgtaatcacgtgctcgatgaagaacagttggcactttgcagatggccagtgtcacggtgaaggctgggttgcccccacgggtctagggagaacgaactctttggggatgacattttcaccgtgacatttttagccatttgtccttgaggaagccccttgcactgctgcggttgtaccctgatacggcctggccatcgaggacacctgcccatccggcctctgtgtcaagaggtggcagccgcacctttctgtgagaacggaactcgggttatttcagccccggcctgcagagtggaagcgcccagcggcctttcctcgctcaccaggccagtctcagggcctcaccgtatttctactactacttaatgaaaaagtgtgaactttatagaatcctctctgtactggatgtgcggcagaggggtggctccgagcctcggctctatgcagacctttttatttctattaaacgtttctgcactggc

SEQ ID NO: 48527 - DNA, 2080 bp, Homo sapiens
  misc_feature (7)..(7): n is a, c, g, or t
ggattantaagaggtggtgtctcacatgcagctagtggatttcatcggagtgtttgaggttcccgtcttgaatgtgactgtcggaactactgtccgggggggtggtgcatttttctgagtttaagcaggagtcgggagtccccaaaagggaacacaagacaccttgatcctggcatatcttgtgtgccctctgtgggcctcagtttgtttcacaggattgaaaacctgggaagttagatgctcatctcatctgaagaagttgttctgcctttgttaaggtggagcgggaatagtcagcactgggacatgagaatggacagtcgcctggacccacctagggattcaccatttgctaaatgtgtgagctgtgggctcggccctgggggcactttaggaacatgactagtcttcccctgcagtgtggaggacacatgtgccacagagcccagctttgtgctcggtgccagagaggcttccggaggcaggcagggctgcgtgcagcctggaaggatgagccaggccaggcgggaaacggaagtccaggtagaagggaggagccgaattggggtacactccatatgggctcaggcaggtcagcctgtggaatgaatagaggccaacatgcaggccagcccggaatgcggcaggagtgacagtggctttccgtttctgggaattctgccagtacctacagtggtgccttttgacttggcttaccttttttctcgacatgcaggcagcgtctatcccagactaccggggccctaatggagtgtggacactgcttcagaaagggagaagcgttagtgctgccgacctgagcgaggccgagccaaccctcacccacatgagcatcacccgtctgcatgagcagaagctggtgcagcatgtggtgtctcagaactgtgacgggctccacctgaggagtgggctgccgcgcacggccatctccgagctccacgggaacatgtacattgaagtctgtacctcctgcgttcccaacagggagtacgtgcgggtgttcgatgtgacggagcgcactgccctccacagacaccagacaggccggacctgccacaagtgtgggacccagctgcgggacaccattgtgcactttggggagagggggacgttggggcagcctctgaactgggaagcggcgaccgaggctgccagcagagcagacaccatcctgtgtctagggtccagcctgaaggttctaaagaagtacccacgcctctggtgcatgaccaagccccctagccggcggccgaagctttacatcgtgaacctgcagtggaccccgaaggatgactgggctgccctgaagctacatgggaagtgtgatgacgtcatgcggctcctcatggccgagctgggcttggagatccccgcctatagcaggtggcaggatcccattttctcactggcgactcccctgcgtgctggtgaagaaggcagccacagtcggaagtcgctgtgcagaagcagagaggaggccccgcctggggaccggggtgcaccgcttagctcggcccccatcctagggggctggtttggcaggggctgcacaaaacgcacaaaaaggaagaaagtgacgtaatcacgtgctcgatgaagaacagttggcactttgcagatggccagtgtcacggtgaaggctgggttgcccccacgggtctagggagaacgaactctttggggatgacattttcaccgtgacatttttagccatttgtccttgaggaagccccttgcactgctgcggttgtaccctgatacggcctggccatcgaggacacctgcccatccggcctctgtgtcaagaggtggcagccgcacctttctgtgagaacggaactcgggttatttcagccccggcctgcagagtggaagcgcccagcggcctttcctcgctcaccaggccagtctcagggcctcaccgtatttctactactacttaatgaaaaagtgtgaactttatagaatcctctctgtactggatgtgcggcagaggggtggctccgagcctcggctctatgcagacctttttatttctattaaacgtttctgcactggc

SEQ ID NO: 48528 - DNA, 1730 bp, Homo sapiens
ggcggaagcggaagagcaggtctccaggggagcgatggcagccgggggtctgagccgctccgagcgcaaagcggcggagcgggtccggaggttgcgggaggagcagcagagggagcgcctccgccaggtgtcgcgcatcctgaggaaggcggcggcggagcgcagcgccgaggagggccggctgctggccgagagcgcggacctggtaacggagctgcagggccggagccggcggcgcgagggcctgaagcggcggcaggaggaggtgtgcgacgacccggaggagctgcgggggaaggtccgggagctggccagcgccgtccggaacgccaaatacttggtcgtctacacaggcgcgggaatcagcacggcagcgtctatcccagactaccggggccctaatggagtgtggacactgcttcagaaagggagaagcgttagtgctgccgacctgagcgaggccgagccaaccctcacccacatgagcatcacccgtctgcatgagcagaagctggtgcagcatgtggtgtctcagaactgtgacgggctccacctgaggagtgggctgccgcgcacggccatctccgagctccacgggaacatgtacattgaagtctgtacctcctgcgttcccaacagggagtacgtgcgggtgttcgatgtgacggagcgcactgccctccacagacaccagacaggccggacctgccacaagtgtgggacccagctgcgggacaccattgtgcactttggggagagggggacgttggggcagcctctgaactgggaagcggcgaccgaggctgccagcagagcagacaccatcctgtgtctagggtccagcctgaaggttctaaagaagtacccacgcctctggtgcatgaccaagccccctagccggcggccgaagctttacatcgtgaacctgcagtggaccccgaaggatgactgggctgccctgaagctacatgggaagtgtgatgacgtcatgcggctcctcatggccgagctgggcttggagatccccgcctatagcaggtggcaggatcccattttctcactggcgactcccctgcgtgctggtgaagaaggcagccacagtcggaagtcgctgtgcagaagcagagaggaggccccgcctggggaccggggtgcaccgcttagctcggcccccatcctagggggctggtttggcaggggctgcacaaaacgcacaaaaaggaagaaagtgacgtaatcacgtgctcgatgaagaacagttggcactttgcagatggccagtgtcacggtgaaggctgggttgcccccacgggtctagggagaacgaactctttggggatgacattttcaccgtgacatttttagccatttgtccttgaggaagccccttgcactgctgcggttgtaccctgatacggcctggccatcgaggacacctgcccatccggcctctgtgtcaagaggtggcagccgcacctttctgtgagaacggaactcgggttatttcagccccggcctgcagagtggaagcgcccagcggcctttcctcgctcaccaggccagtctcagggcctcaccgtatttctactactacttaatgaaaaagtgtgaactttatagaatcctctctgtactggatgtgcggcagaggggtggctccgagcctcggctctatgcagacctttttatttctattaaacgtttctgcactggcaaaacaaaaaaaaaaa

SEQ ID NO: 48529 - DNA, 1777 bp, Homo sapiens
  misc_feature (403)..(403): n is a, c, g, or t
gtgggtgttgagtcctgctcctgagctgcaaatgcggtggagctgggtccggaggttgcgggatgtgagcagcagagtgtgatgctgcctccgccagtgtgtctgcatgcatccttgagtgaatgtgctgtgctgtgctgtgatgctgcatgctgcctgatgtgatgtgtgcctggcttgcttggcctgatgatgctgctgtgaccttggtaactgtgatgcttgcatgtgtgcctggatgcctgtgctgtgctgctgatgtgtgccttgaatgctgtgctgtgcatgtgatgtgatgtgttgttgctgatctgaaccctgtgatgtgaatgcttgctgtgtggtgaatgtgtcctgtgtgagcttgtgccatgctgcctgtcctggaacgccaaatacttgngtcgtctacacaggcgcgggaatcagcacggcagcgtctatcccagactaccggggccctaatggagtgtggacactgcttcagaaagggagaagcgttagtgctgccgacctgagcgaggccgagccaaccctcacccacatgagcatcacccgtctgcatgagcagaagctggtgcagcatgtggtgtctcagaactgtgacgggctccacctgaggagtgggctgccgcgcacggccatctccgagctccacgggaacatgtacattgaagtctgtacctcctgcgttcccaacagggagtacgtgcgggtgttcgatgtgacggagcgcactgccctccacagacaccagacaggccggacctgccacaagtgtgggacccagctgcgggacaccattgtgcactttggggagagggggacgttggggcagcctctgaactgggaagcggcgaccgaggctgccagcagagcagacaccatcctgtgtctagggtccagcctgaaggttctaaagaagtacccacgcctctggtgcatgaccaagccccctagccggcggccgaagctttacatcgtgaacctgcagtggaccccgaaggatgactgggctgccctgaagctacatgggaagtgtgatgacgtcatgcggctcctcatggccgagctgggcttggagatccccgcctatagcaggtggcaggatcccattttctcactggcgactcccctgcgtgctggtgaagaaggcagccacagtcggaagtcgctgtgcagaagcagagaggaggccccgcctggggaccggggtgcaccgcttagctcggcccccatcctagggggctggtttggcaggggctgcacaaaacgcacaaaaaggaagaaagtgacgtaatcacgtgctcgatgaagaacagttggcactttgcagatggccagtgtcacggtgaaggctgggttgcccccacgggtctagggagaacgaactctttggggatgacattttcaccgtgacatttttagccatttgtccttgaggaagccccttgcactgctgcggttgtaccctgatacggcctggccatcgaggacacctgcccatccggcctctgtgtcaagaggtggcagccgcacctttctgtgagaacggaactcgggttatttcagccccggcctgcagagtggaagcgcccagcggcctttcctcgctcaccaggccagtctcagggcctcaccgtatttctactactacttaatgaaaaagtgtgaactttatagaatcctctctgtactggatgtgcggcagaggggtggctccgagcctcggctctatgcagacctttttatttctattaaacgtttctgcactggc

SEQ ID NO: 48530 - DNA, 3351 bp, Homo sapiens
ggtcgctagagcaaactcagacacacactctgcgctcttggagttgggaaacccacctgcgttggctttttgtgggaggtggccttgattgggccttgaaggatgggtgagatttacagaaggttggaatgaggcactccaagcaaagaacagcagaggctcagcagcaagaatgcaaaaagggagttcactactgactcaaatacccggagccctggggtttagtctcctccctccacaagtcacatgtaaaagtccagtcatgctgggcgcggtggctcatgcctataatcctagcactttgggaggccgaggtgggcggatcatgaggtcagtagttcaagaacaacctggccaacacggtgaaaccctgtctctactaaaaatacaaaaattagtcgggcatggtggtgggcacctgcaatcccagctactcgagaggctgaggcaggagaatcacttgaaactggaaggcggaggttgcagtgagccgagatcatgccactgcattccagcctgggcgaaagagctaaactccgtctctcaaaaaaaaaaaaaaaaaaaaaagtccagtcatgtaattatgtaacagtcacgtgacctgttatggaacttccaatggcaactaaaagcacatgcagctagtggatttcatcggagtgtttgaggttcccgtcttgaatgtgactgtcggaactactgtccgggggggtggtgcatttttctgagtttaagcaggagtcgggagtccccaaaagggaacacaagacaccttgatcctggcatatcttgtgtgccctctgtgggcctcagtttgtttcacaggattgaaaacctgggaagttagatgctcatctcatctgaagaagttgttctgcctttgttaaggtggagcgggaatagtcagcactgggacatgagaatggacagtcgcctggacccacctagggattcaccatttgctaaatgtgtgagctgtgggctcggccctgggggcactttaggaacatgactagtcttcccctgcagtgtggaggacacatgtgccacagagcccagctttgtgctcggtgccagagaggcttccggaggcaggcagggctgcgtgcagcctggaaggatgagccaggccaggcgggaaacggaagtccaggtagaagggaggagccgaattggggtacactccatatgggctcaggcaggtcagcctgtggaatgaatagaggccaacatgcaggccagcccggaatgcggcaggagtgacagtggctttccgtttctgggaattctgccagtacctacagtggtgccttttgacttggcttaccttttttctcgacatgcaggcagcgtctatcccagactaccggggccctaatggagtgtggacactgcttcagaaagggagaagcgttagtgctgccgacctgagcgaggccgagccaaccctcacccacatgagcatcacccgtctgcatgagcagaagctggtaagagccctgggtggctggtacacttgccagggaccaggcagagcaccttggtgcccagtgggcaactaactgcacccgccctctgtctgccagttgactcccatgatgagcacccaccaagcgggttaggccgcgggtttgatcctcctgtgcttgactctccaggacagaaggggagctccccctctgaaccatcccatccgcagccagcctcagcctcagagctgctggtggcctttcccctttgtgattcccttgcatttttctgtggacctcagaagccatcctagtcacaggggaggcttataggacatctctggggaccttctgctgaacaccctcaaccaatggggtgtagtggttgatctgcctaggtccccagggacctgaaatgtcatgacccaagagagcatggatctggggcagagtggcccttgccaaaccccgagccacttcccaaccttgccgggacggtgcaacctcttgccctcccagccactccaggtgcatcagggctggaggaaggacagcccctccccaccacaggccctcttgactcctggtggttggacctgttgtgtgttttactttctaaggctctctggggggacggagctgcccctggttttgggagccatcggcggggctcagaacagcctcgctgtggccgggtactgacctccccaccaccactggcagccatccctccccttgccacccgttctgccttcgtgcagcatgtggtgtctcagaactgtgacgggctccacctgaggagtgggctgccgcgcacggccatctccgagctccacgggaacatgtacattgaagtctgtacctcctgcgttcccaacagggagtacgtgcgggtgttcgatgtgacggagcgcactgccctccacagacaccagacaggccggacctgccacaagtgtgggacccagctgcgggacaccattgtgcactttggggagagggggacgttggggcagcctctgaactgggaagcggcgaccgaggctgccagcagagcagacaccatcctgtgtctagggtccagcctgaaggttctaaagaagtacccacgcctctggtgcatgaccaagccccctagccggcggccgaagctttacatcgtgaacctgcagtggaccccgaaggatgactgggctgccctgaagctacatgggaagtgtgatgacgtcatgcgactcccctgcgtgctggtgaagaaggcagccacagtcggaagtcgctgtgcagaagcagagaggaggccccgcctggggaccggggtgcaccgcttagctcggcccccatcctagggggctggtttggcaggggctgcacaaaacgcacaaaaaggaagaaagtgacgtaatcacgtgctcgatgaagaacagttggcactttgcagatggccagtgtcacggtgaaggctgggttgcccccacgggtctagggagaacgaactctttggggatgacattttcaccgtgacatttttagccatttgtccttgaggaagccccttgcactgctgcggttgtaccctgatacggcctggccatcgaggacacctgcccatccggcctctgtgtcaagaggtggcagccgcacctttctgtgagaacggaactcgggttatttcagccccggcctgcagagtggaagcgcccagcggcctttcctcgctcaccaggccagtctcagggcctcaccgtatttctactactacttaatgaaaaagtgtgaactttatagaatcctctctgtactggatgtgcggcagaggggtggctccgagcctcggctctatgcagacctttttatttctattaaacgtttctgcactggc

SEQ ID NO: 48531 - DNA, 3325 bp, Homo sapiens
ggtcgctagagcaaactcagacacacactctgcgctcttggagttgggaaacccacctgcgttggctttttgtgggaggtggccttgattgggccttgaaggatgggtgagatttacagaaggttggaatgaggcactccaagcaaagaacagcagaggctcagcagcaagaatgcaaaaagggagttcactactgactcaaatacccggagccctggggtttagtctcctccctccacaagtcacatgtaaaagtccagtcatgctgggcgcggtggctcatgcctataatcctagcactttgggaggccgaggtgggcggatcatgaggtcagtagttcaagaacaacctggccaacacggtgaaaccctgtctctactaaaaatacaaaaattagtcgggcatggtggtgggcacctgcaatcccagctactcgagaggctgaggcaggagaatcacttgaaactggaaggcggaggttgcagtgagccgagatcatgccactgcattccagcctgggcgaaagagctaaactccgtctctcaaaaaaaaaaaaaaaaaaaaaagtccagtcatgtaattatgtaacagtcacgtgacctgttatggaacttccaatggcaactaaaagcacatgcagctagtggatttcatcggagtgtttgaggttcccgtcttgaatgtgactgtcggaactactgtccgggggggtggtgcatttttctgagtttaagcaggagtcgggagtccccaaaagggaacacaagacaccttgatcctggcatatcttgtgtgccctctgtgggcctcagtttgtttcacaggattgaaaacctgggaagttagatgctcatctcatctgaagaagttgttctgcctttgttaaggtggagcgggaatagtcagcactgggacatgagaatggacagtcgcctggacccacctagggattcaccatttgctaaatgtgtgagctgtgggctcggccctgggggcactttaggaacatgactagtcttcccctgcagtgtggaggacacatgtgccacagagcccagctttgtgctcggtgccagagaggcttccggaggcaggcagggctgcgtgcagcctggaaggatgagccaggccaggcgggaaacggaagtccaggtagaagggaggagccgaattggggtacactccatatgggctcaggcaggtcagcctgtggaatgaatagaggccaacatgcaggccagcccggaatgcggcaggagtgacagtggctttccgtttctgggaattctgccagtacctacagtggtgccttttgacttggcttaccttttttctcgacatgcaggcagcgtctatcccagactaccggggccctaatggagtgtggacactgcttcagaaagggagaagcgttagtgctgccgacctgagcgaggccgagccaaccctcacccacatgagcatcacccgtctgcatgagcagaagctggtaagagccctgggtggctggtacacttgccagggaccaggcagagcaccttggtgcccagtgggcaactaactgcacccgccctctgtctgccagttgactcccatgatgagcacccaccaagcgggttaggccgcgggtttgatcctcctgtgcttgactctccaggacagaaggggagctccccctctgaaccatcccatccgcagccagcctcagcctcagagctgctggtggcctttcccctttgtgattcccttgcatttttctgtggacctcagaagccatcctagtcacaggggaggcttataggacatctctggggaccttctgctgaacaccctcaaccaatggggtgtagtggttgatctgcctaggtccccagggacctgaaatgtcatgacccaagagagcatggatctggggcagagtggcccttgccaaaccccgagccacttcccaaccttgccgggacggtgcaacctcttgccctcccagccactccaggtgcatcagggctggaggaaggacagcccctccccaccacaggccctcttgactcctggtggttggacctgttgtgtgttttactttctaaggctctctggggggacggagctgcccctggttttgggagccatcggcggggctcagaacagcctcgctgtggccgggtactgacctccccaccaccactggcagccatccctccccttgccacccgttctgccttcgtgcagcatgtggtgtctcagaactgtgacgggctccacctgaggagtgggctgccgcgcacggccatctccgagctccacgggaacatgtacattgaaggagtacgtgcgggtgttcgatgtgacggagcgcactgccctccacagacaccagacaggccggacctgccacaagtgtgggacccagctgcgggacaccattgtgcactttggggagagggggacgttggggcagcctctgaactgggaagcggcgaccgaggctgccagcagagcagacaccatcctgtgtctagggtccagcctgaaggttctaaagaagtacccacgcctctggtgcatgaccaagccccctagccggcggccgaagctttacatcgtgaacctgcagtggaccccgaaggatgactgggctgccctgaagctacatgggaagtgtgatgacgtcatgcgactcccctgcgtgctggtgaagaaggcagccacagtcggaagtcgctgtgcagaagcagagaggaggccccgcctggggaccggggtgcaccgcttagctcggcccccatcctagggggctggtttggcaggggctgcacaaaacgcacaaaaaggaagaaagtgacgtaatcacgtgctcgatgaagaacagttggcactttgcagatggccagtgtcacggtgaaggctgggttgcccccacgggtctagggagaacgaactctttggggatgacattttcaccgtgacatttttagccatttgtccttgaggaagccccttgcactgctgcggttgtaccctgatacggcctggccatcgaggacacctgcccatccggcctctgtgtcaagaggtggcagccgcacctttctgtgagaacggaactcgggttatttcagccccggcctgcagagtggaagcgcccagcggcctttcctcgctcaccaggccagtctcagggcctcaccgtatttctactactacttaatgaaaaagtgtgaactttatagaatcctctctgtactggatgtgcggcagaggggtggctccgagcctcggctctatgcagacctttttatttctattaaacgtttctgcactggc

SEQ ID NO: 48532 - DNA, 1714 bp, Homo sapiens
ggcggaagcggaagagcaggtctccaggggagcgatggcagccgggggtctgagccgctccgagcgcaaagcggcggagcgggtccggaggttgcgggaggagcagcagagggagcgcctccgccaggtgtcgcgcatcctgaggaaggcggcggcggagcgcagcgccgaggagggccggctgctggccgagagcgcggacctggtaacggagctgcagggccggagccggcggcgcgagggcctgaagcggcggcaggaggaggtgtgcgacgacccggaggagctgcgggggaaggtccgggagctggccagcgccgtccggaacgccaaatacttggtcgtctacacaggcgcgggaatcagcacggcagcgtctatcccagactaccggggccctaatggagtgtggacactgcttcagaaagggagaagcgttagtgctgccgacctgagcgaggccgagccaaccctcacccacatgagcatcacccgtctgcatgagcagaagctggtgcagcatgtggtgtctcagaactgtgacgggctccacctgaggagtgggctgccgcgcacggccatctccgagctccacgggaacatgtacattgaagtgagcagtcctgcagggacccagggtctccatgggcaggcgggtcccactcactgtgccctcttgcctctaggtctgtacctcctgcgttcccaacagggagtacgtgcgggtgttcgatgtgacggagcgcactgccctccacagacaccagacaggccggacctgccacaagtgtgggacccagctgcgggacaccattgtgcactttggggagagggggacgttggggcagcctctgaactgggaagcggcgaccgaggctgccagcagagcagacaccatcctgtgtctagggtccagcctgaaggttctaaagaagtacccacgcctctggtgcatgaccaagccccctagccggcggccgaagctttacatcgtgaacctgcagtggaccccgaaggatgactgggctgccctgaagctacatgggaagtgtgatgacgtcatgcgactcccctgcgtgctggtgaagaaggcagccacagtcggaagtcgctgtgcagaagcagagaggaggccccgcctggggaccggggtgcaccgcttagctcggcccccatcctagggggctggtttggcaggggctgcacaaaacgcacaaaaaggaagaaagtgacgtaatcacgtgctcgatgaagaacagttggcactttgcagatggccagtgtcacggtgaaggctgggttgcccccacgggtctagggagaacgaactctttggggatgacattttcaccgtgacatttttagccatttgtccttgaggaagccccttgcactgctgcggttgtaccctgatacggcctggccatcgaggacacctgcccatccggcctctgtgtcaagaggtggcagccgcacctttctgtgagaacggaactcgggttatttcagccccggcctgcagagtggaagcgcccagcggcctttcctcgctcaccaggccagtctcagggcctcaccgtatttctactactacttaatgaaaaagtgtgaactttatagaatcctctctgtactggatgtgcggcagaggggtggctccgagcctcggctctatgcagacctttttatttctattaaacgtttctgcactggc

SEQ ID NO: 48533 - DNA, 1228 bp, Homo sapiens
gttgttctagaggatcccagactcggcagtgcagcatgtggtgtctcagaactgtgacgggctccacctgaggagtgggctgccgcgcacggccatctccgagctccacgggaacatgtacattgaagtgagcagtcctgcagggacccagggtctccatgggcaggcgggtcccactcactgtgccctcttgcctctaggtctgtacctcctgcgttcccaacagggagtacgtgcgggtgttcgatgtgacggagcgcactgccctccacagacaccagacaggccggacctgccacaagtgtgggacccagctgcgggacaccattgtgcactttggggagagggggacgttggggcagcctctgaactgggaagcggcgaccgaggctgccagcagagcagacaccatcctgtgtctagggtccagcctgaaggttctaaagaagtacccacgcctctggtgcatgaccaagccccctagccggcggccgaagctttacatcgtgaacctgcagtggaccccgaaggatgactgggctgccctgaagctacatgggaagtgtgatgacgtcatgcgactcccctgcgtgctggtgaagaaggcagccacagtcggaagtcgctgtgcagaagcagagaggaggccccgcctggggaccggggtgcaccgcttagctcggcccccatcctagggggctggtttggcaggggctgcacaaaacgcacaaaaaggaagaaagtgacgtaatcacgtgctcgatgaagaacagttggcactttgcagatggccagtgtcacggtgaaggctgggttgcccccacgggtctagggagaacgaactctttggggatgacattttcaccgtgacatttttagccatttgtccttgaggaagccccttgcactgctgcggttgtaccctgatacggcctggccatcgaggacacctgcccatccggcctctgtgtcaagaggtggcagccgcacctttctgtgagaacggaactcgggttatttcagccccggcctgcagagtggaagcgcccagcggcctttcctcgctcaccaggccagtctcagggcctcaccgtatttctactactacttaatgaaaaagtgtgaactttatagaatcctctctgtactggatgtgcggcagaggggtggctccgagcctcggctctatgcagacctttttatttctattaaacgtttctgcactggc

SEQ ID NO: 48534 - DNA, 1803 bp, Homo sapiens
cgcgtgcgcgcgcgggcgcccccggtttcgggagcagctggggcgacgggcggtcccgggtggggcggcccggggcggtgaccaccctggcgtcttggcaggtgtgcgacgacccggaggagctgcgggggaaggtccgggagctggccagcgccgtccggaacgccaaatacttggtcgtctacacaggcgcgggaatcagcacggtagggagggaggcggaggcgtaccccaggacggagtatgagctccagtaatcgcgaaaaactcgcctttaaagcagctctaaggttttttctcttaaagaaacgaaatgaccaaaacttacctaaggcagcgtctatcccagactaccggggccctaatggagtgtggacactgcttcagaaagggagaagcgttagtgctgccgacctgagcgaggccgagccaaccctcacccacatgagcatcacccgtctgcatgagcagaagctggtgcagcatgtggtgtctcagaactgtgacgggctccacctgaggagtgggctgccgcgcacggccatctccgagctccacgggaacatgtacattgaagtctgtacctcctgcgttcccaacagggagtacgtgcgggtgttcgatgtgacggagcgcactgccctccacagacaccagacaggccggacctgccacaagtgtgggacccagctgcgggacaccattgtgcactttggggagagggggacgttggggcagcctctgaactgggaagcggcgaccgaggctgccagcagagcagacaccatcctgtgtctagggtccagcctgaaggtacgtgccgatgacacaatgagtgaaccgagcccctgcctgcccgagggtgtccagctctgcggcccagcactgtacagacttgtcccttgtgtgtgtgcggtgtctgtctgtctgcttccacaggttctaaagaagtacccacgcctctggtgcatgaccaagccccctagccggcggccgaagctttacatcgtgaacctgcagtggaccccgaaggatgactgggctgccctgaagctacatgggaagtgtgatgacgtcatgcggctcctcatggccgagctgggcttggagatccccgcctatagcaggtggcaggatcccattttctcactggcgactcccctgcgtgctggtgaagaaggcagccacagtcggaagtcgctgtgcagaagcagagaggaggccccgcctggggaccggggtgcaccgcttagctcggcccccatcctagggggctggtttggcaggggctgcacaaaacgcacaaaaaggaagaaagtgacgtaatcacgtgctcgatgaagaacagttggcactttgcagatggccagtgtcacggtgaaggctgggttgcccccacgggtctagggagaacgaactctttggggatgacattttcaccgtgacatttttagccatttgtccttgaggaagccccttgcactgctgcggttgtaccctgatacggcctggccatcgaggacacctgcccatccggcctctgtgtcaagaggtggcagccgcacctttctgtgagaacggaactcgggttatttcagccccggcctgcagagtggaagcgcccagcggcctttcctcgctcaccaggccagtctcagggcctcaccgtatttctactactacttaatgaaaaagtgtgaactttatagaatcctctctgtactggatgtgcggcagaggggtggctccgagcctcggctctatgcagacctttttatttctattaaacgtttctgcactggc

SEQ ID NO: 48535 - DNA, 1356 bp, Homo sapiens
ggcggaagcggaagagcaggtctccaggggagcgatggcagccgggggtctgagccgctccgagcgcaaagcggcggagcgggtccggaggttgcgggaggagcagcagagggagcgcctccgccaggtgtcgcgcatcctgaggaaggcggcggcggagcgcagcgccgaggagggccggctgctggccgagagcgcggacctggtaacggagctgcagggccggagccggcggcgcgagggcctgaagcggcggcaggaggaggtgtgcgacgacccggaggagctgcgggggaaggtccgggagctggccagcgccgtccggaacgccaaatacttggtcgtctacacaggcgcgggaatcagcacggcagcgtctatcccagactaccggggccctaatggagtgtggacactgcttcagaaagggagaagcgttagtgctgccgacctgagcgaggccgagccaaccctcacccacatgagcatcacccgtctgcatgagcagaagctggtgcagcatgtggtgtctcagaactgtgacgggctccacctgaggagtgggctgccgcgcacggccatctccgagctccacgggaacatgtacattgaagtctgtacctcctgcgttcccaacagggagtacgtgcgggtgttcgatgtgacggagcgcactgccctccacagacaccagacaggccggacctgccacaagtgtgggacccagctgcgggacaccattgtgcactttggggagagggggacgttggggcagcctctgaactgggaagcggcgaccgaggctgccagcagagcagacaccatcctgtgtctagggtccagcctgaaggttctaaagaagtacccacgcctctggtgcatgaccaagccccctagccggcggccgaagctttacatcgtgaacctgcagtggaccccgaaggatgactgggctgccctgaagctacatgggaagtgtgatgacgtcatgcggctcctcatggccgagctgggcttggagatccccgcctatagcaggtggcaggatcccattttctcactggcgactcccctgcgtgctggtgaagaaggcagccacagtcggaagtcgctgtgcagaagcagagaggagctgcgggggaaggtccgggagctggccagcgccgtccggaacgccaaatacttggtcgtctacacaggcgcgggaatcagcacggcagcgtctatcccagactaccggggccctaatggagtgtggacactgcttcagaaagggagaagcgttagtgctgccgagcctcggctctatgcagacctttttatttctattaaacgtttctgcactggcaaaaaaaa

SEQ ID NO: 48536 - DNA, 717 bp, Homo sapiens
ggctcccaggcccgcctgatgccgctttccctttttggcaggtggcaggatcccattttctcactggcgactcccctgcgtgctggtgaagaaggcagccacagtcggaagtcgctgtgcagaagcagagaggaggccccgcctggggaccggggtgcaccgcttagctcggcccccatcctagggggctggtttggcaggggctgcacaaaacgcacaaaaaggaagaaagtgacgtaatcacgtgctcgatgaagaacagttggcactttgcagatggccagtgtcacggtgaaggctgggttgcccccacgggtctagggagaacgaactctttggggatgacattttcaccgtgacatttttagccatttgtccttgaggaagccccttgcactgctgcggttgtaccctgatacggcctggccatcgaggacacctgcccatccggcctctgtgtcaagaggtggcagccgcacctttctgtgagaacggaactcgggttatttcagccccggcctgcagagtggaagcgcccagcggcctttcctcgctcaccaggccagtctcagggcctcaccgtatttctactactacttaatgaaaaagtgtgaactttatagaatcctctctgtactggatgtgcggcagaggggtggctccgagcctcggctctatgcagacctttttatttctattaaacgtttctgcactggc

SEQ ID NO: 48537 - DNA, 1361 bp, Homo sapiens
ggcggaagcggaagagcaggtctccaggggagcgatggcagccgggggtctgagccgctccgagcgcaaagcggcggagcgggtccggaggttgcgggaggagcagcagagggagcgcctccgccaggtgtcgcgcatcctgaggaaggcggcggcggagcgcagcgccgaggagggccggctgctggccgagagcgcggacctggtaacggagctgcagggccggagccggcggcgcgagggcctgaagcggcggcaggaggaggtgtgcgacgacccggaggagctgcgggggaaggtccgggagctggccagcgccgtccggaacgccaaatacttggtcgtctacacaggcgcgggaatcagcacggcagcgtctatcccagactaccggggccctaatggagtgtggacactgcttcagaaagggagaagcgttagtgctgccgacctgagcgaggccgagccaaccctcacccacatgagcatcacccgtctgcatgagcagaagctggtgcagcatgtggtgtctcagaactgtgacgggctccacctgaggagtgggctgccgcgcacggccatctccgagctccacgggaacatgtacattgaagtctgtacctcctgcgttcccaacagggagtacgtgcgggtgttcgatgtgacggagcgcactgccctccacagacaccagacaggccggacctgccacaagtgtgggacccagctgcgggacaccattgtgcactttggggagagggggacgttggggcagcctctgaactgggaagcggcgaccgaggctgccagcagagcagacaccatcctgtgtctagggtccagcctgaaggtacgtgccgatgacacaatgagtgaaccgagcccctgcctgcccgagggtgtccagctctgcggcccagcactgtacagacttgtcccttgtgtgtgtgcggtgtctgtctgtctgcttccacaggttctaaagaagtacccacgcctctggtgcatgaccaagccccctagccggcggccgaagctttacatcgtgaacctgcagtggaccccgaaggatgactgggctgccctgaagctacatgggaagtgtgatgacgtcatgcggctcctcatggccgagctgggcttggagatccccgcctatagcaggtgagtgagccgctgcagcagcctgcttccccgcacctctgtgtgctgggccttgtctgtcttctctcgtgagctgagtgtggaggaagctctgaggtgtttgcagtggtgcctgaggcatgactgaagcgtggtggtctccagagggcctgacctcggtggttggcggagaccctgcgtgtgccactcctgccctg

SEQ ID NO: 48538 - DNA, 269 bp, Homo sapiens
gtaagcgggccaggcatggcctcccacataggctgggcagcggcagcacgggcctgagctccagctctcctcaccttgccttcctttctgcctggcagtgctgccgacctgagcgaggccgagccaaccctcacccacatgagcatcacccgtctgcatgagcagaagctggtaagagccctgggtggctggtacacttgccagggaccaggcagagcaccttggtgcccagtgggcaactaactgcacccgccctctgtctgccagtt

SEQ ID NO: 48539 - DNA, 1417 bp, Homo sapiens
  misc_feature (43)..(43): n is a, c, g, or t
ccccggagggggtgttttaaatcggacgaggggcaatacttgngtcgtctacacaggcgcgggaatcagcacggcagcgtctatcccagactaccggggccctaatggagtgtggacactgcttcagaaagggagaagcgttagtgctgccgacctgagcgaggccgagccaaccctcacccacatgagcatcacccgtctgcatgagcagaagctggtgcagcatgtggtgtctcagaactgtgacgggctccacctgaggagtgggctgccgcgcacggccatctccgagctccacgggaacatgtacattgaagtctgtacctcctgcgttcccaacagggagtacgtgcgggtgttcgatgtgacggagcgcactgccctccacagacaccagacaggccggacctgccacaagtgtgggacccagctgcgggacaccattgtgcactttggggagagggggacgttggggcagcctctgaactgggaagcggcgaccgaggctgccagcagagcagacaccatcctgtgtctagggtccagcctgaaggttctaaagaagtacccacgcctctggtgcatgaccaagccccctagccggcggccgaagctttacatcgtgaacctgcagtggaccccgaaggatgactgggctgccctgaagctacatgggaagtgtgatgacgtcatgcggctcctcatggccgagctgggcttggagatccccgcctatagcaggtggcaggatcccattttctcactggcgactcccctgcgtgctggtgaagaaggcagccacagtcggaagtcgctgtgcagaagcagagaggaggccccgcctggggaccggggtgcaccgcttagctcggcccccatcctagggggctggtttggcaggggctgcacaaaacgcacaaaaaggaagaaagtgacgtaatcacgtgctcgatgaagaacagttggcactttgcagatggccagtgtcacggtgaaggctgggttgcccccacgggtctagggagaacgaactctttggggatgacattttcaccgtgacatttttagccatttgtccttgaggaagccccttgcactgctgcggttgtaccctgatacggcctggccatcgaggacacctgcccatccggcctctgtgtcaagaggtggcagccgcacctttctgtgagaacggaactcgggttatttcagccccggcctgcagagtggaagcgcccagcggcctttcctcgctcaccaggccagtctcagggcctcaccgtatttctactactacttaatgaaaaagtgtgaactttatagaatcctctctgtactggatgtgcggcagaggggtggctccgagcctcggctctatgcagacctttttatttctattaaacgtttctgcactggc

SEQ ID NO: 48540 - DNA, 2446 bp, Homo sapiens
ggcggaagcggaagagcaggtctccaggggagcgatggcagccgggggtctgagccgctccgagcgcaaagcggcggagcgggtccggaggttgcgggaggagcagcagagggagcgcctccgccaggtacgccgccgccgctccccggcccggccattgccggcccgcgccgccgctcaccgtccgcctgcccgcaggtgtcgcgcatcctgaggaaggcggcggcggagcgcagcgccgaggagggccggctgctggccgagagcgcggacctggtaacggagctgcagggccggagccggcggcgcgagggcctgaagcggcggcaggaggaggtgtgcgacgacccggaggagctgcgggggaaggtccgggagctggccagcgccgtccggaacgccaaatacttggtcgtctacacaggcgcgggaatcagcacggcagcgtctatcccagactaccggggccctaatggagtgtggacactgcttcagaaagggagaagcgttagtgctgccgacctgagcgaggccgagccaaccctcacccacatgagcatcacccgtctgcatgagcagaagctggtaagagccctgggtggctggtacacttgccagggaccaggcagagcaccttggtgcccagtgggcaactaactgcacccgccctctgtctgccagttgactcccatgatgagcacccaccaagcgggttaggccgcgggtttgatcctcctgtgcttgactctccaggacagaaggggagctccccctctgaaccatcccatccgcagccagcctcagcctcagagctgctggtggcctttcccctttgtgattcccttgcatttttctgtggacctcagaagccatcctagtcacaggggaggcttataggacatctctggggaccttctgctgaacaccctcaaccaatggggtgtagtggttgatctgcctaggtccccagggacctgaaatgtcatgacccaagagagcatggatctggggcagagtggcccttgccaaaccccgagccacttcccaaccttgccgggacggtgcaacctcttgccctcccagccactccaggtgcatcagggctggaggaaggacagcccctccccaccacaggccctcttgactcctggtggttggacctgttgtgtgttttactttctaaggctctctggggggacggagctgcccctggttttgggagccatcggcggggctcagaacagcctcgctgtggccgggtactgacctccccaccaccactggcagccatccctccccttgccacccgttctgccttcgtgcagcatgtggtgtctcagaactgtgacgggctccacctgaggagtgggctgccgcgcacggccatctccgagctccacgggaacatgtacattgaagtctgtacctcctgcgttcccaacagggagtacgtgcgggtgttcgatgtgacggagcgcactgccctccacagacaccagacaggccggacctgccacaagtgtgggacccagctgcgggacaccattgtgcactttggggagagggggacgttggggcagcctctgaactgggaagcggcgaccgaggctgccagcagagcagacaccatcctgtgtctagggtccagcctgaaggttctaaagaagtacccacgcctctggtgcatgaccaagccccctagccggcggccgaagctttacatcgtgaacctgcagtggaccccgaaggatgactgggctgccctgaagctacatgggaagtgtgatgacgtcatgcgactcccctgcgtgctggtgaagaaggcagccacagtcggaagtcgctgtgcagaagcagagaggaggccccgcctggggaccggggtgcaccgcttagctcggcccccatcctagggggctggtttggcaggggctgcacaaaacgcacaaaaaggaagaaagtgacgtaatcacgtgctcgatgaagaacagttggcactttgcagatggccagtgtcacggtgaaggctgggttgcccccacgggtctagggagaacgaactctttggggatgacattttcaccgtgacatttttagccatttgtccttgaggaagccccttgcactgctgcggttgtaccctgatacggcctggccatcgaggacacctgcccatccggcctctgtgtcaagaggtggcagccgcacctttctgtgagaacggaactcgggttatttcagccccggcctgcagagtggaagcgcccagcggcctttcctcgctcaccaggccagtctcagggcctcaccgtatttctactactacttaatgaaaaagtgtgaactttatagaatcctctctgtactggatgtgcggcagaggggtggctccgagcctcggctctatgcagacctttttatttctattaaacgtttctgcactggc

SEQ ID NO: 48541 - DNA, 1584 bp, Homo sapiens
ggcggaagcggaagagcaggtctccaggggagcgatggcagccgggggtctgagccgctccgagcgcaaagcggcggagcgggtccggaggttgcgggaggagcagcagagggagcgcctccgccaggtgtcgcgcatcctgaggaaggcggcggcggagcgcagcgccgaggagggccggctgctggccgagagcgcggacctggtaacggagctgcagggccggagccggcggcgcgagggcctgaagcggcggcaggaggaggtgtgcgacgacccggaggagctgcgggggaaggtccgggagctggccagcgccgtccggaacgccaaatacttggtcgtctacacaggcgcgggaatcagcacggcagcgtctatcccagactaccggggccctaatggagtgtggacactgcttcagaaagggagaagcgttagtgctgccgacctgagcgaggccgagccaaccctcacccacatgagcatcacccgtctgcatgagcagaagctggtgcagcatgtggtgtctcagaactgtgacgggctccacctgaggagtgggctgccgcgcacggccatctccgagctccacgggaacatgtacattgaagtctgtacctcctgcgttcccaacagggagtacgtgcgggtgttcgatgtgacggagcgcactgccctccacagacaccagacaggccggacctgccacaagtgtgggacccagctgcgggacaccattgtgcactttggggagagggggacgttggggcagcctctgaactgggaagcggcgaccgaggctgccagcagagcagacaccatcctgtgtctagggtccagcctgaaggttctaaagaagtacccacgcctctggtgcatgaccaagccccctagccggcggccgaagctttacatcgtgaacctgcagtggaccccgaaggatgactgggctgccctgaagctacatgggaagtgtgatgacgtcatgcggctcctcatggccgagctgggcttggagatccccgcctatagcaggtggcaggatcccattttctcactggcgactcccctgcgtgctggtgaagaaggcagccacagtcggaagtcgctgtgcagaagcagagaggaggccccgcctggggaccggggtgcaccgcttagctcggcccccatcctagggggctggtttggcaggggctgcacaaaacgcacaaaaaggaagaaatttttagccatttgtccttgaggaagccccttgcactgctgcggttgtaccctgatacggcctggccatcgaggacacctgcccatccggcctctgtgtcaagaggtggcagccgcacctttctgtgagaacggaactcgggttatttcagccccggcctgcagagtggaagcgcccagcggcctttcctcgctcaccaggccagtctcagggcctcaccgtatttctactactacttaatgaaaaagtgtgaactttatagaatcctctctgtactggatgtgcggcagaggggtggctccgagcctcggctctatgcagacctttttatttctattaaacgtttctgcactggc

SEQ ID NO: 48542 - DNA, 1558 bp, Homo sapiens
ggcggaagcggaagagcaggtctccaggggagcgatggcagccgggggtctgagccgctccgagcgcaaagcggcggagcgggtccggaggttgcgggaggagcagcagagggagcgcctccgccaggtgtcgcgcatcctgaggaaggcggcggcggagcgcagcgccgaggagggccggctgctggccgagagcgcggacctggtaacggagctgcagggccggagccggcggcgcgagggcctgaagcggcggcaggaggaggtgtgcgacgacccggaggagctgcgggggaaggtccgggagctggccagcgccgtccggaacgccaaatacttggtcgtctacacaggcgcgggaatcagcacggcagcgtctatcccagactaccggggccctaatggagtgtggacactgcttcagaaagggagaagcgttagtgctgccgacctgagcgaggccgagccaaccctcacccacatgagcatcacccgtctgcatgagcagaagctggtgcagcatgtggtgtctcagaactgtgacgggctccacctgaggagtgggctgccgcgcacggccatctccgagctccacgggaacatgtacattgaagtctgtacctcctgcgttcccaacagggagtacgtgcgggtgttcgatgtgacggagcgcactgccctccacagacaccagacaggccggacctgccacaagtgtgggacccagctgcgggacaccattgtgcactttggggagagggggacgttggggcagcctctgaactgggaagcggcgaccgaggctgccagcagagcagacaccatcctgtgtctagggtccagcctgaaggttctaaagaagtacccacgcctctggtgcatgaccaagccccctagccggcggccgaagctttacatcgtgaacctgcagtggaccccgaaggatgactgggctgccctgaagctacatgggaagtgtgatgacgtcatgcggctcctcatggccgagctgggcttggagatccccgcctatagcaggtggcaggatcccattttctcactggcgactcccctgcgtgctggtgaagaaggcagccacagtcggaagtcgctgtgcagaagcagagaggaggccccgcctggggaccggggtgcaccgcttagctcggcccccatcctagggggctggtttggcaggggctgcacaaaacgcacaaaaaggaagaagccccttgcactgctgcggttgtaccctgatacggcctggccatcgaggacacctgcccatccggcctctgtgtcaagaggtggcagccgcacctttctgtgagaacggaactcgggttatttcagccccggcctgcagagtggaagcgcccagcggcctttcctcgctcaccaggccagtctcagggcctcaccgtatttctactactacttaatgaaaaagtgtgaactttatagaatcctctctgtactggatgtgcggcagaggggtggctccgagcctcggctctatgcagacctttttatttctattaaacgtttctgcactggc

SEQ ID NO: 48543 - DNA, 1235 bp, Homo sapiens
ggcggaagcggaagagcaggtctccaggggagcgatggcagccgggggtctgagccgctccgagcgcaaagcggcggagcgggtccggaggttgcgggaggagcagcagagggagcgcctccgccaggtgtcgcgcatcctgaggaaggcggcggcggagcgcagcgccgaggagggccggctgctggccgagagcgcggacctggtaacggagctgcagggccggagccggcggcgcgagggcctgaagcggcggcaggaggaggtgtgcgacgacccggaggagctgcgggggaaggtccgggagctggccagcgccgtccggaacgccaaatacttggtcgtctacacaggcgcgggaatcagcacggcagcgtctatcccagactaccggggccctaatggagtgtggacactgcttcagaaagggagaagcgttagtgctgccgacctgagcgaggccgagccaaccctcacccacatgagcatcacccgtctgcatgagcagaagctggtgcagcatgtggtgtctcagaactgtgacgggctccacctgaggagtgggctgccgcgcacggccatctccgagctccacgggaacatgtacattgaagtctgtacctcctgcgttcccaacagggagtacgtgcgggtgttcgatgtgacggagcgcactgccctccacagacaccagacaggccggacctgccacaagtgtgggacccagctgcgggacaccattgtgcactttggggagagggggacgttggggcagcctctgaactgggaagcggcgaccgaggctgccagcagagcagacaccatcctgtgtctagggtccagcctgaaggttctaaagaagtacccacgcctctggtgcatgaccaagccccctagccggcggccgaagctttacatcgtgaacctgcagtggaccccgaaggatgactgggctgccctgaagctacatgggaagtgtgatgacgtcatgcggctcctcatggccgagctgggcttggagatccccgcctatagcaggtgagtgagccgctgcagcagcctgcttccccgcacctctgtgtgctgggccttgtctgtcttctctcgtgagctgagtgtggaggaagctctgaggtgtttgcagtggtgcctgaggcatgactgaagcgtggtggtctccagagggcctgacctcggtggttggcggagaccctgcgtgtgccactcctgccctg

SEQ ID NO: 48544 - DNA, 729 bp, Homo sapiens
cgtaggggccaaggctgacaggccaccgggaagggttgggctgctgttactctcactcggctttccctgtcctcagtggaccccgaaggatgactgggctgccctgaagctacatgggaagtgtgatgacgtcatgcggctcctcatggccgagctgggcttggagatccccgcctatagcaggtggcaggatcccattttctcactggcgactcccctgcgtgctggtgaagaaggcagccacagtcggaagtcgctgtgcagaagcagagaggaggccccgcctggggaccggggtgcaccgcttagctcggcccccatcctagggggctggtttggcaggggctgcacaaaacgcacaaaaaggaagaaatttttagccatttgtccttgaggaagccccttgcactgctgcggttgtaccctgatacggcctggccatcgaggacacctgcccatccggcctctgtgtcaagaggtggcagccgcacctttctgtgagaacggaactcgggttatttcagccccggcctgcagagtggaagcgcccagcggcctttcctcgctcaccaggccagtctcagggcctcaccgtatttctactactacttaatgaaaaagtgtgaactttatagaatcctctctgtactggatgtgcggcagaggggtggctccgagcctcggctctatgcagacctttttatttctattaaacgtttctgcactggc

SEQ ID NO: 48545 - DNA, 379 bp, Homo sapiens
tttaaaatagctctacacatagttaacatttaccttttttaggttttcagatttgactttctgctggtcatcttttcaaagaaaatgaaacgtttaaaagttcatctgataatactgctaccatagttttgttttcactgctcatctcttattaaggtttttaaccataaaactgaagcaatttctgtaaagacacaaattgataacttagtatagaattaaaattcattaagttatcataagtttgatgatatccttgttaatgtactgatttttgaattattttatttgccataatccatatatttctaacatgagtattttgacagtatttaataaatcagaaagctgtttgaatggaagtaaactaaaaaaaaaa

SEQ ID NO: 48546 - DNA, 510 bp, Homo sapiens
tcatctgatgctgatttccattttttaggaaattgtaaatatttatccatctatcaacccacccaccttgacagcacaccagtctaacagagtttgcaatgctctggcattactgcaatgtgtagcatcacatccagaaaccaggtaaatgctttgggtgagtcacttgggggagatatacattgaatatggtcctaaacgttctctctctctctctctctctctctctctcctggtcttccggattcttatttacttttacccaatgaactttaaagaaacagtgttcacattacaggaaaggtatcaggcatacagctacttctcactccctgacctgttattgacactatgtcatctgtgaggcatagtgcatggcatataagaggagtttagtaattatttttccagcacttttcccacactgaacccagatttgacttcagaatccttcttaacatagcattctgggcggcctctataatagacgagaattggcatgtaagttaa

SEQ ID NO: 48547 - DNA, 1879 bp, Homo sapiens
tgccgggactgtccatcttttcccgccgttcactggcttttggaggagggtcagagttcacgccgctctctggaaataactgctcaaagccagaagttgcggggactagtggtcgcggacgtccttccggtcctaaatcttaaggggcaaaggacatactctgggactgttaactaggccctggaggcgggaagaggatgtgtgggtggggtcaggggtgagaggtcagagggccgcgaagtgggcggagcgagccggagtcggatggcggctacggcggctcattattttccgctgcaggggtgctgaaggggggacgcgggtcggacgcgtccggctgtggaagagagcggcggccgctcacaacatgcacagcctggcgacggctgcgcctgtgcctactacactggcacaagtggatagagaaaagatctatcagtggatcaatgagctgtccagtcctgagactagggaaaatgctttgctggagctaagtaagaagcgagaatctgttcctgaccttgcacccatgctgtggcattcatttggtactattgcagcacttttacaggaaattgtaaatatttatccatctatcaacccacccaccttgacagcacaccagtctaacagagtttgcaatgctctggcattactgcaatgtgtagcatcacatccagaaaccaggtcagcgtttctcgcagcacacatcccactttttttgtacccctttttgcacactgtcagcaaaacacgtccctttgagtatctccggctcaccagccttggagttattggggccctggtgaaaacagatgaacaagaagtaatcaactttttattaacaacagaaattatccctttatgtttgcgaattatggaatctggaagtgaactttctaaaacagttgccacattcatcctccagaagatcttgttagatgacactggtttggcttatatatgtcagacgtatgagcgtttctcccatgttgccatgatcttgggtaagatggtcctgcagctatccaaagagccttctgcccgtctgctgaagcatgtagtgagatgttaccttcgactttcagataaccccagggcacgtgaagcactcagacagtgcctccctgaccagctgaaagacacaaccttcgcccaggtgctaaaagatgacaccaccacgaaacgctggcttgcacaactggtgaagaacctgcaagagggccaggtcaccgatccccggggtatccccctgccccctcagtgatccttccctgttccctcccactactcccccaagttggggaaaggagggggaacctacgagaaaaacagctcaggttttatcaccgactgggaatagacaacctcaatgctgaaccgcactggagaaaaggggcaaggtacccctgctgaggtgtatgggctgccatctcaggctgtcttgaggacctgggctccctctgctactcccaggaaatgggctcctgacacagcagtctgccaccacagccccaggagggtgtcaacaccagcaaatgctgtatttgcagcatgtccaagatgacccttctcccctacctctacctagccactggcagggaggggagacagtggtgatagcagcagcactctaggcatggtgaacgcctgggaccaagccatgtggcgttttttattttgcctttctggaagactcaagatatgtctcttcattctctctcagtatttgtttactttggtttttttgtttttaatctcagagagaggtgtgtttagtgggcacaagctgtaatattcagcaaaactttgtcgactggcactgtttacaagtctgttagctgcataagctcaataaaaagttggtctgggcattaca

SEQ ID NO: 48548 - DNA, 2138 bp, Homo sapiens
tgccgggactgtccatcttttcccgccgttcactggcttttggaggagggtcagagttcacgccgctctctggaaataactgctcaaagccagaagttgcggggactagtggtcgcggacgtccttccggtcctaaatcttaaggggcaaaggacatactctgggactgttaactaggccctggaggcgggaagaggatgtgtgggtggggtcaggggtgagaggtcagagggccgcgaagtgggcggagcgagccggagtcggatggcggctacggcggctcattattttccgctgcaggggtgctgaaggggggacgcgggtcggacgcgtccggctgtggaagagagcggcggccgctcacaacatgcacagcctggcgacggctgcgcctgtgcctactacactggcacaagtggatagagaaaagatctatcagtggatcaatgagctgtccagtcctgagactagggaaaatgctttgctggagctaagtaagaagcgagaatctgttcctgaccttgcacccatgctgtggcattcatttggtactattgcagcacttttacaggaaattgtaaatatttatccatctatcaacccacccaccttgacagcacaccagtctaacagagtttgcaatgctctggcattactgcaatgtgtagcatcacatccagaaaccaggtcagcgtttctcgcagcacacatcccactttttttgtacccctttttgcacactgtcagcaaaacacgtccctttgagtatctccggctcaccagccttggagttattggggccctggtgaaaacagatgaacaagaagtaatcaactttttattaacaacagaaattatccctttatgtttgcgaattatggaatctggaagtgaactttctaaaacagttgccacattcatcctccagaagatcttgttagatgacactggtttggcttatatatgtcagacgtatgagcgtttctcccatgttgccatgatcttgggtaagatggtcctgcagctatccaaagagccttctgcccgtctgctgaagcatgtagtgagatgttaccttcgactttcagataaccccagggcacgtgaagcactcagacagtgcctccctgaccagctgaaagacacaaccttcgcccaggtgctaaaagatgacaccaccacgaaacgctggcttgcacaactggtgaagaacctgcaagagggccaggtcaccgatccccggggtatccccctgccccctcagtgatccttccctgttccctcccactactcccccaagttggggaaaggagggggaacctacgagaaaaacagctcaggttttatcaccgactgggaatagacaacctcaatgctgaaccgcactggagaaaaggggcaaggtacccctgctgaggtgtatgggctgccatctcaggctgtcttgaggacctgggctccctctgctactcccaggaaatgggctcctgacacagcagtctgccaccacagccccaggagggtgtcaacaccagcaaatgctgtatttgcagcatgtccaagatgacccttctcccctacctctacctagccactggcagggaggggagacagtggtgatagcagcagcactctaggcatggtgaacgcctgggaccaagccatgtggcgttttttattttgcctttctggaagactcaagatatgtctcttcattctctctcagtatttgtttactttggtttttttgtttttaatctcagagagaggtgtgtttagtgggcacaagctgtaatattcagcaaaactttgtcgactggcactgtttacaagtctgttagctgcataagctcaataaaaagttggtctgggcattacatcccctctggcaggccaatagctgcatcaagctgttgggagaaatgggagggcaggggaaagatgtaaagccaaagtacagcaggaacccaccacctgtttcccttccttctcccattctactcccagtccggaatgccacgaggaccttaaccttgtttctggctttagctgctagttttcccaaatctcagtgctttccctttttgaacttcccttctattaaacttaaaacagatgtcttaattaaaaaaaatgtc

SEQ ID NO: 48549 - DNA, 1435 bp, Homo sapiens
tgccgggactgtccatcttttcccgccgttcactggcttttggaggagggtcagagttcacgccgctctctggaaataactgctcaaagccagaagttgcggggactagtggtcgcggacgtccttccggtcctaaatcttaaggggcaaaggacatactctgggactgttaactaggccctggaggcgggaagaggatgtgtgggtggggtcaggggtgagaggtcagagggccgcgaagtgggcggagcgagccggagtcggatggcggctacggcggctcattattttccgctgcaggggtgctgaaggggggacgcgggtcggacgcgtccggctgtggaagagagcggcggccgctcacaacatgcacagcctggcgacggctgcgcctgtgcctactacactggcacaagtggatagagaaaagatctatcagtggatcaatgagctgtccagtcctgagactagggaaaatgctttgctggagctaagtaagaagcgagaatctgttcctgaccttgcacccatgctgtggcattcatttggtactattgcagcacttttacaggaaattgtaaatatttatccatctatcaacccacccaccttgacagcacaccagtctaacagagtttgcaatgctctggcattactgcaatgtgtagcatcacatccagaaaccaggtcagcgtttctcgcagcacacatcccactttttttgtacccctttttgcacactgtcagcaaaacacgtccctttgagtatctccggctcaccagccttggagttattggggccctggtgaaaacagatgaacaagaagtaatcaactttttattaacaacagaaattatccctttatgtttgcgaattatggaatctggaagtgaactttctaaaacagttgccacattcatcctccagaagatcttgttagatgacactggtttggcttatatatgtcagacgtatgagcgtttctcccatgttgccatgatcttgggtaagatggtcctgcagctatccaaagagccttctgcccgtctgctgaagcatgtagtgagatgttaccttcgactttcagataaccccaggttttcagatttgactttctgctggtcatcttttcaaagaaaatgaaacgtttaaaagttcatctgataatactgctaccatagttttgttttcactgctcatctcttattaaggtttttaaccataaaactgaagcaatttctgtaaagacacaaattgataacttagtatagaattaaaattcattaagttatcataagtttgatgatatccttgttaatgtactgatttttgaattattttatttgccataatccatatatttctaacatgagtattttgacagtatttaataaatcagaaagctgtttgaatggaagtaaactaaaaaaaaaa

SEQ ID NO: 48550 - DNA, 1114 bp, Homo sapiens
tgccgggactgtccatcttttcccgccgttcactggcttttggaggagggtcagagttcacgccgctctctggaaataactgctcaaagccagaagttgcggggactagtggtcgcggacgtccttccggtcctaaatcttaaggggcaaaggacatactctgggactgttaactaggccctggaggcgggaagaggatgtgtgggtggggtcaggggtgagaggtcagagggccgcgaagtgggcggagcgagccggagtcggatggcggctacggcggctcattattttccgctgcaggggtgctgaaggggggacgcgggtcggacgcgtccggctgtggaagagagcggcggccgctcacaacatgcacagcctggcgacggctgcgcctgtgcctactacactggcacaagtggatagagaaaagatctatcagtggatcaatgagctgtccagtcctgagactagggaaaatgctttgctggagctaagtaagaagcgagaatctgttcctgaccttgcacccatgctgtggcattcatttggtactattgcagcacttttacaggaaattgtaaatatttatccatctatcaacccacccaccttgacagcacaccagtctaacagagtttgcaatgctctggcattactgcaatgtgtagcatcacatccagaaaccaggtcagcgtttctcgcagcacacatcccactttttttgtacccctttttgcacactgtcagcaaaacacgtccctttgagtatctccggctcaccagccttggagttattggggccctggtgaaaacagatgaacaagaagtaatcaactttttattaacaacagaaattatccctttatgtttgcgaattatggaatctggaagtgaactttctaaaacagttgccacattcatcctccagaagatcttgttagatgacactggtttggcttatatatgtcagacgtatgagcgtttctcccatgttgccatgatcttgggtaagatggtcctgcagctatccaaagagccttctgcccgtctgctgaagcatgtagtgagatgttaccttcgactttcagataaccccaggtaaacatttatagga

SEQ ID NO: 48551 - DNA, 1871 bp, Homo sapiens
tagcaaagtccggacatgtacattggaatacatatataacaacattcaggacaacactgttcaaaagagcaaaaacctactcaaaatccaaaaatccactgacagaagaatagaaaattctaattgtggtatattctgaatccctacggcggctcattattttccgctgcaggggtgctgaaggggggacgcgggtcggacgcgtccggctgtggaagagagcggcggccgctcacaacatgcacagcctggcgacggctgcgcctgtgcctactacactggcacaagtggatagagaaaagatctatcagtggatcaatgagctgtccagtcctgagactagggaaaatgctttgctggagctaagtaagaagcgagaatctgttcctgaccttgcacccatgctgtggcattcatttggtactattgcagcacttttacaggtgattgtgatgcaagtgatctaagaactacgctttgacgaacaccgctttaggagtactgtaagataaatctacatgacagggggaggaaggtggaaagtagagtataaggaccacaaggaaattgtaaatatttatccatctatcaacccacccaccttgacagcacaccagtctaacagagtttgcaatgctctggcattactgcaatgtgtagcatcacatccagaaaccaggtcagcgtttctcgcagcacacatcccactttttttgtacccctttttgcacactgtcagcaaaacacgtccctttgagtatctccggctcaccagccttggagttattggggccctggtgaaaacagatgaacaagaagtaatcaactttttattaacaacagaaattatccctttatgtttgcgaattatggaatctggaagtgaactttctaaaacagttgccacattcatcctccagaagatcttgttagatgacactggtttggcttatatatgtcagacgtatgagcgtttctcccatgttgccatgatcttgggtaagatggtcctgcagctatccaaagagccttctgcccgtctgctgaagcatgtagtgagatgttaccttcgactttcagataaccccagggcacgtgaagcactcagacagtgcctccctgaccagctgaaagacacaaccttcgcccaggtgctaaaagatgacaccaccacgaaacgctggcttgcacaactggtgaagaacctgcaagagggccaggtcaccgatccccggggtatccccctgccccctcagtgatccttccctgttccctcccactactcccccaagttggggaaaggagggggaacctacgagaaaaacagctcaggttttatcaccgactgggaatagacaacctcaatgctgaaccgcactggagaaaaggggcaaggtacccctgctgaggtgtatgggctgccatctcaggctgtcttgaggacctgggctccctctgctactcccaggaaatgggctcctgacacagcagtctgccaccacagccccaggagggtgtcaacaccagcaaatgctgtatttgcagcatgtccaagatgacccttctcccctacctctacctagccactggcagggaggggagacagtggtgatagcagcagcactctaggcatggtgaacgcctgggaccaagccatgtggcgttttttattttgcctttctggaagactcaagatatgtctcttcattctctctcagtatttgtttactttggtttttttgtttttaatctcagagagaggtgtgtttagtgggcacaagctgtaatattcagcaaaactttgtcgactggcactgtttacaagtctgttagctgcataagctcaataaaaagttggtctgggcattaca

SEQ ID NO: 48552 - DNA, 1266 bp, Homo sapiens
gcctggcgacggctgcgtctgtgcctactacactggcattactgcagatgtgtagcatcacatccagaaaccaggtcagcgtttctcgcagcacacatcccactttttttgtacccctttttgcacactgtcagcaaaacacgtccctttgagtatctccggctcaccagccttggagttattggggccctggtgaaaacagatgaacaagaagtaatcaactttttattaacaacagaaattatccctttatgtttgcgaattatggaatctggaagtgaactttctaaaacagttgccacattcatcctccagaagatcttgttagatgacactggtttggcttatatatgtcagacgtatgagcgtttctcccatgttgccatgatcttgggtaagatggtcctgcagctatccaaagagccttctgcccgtctgctgaagcatgtagtgagatgttaccttcgactttcagataaccccagggcacgtgaagcactcagacagtgcctccctgaccagctgaaagacacaaccttcgcccaggtgctaaaagatgacaccaccacgaaacgctggcttgcacaactggtgaagaacctgcaagagggccaggtcaccgatccccggggtatccccctgccccctcagtgatccttccctgttccctcccactactcccccaagttggggaaaggagggggaacctacgagaaaaacagctcaggttttatcaccgactgggaatagacaacctcaatgctgaaccgcactggagaaaaggggcaaggtacccctgctgaggtgtatgggctgccatctcaggctgtcttgaggacctgggctccctctgctactcccaggaaatgggctcctgacacagcagtctgccaccacagccccaggagggtgtcaacaccagcaaatgctgtatttgcagcatgtccaagatgacccttctcccctacctctacctagccactggcagggaggggagacagtggtgatagcagcagcactctaggcatggtgaacgcctgggaccaagccatgtggcgttttttattttgcctttctggaagactcaagatatgtctcttcattctctctcagtatttgtttactttggtttttttgtttttaatctcagagagaggtgtgtttagtgggcacaagctgtaatattcagcaaaactttgtcgactggcactgtttacaagtctgttagctgcataagctcaataaaaagttggtctgggcattaca

SEQ ID NO: 48553 - DNA, 1338 bp, Homo sapiens
tgccgggactgtccatcttttcccgccgttcactggcttttggaggagggtcagagttcacgccgctctctggaaataactgctcaaagccagaagttgcggggactagtggtcgcggacgtccttccggtcctaaatcttaaggggcaaaggacatactctgggactgttaactaggccctggaggcgggaagaggatgtgtgggtggggtcaggggtgagaggtcagagggccgcgaagtgggcggagcgagccggagtcggatggcggctacggcggctcattattttccgctgcaggggtgctgaaggggggacgcgggtcggacgcgtccggctgtggaagagagcggcggccgctcacaacatgcacagcctggcgacggctgcgcctgtgcctactacactggcacaagtggatagagaaaagatctatcagtggatcaatgagctgtccagtcctgagactagggaaaatgctttgctggagctaagtaagaagcgagaatctgttcctgaccttgcacccatgctgtggcattcatttggtactattgcagcacttttacaggaaattgtaaatatttatccatctatcaacccacccaccttgacagcacaccagtctaacagagtttgcaatgctgctggcttgcacaactggtgaagaacctgcaagagggccaggtcaccgatccccggggtatccccctgccccctcagtgatccttccctgttccctcccactactcccccaagttggggaaaggagggggaacctacgagaaaaacagctcaggttttatcaccgactgggaatagacaacctcaatgctgaaccgcactggagaaaaggggcaaggtacccctgctgaggtgtatgggctgccatctcaggctgtcttgaggacctgggctccctctgctactcccaggaaatgggctcctgacacagcagtctgccaccacagccccaggagggtgtcaacaccagcaaatgctgtatttgcagcatgtccaagatgacccttctcccctacctctacctagccactggcagggaggggagacagtggtgatagcagcagcactctaggcatggtgaacgcctgggaccaagccatgtggcgttttttattttgcctttctggaagactcaagatatgtctcttcattctctctcagtatttgtttactttggtttttttgtttttaatctcagagagaggtgtgtttagtgggcacaagctgtaatattcagcaaaactttgtcgactggcactgtttacaagtctgttagctgcataagctcaataaaaagttggtctgggcattaca

SEQ ID NO: 48554 - DNA, 1219 bp, Homo sapiens
tgccgggactgtccatcttttcccgccgttcactggcttttggaggagggtcagagttcacgccgctctctggaaataactgctcaaagccagaagttgcggggactagtggtcgcggacgtccttccggtcctaaatcttaaggggcaaaggacatactctgggactgttaactaggccctggaggcgggaagaggatgtgtgggtggggtcaggggtgagaggtcagagggccgcgaagtgggcggagcgagccggagtcggatggcggctacggcggctcattattttccgctgcaggggtgctgaaggggggacgcgggtcggacgcgtccggctgtggaagagagcggcggccgctcacaacatgcacagcctggcgacggctgcgcctgtgcctactacactggcacaagtggatagagaaaagatctatcagtggatcaatgagctgtccagtcctgagactagggaaaatgctttgctggagctaagtaagaagcgagaatctgttcctgaccttgcacccatgctgtggcattcatttggtactattgcagcacttttacaggaaattgtaaatatttatccatctatcaacccacccaccttgacagcacaccagtctaacagagtttgcaatgctctggcattactgcaatgtgtagcatcacatccagaaaccaggtcagcgtttctcgcagcacacatcccactttttttgtacccctttttgcacactgtcagcaaaacacgtccctttgagtatctccggctcaccagccttggagttattggtaagttattagaattgttttgcaagcctgaaatactcacagtagtagtctaagttgggtgttttgtcttgccggttatgatttttgtacaccagtcattcatttttgtctttgaggttgtctcattcactaatcaataagtatcaggaacatgatgactcctatcaagcactcttctaagtgttgttaataagactttgagatccaacgtttgggattaaattcagcatatatgtggaaacatttgctggaattgtagggagagtaaagcataagaacttgattcaatatataaagagtattattaaaggaataagagtttaaatttgggacttctcctcttcccttttctctcctcttctcttcttttcttttcttttctttctgatagggtcttgctgtgttacgccaggctggaattg

SEQ ID NO: 48555 - DNA, 630 bp, Homo sapiens
tgccgggactgtccatcttttcccgccgttcactggcttttggaggagggtcagagttcacgccgctctctggaaataactgctcaaagccagaagttgcggggactagtggtcgcggacgtccttccggtcctaaatcttaaggggcaaaggacatactctgggactgttaactaggccctggaggcgggaagaggatgtgtgggtggggtcaggggtgagaggtcagagggccgcgaagtgggcggagcgagccggagtcggatggcggctacggcggctcattattttccgctgcaggggtgctgaaggggggacgcgggtcggacgcgtccggctgtggaagagagcggcggccgctcacaacatgcacagcctggcgacggctgcgcctgtgcctactacactggcacaagtggatagagaaaagatctatcagtggatcaatgagctgtccagtcctgagactagggaaaatgctttgctggagctaagtaagaagcgagaatctgttcctgaccttgcacccatgctgtggcattcatttggtactattgcagcacttttacaggaaattgtaaatatttatccatctatcaacccacccgtcgacgcggccgcgaatttgta

SEQ ID NO: 48556 - DNA, 934 bp, Homo sapiens
tgccgggactgtccatcttttcccgccgttcactggcttttggaggagggtcagagttcacgccgctctctggaaataactgctcaaagccagaagttgcggggactagtggtcgcggacgtccttccggtcctaaatcttaaggggcaaaggacatactctgggactgttaactaggccctggaggcgggaagaggatgtgtgggtggggtcaggggtgagaggtcagagggccgcgaagtgggcggagcgagccggagtcggatggcggctacggcggctcattattttccgctgcaggggtgctgaaggggggacgcgggtcggacgcgtccggctgtggaagagagcggcggccgctcacaacatgcacagcctggcgacggctgcggtgagtggctgggcccccaggcttggaaccagaatcctttctcagacccacgtttcggccttctctcctaattcccggtgtcgggtccctagtctgatttttttctgccctcaatctccaaggccccggttcccctcctcggcacgctttggttgtggtggagccggcccctatttccttgccggacgcctctcgcggccttcagcgcgacccatcgcgttctttgcgggcgccggggcctggtcccacgcccgtagcaggccattcattgatttattgcgctgaccaacagtttcagggcgccagttgtgttctgggcgccggcgtcgatgaggggaattccatggtcaatctgacgcggcccctgctcttagaactcaccacgtcgcagcgggaaggaaatggcttctagttcaaaccacttgctttatttatggaaaacctgaggcccggaaaagtgcataatttttgcatctgacttaggttctctgcatttaaaacttttcctcgacacatctcgttttacccgcgtgatcttttaac

SEQ ID NO: 48557 - DNA, 379 bp, Homo sapiens
cttagtgaattaatgaacatcctggagataaaccttgataatcctattggtgaataacatctaagtcatccagtagataatgtttcttctgaaaggttatgtgaccaaccagaccctacagattttgagaaaacatcctcctcataattgcactttgttttagccatgaagtccaatatgcaatagaaatagaaaaacaaaaatttcagaaagaataccagtgaaatcaggttatacggcagtatgttagcttcgtgttcctactgtgcttaagggaagcattaatttcctcaataatttttctccttggcttagtgctgaaatggcacaaaataggtggaggtctgattctgatttactattaatgccacaagcattt

SEQ ID NO: 48558 - DNA, 719 bp, Homo sapiens
atataatagtgcttaataaatggctaatttagaaagacttgagattgaggactggccaacagggtcaaaatgcaaggcctgccgatgtccaggatgtaccaggtgtctaccttcaaggatcatttggaggaaggaggtcatgatgaaagatgaagtgagtgacctccaagttggatgacctccatcaaacaagatgggcaaattcccaaatgctactggtcacaggtgcctgaggagaacaatctgctttcaaagtacaattaaatatggaaaatgctcagtgatctcaaggggtagacccaccccggtgccccatctgctcagtttaggcagagccattagacagtgctggggaaaatgtttatctctaagtttacagaaggttcttttggaatctctttgccgaactcaaaaggggggcgttctcagacacagatgatctcaacaacctttgtttaggttggaatcctgggaaagtcatcaatctttgggcaactcacatttctatttttgttccagttatccagcagataataaataagtttttagttctgctaagtgctaatttgagaggcatctctttttatttattgggagaaaatacgaaagatgcagcctaagaaataatctgttggtgttgccgactcaccttttcaggtaaggcatccattttattattatttagcatttttgctaaattaagaatgagaatgaatcag

SEQ ID NO: 48559 - DNA, 316 bp, Homo sapiens
gattaaaatcactcagtaaactagtacagcgtgataattcccaatccaaaaacctgaaatgctccaaaatcctaaactttttgaacaccaacatggagtgcaagggaaatgctcattgtagtgtttaggatttcagattagagatactaaactggtgtaatgcaaataattcaaaatttaaaaaaatcgaaaattggaaacatttctggttctaagcatttcacataagagctactcaacctgtactaaaaggtaattattatttttcattctgataagggacacctacgaaaactctacagcaaactatatgtta

SEQ ID NO: 48560 - DNA, 441 bp, Homo sapiens
atatctagtagcagccatttttcaggattaaagtacagtttatcaaaatttacccaatcaactcccattttatttagctatgataaatgttccatgctcttacagccagaaagtatctgattattaactcaagtaaacttgaattcatttgctgcagccaaactgctgctctgggataggatgtgaccaaagtttgtactttattttaacctctagggattggagagaaaggaccagtgggatgatgagaagtcttggattctggaggccattttagccatttattcattattatgtgactttgggcaagtcttgtgatctttttgaagttccgtttcatatccattacaaatgaataacagttgtcacgccacacagagttatggtaacagtgaactaatttcgaagacactgtgaaaaacacaaagctcactgacttgg

SEQ ID NO: 48561 - DNA, 715 bp, Homo sapiens
tgtgccatctagcaggggatttatcttgatttcttcaaagttcttttccttttgggatatttgggtcagtaaaaggcccacacattttctgaaagcaaaatggaaaacatttttgaaaaaaaatttaactttttgttagatttaagagataattgcaaaaaagaaatcttatttatttatttatttatttatttatttattcatttattttggtagagacagggtcttgttatattgcccaggctggtctcttaactcctggcctcaagctatcctccggcctatgtctcacagagtgctgggattacaggtgtgagccactgtgcttggcctgggaaatcttattgtaattattgatgaaaaccctgtgtggacaggaactttcagctatttataaataacttcagctgtttttaaataaaaacaacatagttcttgcccagattgttgtttctggcacaatgggcttttactagctgttttcattgaagctaagcagggaaataatcctatatgtattccttagaccaatgaaagctatagactgtggctattttgtaaccttagtgctaaaattagctaccaaaataattgctacatcatcttttctgttatgatgaaccaggctggtttcggaccagtatttttgttgttgacatagtgatttggattgtatttcagctgtctcaaaaaatcatagttttagaaaattata

SEQ ID NO: 48562 - DNA, 444 bp, Homo sapiens
ccaggatcatggacacaggacatgggtaagttcctgaactccctctctgccctaaggttccttcatcctatcaaatgaaagtagtaatagtgagtattcactgaacacttccctatttggctgcactttttaatgtgtttcatattatgatgtgcccaggcagagctctgtaataagtcagtgcttctcaaactctctgtggtaaatgattaccttttttcttgaatttccaatttgccacagatcaatatttctgcaaagtactttaaaagttacttcctatgagcttttacagtgacaaatgaaaattttaaaaaaaaccttaaaattgaaatcactgtacaaattagttattggttataaattactacaaacacttcaataaatatttaacaaataaaaaaataaaaaacttaattcctagaaaatgacataaaaaaaaga

SEQ ID NO: 48563 - DNA, 2759 bp, Homo sapiens
cccaagtagctaggaccacagacacctgctaacataccctgctaatgtttttaaaaaatttttctagaggtggctataacttttaatttttttgttttttgaggtggagtcttgctctgttgcccaggcccaccatgccaggctaatttttctatttttaatagagaccagttttcactatgtaggccaggctggtctttaactcctgacctcaagtggtccaccctactactctacatgcctgctctgttattaaccaagttttcatatgaatactggcccattgaagactcttctttttccttgatctatttgtttatctctctgctaatagtatgctgtcctgaatgtgatggtttggaaatctttggtgttaggtaagccatccacctgctattcagaaggctttgacaattattagatgttaattcctgcacaccaggtggtgggaggtttggaaaagtagcttttgtttacctaaaatgtctgttttggggatttttttttttttttgagacggcgtctcgctctgttgcccaggctggagtgcagtggcatgatctcagctgactgtaatctccgcttcctgggttcaagtgattcttctgtctcagcctcccaaatagctgggactacaggcatgcgccatcacgcctggctaattttttgtatttttagtagagatggggtttcaccatgttggccaggctggtctcaaactcctgtcctcaagtgatccacctgcctcggcctcccaaagtgctgggattacaggtgtgagtcaccacacccagctgtattgggtatttatgaaattttgtaaggatatcatttggaagaagggacatcttattgagttttttctaggaacacatgttatctttccacttactccatactgctttgacattacctgacagaaattttaaaattcttccattaggacaattaaatattgatcatgaatcttatttactacttgattaaatttggtctagagtaaactgcttgcaagcttcaggatattctctcttggtataaccacatgggatgagctcagttccccaggggacaagttgtgacaacacgtgtgacatattgtctcccaggaaagctcattaaagactctgtgcccagagtgtttttctggggctagtgccctaggcaccacttctagtttggaacaaaagagtaggctttcagaaggaaaacagttcagtcagtaccatcctgtttgtcaataccataaaccgtttagccacagtaagccactttgtcacttaagttgatgggatccctctcgtagtctaagttgaccccgatagtagcaaaggtcgaacttggtaaacaggcctttctaaggatacccagactcaggactgctgaaatgagcgctgtctgcacaccaggtggtgggagtttgttgtgacaggtactagagattcactctgcaaagagcatttggggcaacgcagcagcacaactgactccctggacccaccacagagagggtggtcctcctctgtggctggctctctgagtaggtcagttctcacactggaactgctgcgagggaggaagtgcgtgtagataggaggaggccgatgactcaatcatggagtgagtgtttggagagcccggcgtcatgggatcactcatgtattgagtagagatccccagtgctgagtctcacccctcctcctccacacctgtgggatgtttcaggactcagtggcctttgaggatgtggctgtgaacttcacccaggaggagtgggctttgctgagtccttcccagaagaatctctacagagatgtgacgctggaaaccttcaggaacctggcctcggaatccaatggaaagaccaggacattgagaatctgtaccaaaacctggggattaagctaagaagtctggtggagagactctgtggacgtaaagaagggaatgaacacagagaaactttcagccagattcctgattgtcacctgaacaagaaaagtcaaactggagtgaaaccatgcaaatgcagcgtgtgtgggaaagtcttcctccgtcattcattcctggacaggcacatgagagctcatgctggacacaaacgatctgagtgtggtggggaatggagagagacgccccgtaaacagaaacaacatgggaaagcctccatttcccccagtagtggtgcacggcgcacagtaacaccaactcgaaagagaccttatgaatgcaaggtgtgcgggaaagcctttaattctcccaatttatttcaaatccatcaaagaactcacactggaaagaggtcctataaatgtagggaaatagtgagagccttcacagtttccagtttctttcgaaaacatggaaaaatgcatactggagaaaaacgctatgaatgtaaatactgtggaaaacctatcgattatcccagtttatttcaaattcatgttagaactcacactggagaaaaaccttacaaatgtaaacaatgtggtaaagccttcatttccgcaggttaccttcggacacatgaaatcagatctcacgcgctggagaaatcccaccaatgtcaggaatgtgggaaaaaactcagttgttccagttcccttcacagacatgaaagaactcatagtggaggaaaactctacgaatgtcaaaaatgtgccaaagtctttagatgtcccacgtcccttcaagcacatgaaagagctcacactggagaaagaccttatgaatgtaataaatgtggtaaaaccttc

SEQ ID NO: 48564 - DNA, 1969 bp, Homo sapiens
  misc_feature (1785)..(1785): n is a, c, g, or t
gagctgtaaggtcagccgaaaggacgaagagacctgaagtcagtcaagactcagtggcctttgaggatgtggctgtgaacttcacccaggaggagtgggctttgctgagtccttcccagaagaatctctacagagatgtgacgctggaaaccttcaggaacctggcctcggaatccaatggaaagaccaggacattgagaatctgtaccaaaacctggggattaagctaagaagtctggtggagagactctgtggacgtaaagaagggaatgaacacagagaaactttcagccagattcctgattgtcacctgaacaagaaaagtcaaactggagtgaaaccatgcaaatgcagcgtgtgtgggaaagtcttcctccgtcattcattcctggacaggcacatgagagctcatgctggacacaaacgatctgagtgtggtggggaatggagagagacgccccgtaaacagaaacaacatgggaaagcctccatttcccccagtagtggtgcacggcgcacagtaacaccaactcgaaagagaccttatgaatgcaaggtgtgcgggaaagcctttaattctcccaatttatttcaaatccatcaaagaactcacactggaaagaggtcctataaatgtagggaaatagtgagagccttcacagtttccagtttctttcgaaaacatggaaaaatgcatactggagaaaaacgctatgaatgtaaatactgtggaaaacctatcgattatcccagtttatttcaaattcatgttagaactcacactggagaaaaaccttacaaatgtaaacaatgtggtaaagccttcatttccgcaggttaccttcggacacatgaaatcagatctcacgcgctggagaaatcccaccaatgtcaggaatgtgggaaaaaactcagttgttccagttcccttcacagacatgaaagaactcatagtggaggaaaactctacgaatgtcaaaaatgtgccaaagtctttagatgtcccacgtcccttcaagcacatgaaagagctcacactggagaaagaccttatgaatgtaataaatgtggtaaaaccttcaattatcccagttgttttcgaagacataaaaaaactcatagtggagaaaagccatatgaatgtacaaggtgtggtaaagcctttgggtggtgcagttccctccgaagacatgaaatgactcacactggagaaaaaccctttgattgtaaacagtgtggtaaagtctttactttttcaaattaccttagacttcatgaaagaactcatttggccgggcgtagccagtgctttggcaggaggcagggggatcacctgagcccaggagtttgagaccagcctgggcaacataagaaggccccatatcggctgggtacggtggctcacgcttgtaatcccagcactttgggaggctgaggcgggtggatcacctgaggtcaggagttcaagactagcctggccaacatggtgaaaccccgtctctactaaaaatacaaaaaaattaactgggcatggtggtgggcacctgtaatctcagctactcgggaggccgaggcaggagaatcgcttgaacctgggaggtggaggttgcagtgagccgagatcacgccattgcactccagcctgggcgacaaaagtgagactccatcacacacacacacaaaaaagccccatatcacgtggtggctcatgcctgtaaaaccagcactttgggaagccgaggtgggtggatcacgaggtccagagatggagactatcttggccancatggtgaaaccccgtctctactaaaaatacaaaaattagccaggcgtggtggtgtgtgcctgtagtcccagctactcgggaggctgaggcaggagaattgcttgaaccagggacttggaggttgcagtgagccgagatcgcgccgctgcactccagcctggtgacagagcgagacttcgtctc

SEQ ID NO: 48565 - DNA, 3647 bp, Homo sapiens
  misc_feature (3463)..(3463): n is a, c, g, or t
cccaagtagctaggaccacagacacctgctaacataccctgctaatgtttttaaaaaatttttctagaggtggctataacttttaatttttttgttttttgaggtggagtcttgctctgttgcccaggcccaccatgccaggctaatttttctatttttaatagagaccagttttcactatgtaggccaggctggtctttaactcctgacctcaagtggtccaccctactactctacatgcctgctctgttattaaccaagttttcatatgaatactggcccattgaagactcttctttttccttgatctatttgtttatctctctgctaatagtatgctgtcctgaatgtgatggtttggaaatctttggtgttaggtaagccatccacctgctattcagaaggctttgacaattattagatgttaattcctgcacaccaggtggtgggaggtttggaaaagtagcttttgtttacctaaaatgtctgttttggggatttttttttttttttgagacggcgtctcgctctgttgcccaggctggagtgcagtggcatgatctcagctgactgtaatctccgcttcctgggttcaagtgattcttctgtctcagcctcccaaatagctgggactacaggcatgcgccatcacgcctggctaattttttgtatttttagtagagatggggtttcaccatgttggccaggctggtctcaaactcctgtcctcaagtgatccacctgcctcggcctcccaaagtgctgggattacaggtgtgagtcaccacacccagctgtattgggtatttatgaaattttgtaaggatatcatttggaagaagggacatcttattgagttttttctaggaacacatgttatctttccacttactccatactgctttgacattacctgacagaaattttaaaattcttccattaggacaattaaatattgatcatgaatcttatttactacttgattaaatttggtctagagtaaactgcttgcaagcttcaggatattctctcttggtataaccacatgggatgagctcagttccccaggggacaagttgtgacaacacgtgtgacatattgtctcccaggaaagctcattaaagactctgtgcccagagtgtttttctggggctagtgccctaggcaccacttctagtttggaacaaaagagtaggctttcagaaggaaaacagttcagtcagtaccatcctgtttgtcaataccataaaccgtttagccacagtaagccactttgtcacttaagttgatgggatccctctcgtagtctaagttgaccccgatagtagcaaaggtcgaacttggtaaacaggcctttctaaggatacccagactcaggactgctgaaatgagcgctgtctgcacaccaggtggtgggagtttgttgtgacaggtactagagattcactctgcaaagagcatttggggcaacgcagcagcacaactgactccctggacccaccacagagagggtggtcctcctctgtggctggctctctgagtaggtcagttctcacactggaactgctgcgagggaggaagtgcgtgtagataggaggaggccgatgactcaatcatggagtgagtgtttggagagcccggcgtcatgggatcactcatgtattgagtagagatccccagtgctgagtctcacccctcctcctccacacctgtgggatgtttcaggactcagtggcctttgaggatgtggctgtgaacttcacccaggaggagtgggctttgctgagtccttcccagaagaatctctacagagatgtgacgctggaaaccttcaggaacctggcctcggaatccaatggaaagaccaggacattgagaatctgtaccaaaacctggggattaagctaagaagtctggtggagagactctgtggacgtaaagaagggaatgaacacagagaaactttcagccagattcctgattgtcacctgaacaagaaaagtcaaactggagtgaaaccatgcaaatgcagcgtgtgtgggaaagtcttcctccgtcattcattcctggacaggcacatgagagctcatgctggacacaaacgatctgagtgtggtggggaatggagagagacgccccgtaaacagaaacaacatgggaaagcctccatttcccccagtagtggtgcacggcgcacagtaacaccaactcgaaagagaccttatgaatgcaaggtgtgcgggaaagcctttaattctcccaatttatttcaaatccatcaaagaactcacactggaaagaggtcctataaatgtagggaaatagtgagagccttcacagtttccagtttctttcgaaaacatggaaaaatgcatactggagaaaaacgctatgaatgtaaatactgtggaaaacctatcgattatcccagtttatttcaaattcatgttagaactcacactggagaaaaaccttacaaatgtaaacaatgtggtaaagccttcatttccgcaggttaccttcggacacatgaaatcagatctcacgcgctggagaaatcccaccaatgtcaggaatgtgggaaaaaactcagttgttccagttcccttcacagacatgaaagaactcatagtggaggaaaactctacgaatgtcaaaaatgtgccaaagtctttagatgtcccacgtcccttcaagcacatgaaagagctcacactggagaaagaccttatgaatgtaataaatgtggtaaaaccttcaattatcccagttgttttcgaagacataaaaaaactcatagtggagaaaagccatatgaatgtacaaggtgtggtaaagcctttgggtggtgcagttccctccgaagacatgaaatgactcacactggagaaaaaccctttgattgtaaacagtgtggtaaagtctttactttttcaaattaccttagacttcatgaaagaactcatttggccgggcgtagccagtgctttggcaggaggcagggggatcacctgagcccaggagtttgagaccagcctgggcaacataagaaggccccatatcggctgggtacggtggctcacgcttgtaatcccagcactttgggaggctgaggcgggtggatcacctgaggtcaggagttcaagactagcctggccaacatggtgaaaccccgtctctactaaaaatacaaaaaaattaactgggcatggtggtgggcacctgtaatctcagctactcgggaggccgaggcaggagaatcgcttgaacctgggaggtggaggttgcagtgagccgagatcacgccattgcactccagcctgggcgacaaaagtgagactccatcacacacacacacaaaaaagccccatatcacgtggtggctcatgcctgtaaaaccagcactttgggaagccgaggtgggtggatcacgaggtccagagatggagactatcttggccancatggtgaaaccccgtctctactaaaaatacaaaaattagccaggcgtggtggtgtgtgcctgtagtcccagctactcgggaggctgaggcaggagaattgcttgaaccagggacttggaggttgcagtgagccgagatcgcgccgctgcactccagcctggtgacagagcgagacttcgtctc

SEQ ID NO: 48566 - DNA, 2028 bp, Homo sapiens
  misc_feature (1844)..(1844): n is a, c, g, or t
cctcggggagcccctggtgccccggatacggctgatttgtcgtgtgggacctgttctggctgctccagccccaggaaggacccaggacacccggaagccggaaatggactcagtggcctttgaggatgtggctgtgaacttcacccaggaggagtgggctttgctgagtccttcccagaagaatctctacagagatgtgacgctggaaaccttcaggaacctggcctcggaatccaatggaaagaccaggacattgagaatctgtaccaaaacctggggattaagctaagaagtctggtggagagactctgtggacgtaaagaagggaatgaacacagagaaactttcagccagattcctgattgtcacctgaacaagaaaagtcaaactggagtgaaaccatgcaaatgcagcgtgtgtgggaaagtcttcctccgtcattcattcctggacaggcacatgagagctcatgctggacacaaacgatctgagtgtggtggggaatggagagagacgccccgtaaacagaaacaacatgggaaagcctccatttcccccagtagtggtgcacggcgcacagtaacaccaactcgaaagagaccttatgaatgcaaggtgtgcgggaaagcctttaattctcccaatttatttcaaatccatcaaagaactcacactggaaagaggtcctataaatgtagggaaatagtgagagccttcacagtttccagtttctttcgaaaacatggaaaaatgcatactggagaaaaacgctatgaatgtaaatactgtggaaaacctatcgattatcccagtttatttcaaattcatgttagaactcacactggagaaaaaccttacaaatgtaaacaatgtggtaaagccttcatttccgcaggttaccttcggacacatgaaatcagatctcacgcgctggagaaatcccaccaatgtcaggaatgtgggaaaaaactcagttgttccagttcccttcacagacatgaaagaactcatagtggaggaaaactctacgaatgtcaaaaatgtgccaaagtctttagatgtcccacgtcccttcaagcacatgaaagagctcacactggagaaagaccttatgaatgtaataaatgtggtaaaaccttcaattatcccagttgttttcgaagacataaaaaaactcatagtggagaaaagccatatgaatgtacaaggtgtggtaaagcctttgggtggtgcagttccctccgaagacatgaaatgactcacactggagaaaaaccctttgattgtaaacagtgtggtaaagtctttactttttcaaattaccttagacttcatgaaagaactcatttggccgggcgtagccagtgctttggcaggaggcagggggatcacctgagcccaggagtttgagaccagcctgggcaacataagaaggccccatatcggctgggtacggtggctcacgcttgtaatcccagcactttgggaggctgaggcgggtggatcacctgaggtcaggagttcaagactagcctggccaacatggtgaaaccccgtctctactaaaaatacaaaaaaattaactgggcatggtggtgggcacctgtaatctcagctactcgggaggccgaggcaggagaatcgcttgaacctgggaggtggaggttgcagtgagccgagatcacgccattgcactccagcctgggcgacaaaagtgagactccatcacacacacacacaaaaaagccccatatcacgtggtggctcatgcctgtaaaaccagcactttgggaagccgaggtgggtggatcacgaggtccagagatggagactatcttggccancatggtgaaaccccgtctctactaaaaatacaaaaattagccaggcgtggtggtgtgtgcctgtagtcccagctactcgggaggctgaggcaggagaattgcttgaaccagggacttggaggttgcagtgagccgagatcgcgccgctgcactccagcctggtgacagagcgagacttcgtctc

SEQ ID NO: 48567 - DNA, 425 bp, Homo sapiens
agtagagatccccagtgctgagtctcacccctcctcctccacacctgtgggatgtttcaggactcagtggcctttgaggatgtggctgtgaacttcacccaggaggagtgggctttgctgagtccttcccagaagaatctctacagagatgtgacgctggaaaccttcaggaacctggcctcggtcggtaagaaggacatttccttccttagtcaattagaagacaagtgtgttttggtcaccagtgtggttgcacagtttggaatgtggaaagagaatacgttggtgaataaatggggcatcgtgggccaggtacagtggcttacccttgtaatcctagtgctttgggaagccacggtgggaagattgcttgcgtccaggagtttgagaccagcctgggcaacatgatgagaccctgtctcttt

SEQ ID NO: 48568 - DNA, 399 bp, Homo sapiens
ggaaaggaaattaatcttttctggatacttctgtgtaccaagtactatgttcagtcctctatttactctctataattgatcttctatgaacagctatcattccattttacagatttttaaggtgtcatatactttaaataacttcttcatagctaggaggtggcgagggaaaatgcaaacaaaagtttgcctagaaccaaacccagccagcctttctactttgctgttttccatggcgtatgctcagttaatgtctgctgatcaccatctccaggacagaatctgacagctagtaataattgggaaacatatggcagacaacgtttgattatctgtgggtgttgggaatagatgctctcattagttgttagaaaaattataaaactgacattgttgagt

SEQ ID NO: 48569 - DNA, 1485 bp, Homo sapiens
  misc_feature (1443)..(1443): n is a, c, g, or t
  misc_feature (1469)..(1469): n is a, c, g, or t
aactcagtgaactggcatttttcaaatgacttatatgtgatattacaaaattatgcatggctgaaagtccattctacatgcatgataaaccagtgaatgttaatataatgccacaaaaagttcattagtatggcttgagtctatgttatagttaacctttaaaaaactaccacttgttaagttttggtgtagtatcaaagaaaaatgtccacagttatttgaaaaagccatttaagtcttccttttccaatacgtgtctgtgtgaatgcccattttcttcatacacttcagtcagaacaacatattgcaacagaatgaatgcagaagcatatgtaagaatccagcagtcttctattaagccaaacattaagagatgtataaacataaagcaaggctattcatcttactaaattttcattttttgttttggaaaatagctttttcatttatgtagataagtaattgttttcttacttttaaatgaattaatactaagtttctcagttttcatttcaaatgtggtaattatcaatgtaagtaacccttgtaaacaaacattctttggggtccttaatgatttttaagaatgtaaaggagtactgagaccaaaagtttgagtacttctgtccttaggcatccattgtattaataaattaactttttccatgcagctataatagaatgatactacttttgtcaattttggcttttgttgccattgcttttggtgttttagacatgaagtccttgcccatacatatgtaacaaaccctgcacattgtgcacatgtaccctaaaacttaaagtataataaaaaataaaaataaaaaattaaaaaaagaatgatactacttttgccccattttgcaagacttgagaaaattatcactcaaatcattttctgtgttctgtggtttggatgaggaattctggttgagcacagctggaaggaataggcaattaggggaacaatatttctttagatagagtggttatctattcctgggagacagtattggaaatgagtcctgaataaagagagggtatcagttatgggaagatttggggaaaacattcctggcagtaggactagctattgcaaaggccctgaggtaagaacaaggttggcagtgtttacagactagtggggcctgaattactggaggagagtaaacaagggaaagtaatatgacagtaaggccagagagatagccaggggccagatcatgttgggcctaattgcactgggcaggcagccatgaagaactttaagcaaaagagggacgtgatctgattagaaaaagctaactcagcatgctgtgtgaggggggagaaaggtctgttgggagccgtggcaaaagtagagatagggagacaagttagaagacattgctgcttgtgactagagtggccggccactctagtcataaaggctgctcatanatttgatcagctaagccagctttggnctgaggctaaagaggc

SEQ ID NO: 48570 - DNA, 312 bp, Homo sapiens
ctttctgctttacctgtaattttccctttccttgaataaatgtattggccagaaaaatgaagaaggttctatatcagtcagtcatagcattgatgcacgatgctactacagggtaaggagggtttgaggaggggacggtttaaggaacttaagtgaagaggggtttcttattagcatttggctgtattagctcttcgaggaggacactggtttggccagggactctggtggcagcttcttagaaatgatctccattgctaagtatgcagaaagaaaatattagaactcctatttatatttacttatggttaa

SEQ ID NO: 48571 - DNA, 433 bp, Homo sapiens
taataaccctaattccagtcaataccctgggactggtgctctcttccctctttcatatctgtatcttctttttccaataaaggggccctatttcccaacaactggaatatatttaatcatgcactaatttatataatacatataaaagacatttcagtggctcacatctgtaataccagcactttgggaggccaaggtgggcagatcacaacgtcaggagtttgagaccagcctggccaacattgtgaaaccccgtctctactaaaaatacaaaaattagccaggcatggtggcgggcacctgtaatcccacctatttgggaggctgatgcaggagaatcgcttgaacccacgaggtggaggttgcagtgagccgagatcatgccattgtactccagcctgagcgacaaaagtaagacttaatctcaaaaaac

SEQ ID NO: 48572 - DNA, 322 bp, Homo sapiens
agggccggaaagagagttagaggaggcacacttcctagcttggggcccatcccccacacattccccctgtgactgagaggctcacaaaaccaatagagcagcattattaactctgcaatatcataagagagggcttcgctctctgccttggtggagagagagaggccaggggaggggcaggctggctccaggggaaagcatgcttcattagagtcttaactcaagggaggcaactgcttgtgtaagcgcaacagatgaacgcaatgtagagaggctcccataaaaaccctggccctggtctaggagtcgtcacagcgggggg

SEQ ID NO: 48573 - DNA, 315 bp, Homo sapiens
tggtgcgactggccagatagagcagccccgtcttacctcttaatagcagaactgggacgtattcccttcatgccctgaagctaagtctagctttctctctacctacctgtcacagaataatagattctgtgcagaattcagctcctctctgttagaaaggctcttctgcgttggagatggattttttggtgtttgtgagaccaggcttttttacatctctattatgcatagtacaaaaatcacttctgctgctgctctgagccctccctaaaagacaccgaagatttgctgcctgttggcgtggctctctccagg

SEQ ID NO: 48574 - DNA, 709 bp, Homo sapiens
  misc_feature (695)..(696): n is a, c, g, or t
cggggtttggtcttgatctcctgacctcgtgatccgcctgcctcggcctcccaaagtgctgaggattacaggtgtgagccaccacacccggccctgattttttaactttatgtatgggactcaacctgtgaaattattcttgacaaggagagggtgagtcagaatcatgtgttatcagctttcatttatatgcatcctttggtacaggtgagaggtagatgatttgtttttctgacattttattatgaaaaattataagcatttagaaaattataagaattttacattgaacacccatagttttcttccattaacattttctgtgcttacagtaccacatatgtgctcattcgtttatccatcagtgcagacgtgtgtatacttcccctaaatactggtttgtttttgaaagtttgttcctggcttataccctcctgtattctcagttgacagatctttacataaagagtctgcttttttctcatttttgtgcatcttagcactttagtggtattgtaatggaatattacatctagtatgtacagtgagagaggagctcttgaatttttggtattttctgaagtttaaaaaaaaacacctgcctcggcctcccaaagtgctggaattacaggtgggagccaccacacctggcctgtatcctgattttttaactttttttttgtgacagaacgagnnactgtctccaaaa

SEQ ID NO: 48575 - DNA, 330 bp, Homo sapiens
ttggcccttgttagtatttagtataaaataattggtgtctgcctcaaaagtaaggatttaattgtaaagcaattccttctttctgaaagataactttagggaagaaaaccttatcttatgtttggggatatatagtgggacagttgcaatcattgtatatattgggtgtgttagagttgatagcctcgttaagtttctcttatgtggaaaaattatttggcattttaattcacttcattgtttttttttttctccttttctacaggggctttcattcatatattttaatttttcttgttcttcttttgactagtttattgatggccatgc

SEQ ID NO: 48576 - DNA, 1201 bp, Homo sapiens
tcagggagctggtcagacacactgtctgtggcagaggctcaagtggaactcagggctactccaccaaatggcaggtccctgggaaagaggttggggctggggcctcagggcagggggcatggaacgggtgtaagccacagggaactggagaggcaaggtgggctgtgggaggggctctcaggggaccccagatagggtgtcctcatgcctgagtaaggggcctggaccctggaccccggcccccgagcactaccaggggacagaggccctcctcaggcctccagtctgacacgggtaaccaggctcgagctgggtggcctctcatgccttcgggggcactgcctgggcacctgggtcagagctgcggccatcatttcagtcctcactgcctggcctttagtgcagggcctttgaggaatgggggccaggcttcacagtgggcacagtgctcccatctgactctgacaggcctgcacagtcggactcatgagtcccatctcccagatgaggacaccatcaggctcagagaggtgaagcaacttgcccaaggacaaaaggcacaggcctgggacccaaactttgtgcttcttgacacaccgactcccccaggctgacccccaatgcctgatcccatcaggccaggataccccctgtccagagctgagctcctgttctcgggaaggccaaatcagagccatgtggggctggagcctgcttcccgagacctgccccaagcctgccctccgggccaggtccgcagggtgggtcacatgaaacttctgacagcaggcatcagacaccagctggaggaggaatggagggccaacaccaggcaggttgcttacaaagagggcccatggggtggggcggggccaaccacagctcggcaggcgccacaggaagggccccgcctcttcctgtcagttctaccaacggcccagagcagctgcggccgcgccaaggggaagctgcaactctcaaaaacaaaaaccccaaaggaggaacttccctggcggccctggaagactctgggcccccacccccaccacggggctccctgggccgacagccaggggcaaggaggcacgcagggtcgcagcgacttggagcaagccctggggtctcgctggctgctccaccctgagtggatgggaggccaaatctctggagagtggggagcacagctgggctggctggggta

SEQ ID NO: 48577 - DNA, 347 bp, Homo sapiens
cggaaaacccatttgtctttcctaaacgaaccaatttgtccttcccatagatgtctttctcccccattcctttcccctactaagttaggtatataagccccaaattctaaccacacttttcagttactcatcacggaacactcccacatgtgcgaacattgtccgcataaataagctcttttctcttactaatgtctttttttcagtttaatttgcaggctcctattgaaataacaaaagttggtagaggaaaaagttttttctcccctacaaaggccaagaacattttggctttatatttatatttatattataatgtgaattgattataattataatgtgaattg

SEQ ID NO: 48578 - DNA, 414 bp, Homo sapiens
tgaatttgaatggaccagtccctctgaaaacacataatacataaagtaacaattatagaactgtagctttatgatgagagagaatggcttgtgcccctccctccccatgtgtgcttattattatattgttttttagttcccccacttccaaattactcttgaggtgtctgggttaaatataagactgggattgattgttggcccagttatccatttgttacaaagttttatgatagctgtatggtctgaattgaattattgctctagaaactgccagctcattaatttttctttttaaaattttttcaatgttatgatttatttacttgcaacttttttcttgctttttctttttgattttctttagtttttatttttaaaaattttatattacagacaaacagaaacttcttc

SEQ ID NO: 48579 - DNA, 843 bp, Homo sapiens
tgatttcagaggatagacctcatagggtacttagaatcctacaatagtaaaactggaggaaacaaagttttacacaggaggaaactaaggctcacggatgtcaagaaacttaatattatctacacagttaagtgacaaagtcccgattctctctagccagcactctatccaagaagaggattttactggttataaaagcatcataattttttttttcttaatagagacgggatgcagtcttaataagttgcccaggctggacttgaactcttggctcaagtgattctcctgcctcagcctccctattaagagccgcccccgattaaagtagcctgctcatacaccttacttagtatgtttttgactagcattgcttttatctgatgttatttcctgtgcctttaggatatcatctcctggtcaattaatcacaagggttttttgttgttgctgtttttaactgcaatactatacatacttacctgaaactgttcaggaatgacagttacccttaatcaaaactgggaggcaaccacttttcccaatgcacttcaggtctgtaatacagacttcacgtctacattatatggtctatagtttataggaaactctccaaggacagagacctgccaatactttgtggtaaactataactacataacgtgaatttttaaagcaatagaagaaacggccgggcgtggtggcgcgcacctgtaatcccagctactggggaggctgaggttggagaactgcttgaacctgggaggaagaggttgcagtgagccgagatggcgtcactgcgctccagcctgggtgacagagcgagactccgtctcaacacca

SEQ ID NO: 48580 - DNA, 358 bp, Homo sapiens
aatttaagtttaaaaatacattccttgttggaaaggtaattggattatagtagcccaactgtaaattagtaggcaagtgtagattgtattgttgagaagtaaaaatacttgctacaagttttatgtgggattatgatgtgatttcttttacatgcaacttttaattaatgcagtacctttgtttacttccctgtctcaatgttaaagacaaataataagttattaaagcttaaattcatatatttggttttctgtgggctttttgttttttcattatttggaatttctaagaaatcttttgatggcaaaatatgaagtgataatttttagtttttcaagttgattgaataattgacta

SEQ ID NO: 48581 - DNA, 377 bp, Homo sapiens
agataaaggaatctaatccacactaagaaccccccacccagcttcagaatgaaagcattcccagaggtgttagagccctgggttcccacccggaccagagcctgtgtggccaatctgccaggctggaactccacaagctgctcctgggagcatgctgctgcttctggatccacctgaccccgacaaccttccagccctaggtgacagagtgagaccctgtctctaaaataaataaataaatacatacatacataaaggttactgtaggtttcgaagaattacctgtatttaaatgtatagtttctgggatgtgtgtgaaagatttatttggtcattcattcatacacacatggacacaaacctagaaaagtatattc

SEQ ID NO: 48582 - DNA, 447 bp, Homo sapiens
  misc_feature (254)..(254): n is a, c, g, or t
caatatttttaattggtaaggatccccacatttagcctaagaaagtatttaataattccggggaagaaaaacatggctgaattaatggccagattctgaatgggctttgagcaacatttggaatacaagtgtgtaaggtggggttggtgagatttgcctttatttccctgaactgcctatgaattagcaaattcctaaaccagctgttttcccaattacatacaataacttgtgcctacctaagtctgtctttnctgccaagcttctacttgcaactcattttaaaacttattcctaaatacccccaaaccagtggaataatagtaggcatcaccttaaatcataatattttcacaagaacatgttcaatcttgaaataatggccaggttttagaaagtgggaggtgagaacggaggagtagtttgttttttgtcgttaaaaaaaaa

SEQ ID NO: 48583 - DNA, 458 bp, Homo sapiens
tagagcctcatttggatgtgaggctcaaggaatatgagcctcataccagttaacgtgaggctcaagggttatgagcctcataccagttaatgtggaaagatccaaggcatctcctttgagggacagaagaattatagagcttgaattatagagcttgaagcaccatgagggatatccccttgggggatatgccttggatctttccatattaactggtacctacctcattttaaccctaggtttctatggcttaagtagatggtttccagtgcgtgcattctctgggggtggattccgttaaaggagaagtggtcattttaggatgtcttagcatttgagtgagtcaagctgaagctccctcctagtgccctgttcccgcagcatagatgcatagatgcactcctttcccagcactgtccgcaggaactgggattgtcatgcttgttaatgtttgacca

SEQ ID NO: 48584 - DNA, 505 bp, Homo sapiens
gcaagtattttattctgcagttgaatctgtattatcttggtagtcctagatttcacccatttcctttttcacgttgtctttgtcttgcatctcagcctagcctcccatttggctttctcttcctgttttataaagacatgtcttctggcattgaagcgatcatacaattttctacaaatttcaaaccgtatcttaggaagcagagataatatttgattgtctactgtgtgccagaaaattcatattacatttttaaacttaataactatggtatatcatatttttctgattttacaggtaaggctcagagtcacatagtgcagttgggattttgtgtggctcttccagttagagcaaaggttcctaacattcccactgcctccacgttgctcatattctcattatattcatcattctctataatgactatacgcactggaatacatatattctctgtgatgaatgtgtgcactggaatcttctggggctagggccaatgtagttt

SEQ ID NO: 48585 - DNA, 236 bp, Homo sapiens
aaaaatacctgttggtttttaccagccataaatacactatcctttccacattcacctaagcatttagtttttacagtccattactacatttaaaccaaaacattttcctttgagtgttccacattccttggtactgtctttacttatttgcaatatgatgagggatttgggctgtatattgttcttttcttttaagccacccttgcgcacataattggcaaatagtgtcaaaaggg

SEQ ID NO: 48586 - DNA, 506 bp, Homo sapiens
tcaagttctgagccagtgtgcttgaacactgtgctatactgcctcttgaccagatgtttgagagactgtaggaacctttgaaaacaccagtactagatgatacctctatttaacctggagcccctttttctcaaatgaaacatgatacagaagctaacatgtaaaacaggttagaaggtattctaacaaagtagagacgaggtacctttagcccagctctttcctcctcatcctcccagctgcctctaaaagagctctgtggaactcaagggctcacagatcacagtttgcaaaatattcataatgtaggcttcctgtattacagattagaaaatggactcaggtgatcaagtgactctctcagagtttgttaatttcttcccctttgtgatagtgaatagagaacaatcaaaataatgaagaaagagctttgtttttcctttggttcacccagtgaactctatacctttttttatatgctgtgggaatacaagactgtaagtcat

SEQ ID NO: 48587 - DNA, 622 bp, Homo sapiens
catccaagaaggctcattcacgtggctgataattgaaactaacttctttctcactcaggtgtagtaactctattttgggggcttatttcctagcttgcttccatagatgggcctatctttcttgccagtgattggttcaggcctaagccaattagtgcatagttttcccattggtcatggtagattgagatatggtttaataaaagtgactttgaatacttcatttgatggttgcagcaaacaagcttctctgtctttactcggaggaaccttgtttgctgatcatgaacacctcaaaatcatgagggaaagccagcctaagtagggaagccaaaaaagagacaagtgtgggagctgaaggaattgtagggaaatagagctggagccctagacaaagaatgcccgaatctcccctacttccaaatacttcaggaactgagccactacatccacttaattgtttaagttagtatgggttaggttttctgataattacaggagaaagcattctaaccgatcgacgcagctaatataaatgaccaaaaaaagggtgaaataaaaggatgagattaacagttgttacttatgaaataaaagagaaatagacaaatcttcaaaaatg

SEQ ID NO: 48588 - DNA, 540 bp, Homo sapiens
ttcgttccacattgctctgcctttggagcagtctgtgatgaaggtgacctaaaaagtgagcaccattagaacttgattgctgtcccaaaccatcatatctttaaaaatcctatgatcttcttagttatgcaggtaattgaataccttgttaaataccaggaatgtaaatggccagaaacctaacagtgtaaaagagtgaaatttattagtagttcctctcataagactattttgtaaagaaataactagagatatgtttgatatttatagcacattcattgcaaccattaaaaatatcaaaattgattatgtgggaaaatgtttaatgggaattgctcagtttttttccataaaggattatagaatatgttcaatatgatcccactttttgaaaatactcaggaaaaaaggatgtatacccagctgggcacagtgactcacacctgtaatcctaacactttgggaggctcagtgggaggatcacttgaggccaggagtttgagaccagcctggtcaacatagtgggactacatctctacc

SEQ ID NO: 48589 - DNA, 139 bp, Homo sapiens
ttctgaattttttaaaaagtaaaagtaaagcaatcattaagtagttcagataaaagaaaagcatctttacctgagttacccatcaggtctactctgacccgccctagcttctcccagaacaagcttctgggtatctaaa

SEQ ID NO: 48590 - DNA, 741 bp, Homo sapiens
aagtgaaaagagacattatttgtgttctcactaaattgcatttttgcatttccatcaaggcagctagcttgacagaatttactccaggcaccgtgcagtgcacacttttatgtttggtgacacctttcaaattactaacttatgggcgaggtgcagtggctcacgcctgtaatcctcccagcactttgtgaggcagaagcaggaggattacttgagcccaggctggtctcaaactcttgggcccaagtgatcctcctgccttggcctcccaaagtgctgggatttctgagccaccacactcagcctagtttggtttttaaatccacattttgacgttttaaaaacatttaaaaaactttgtttgaattaaaaaccatatgcatttttgagtgataaagcaatcacatcatggactagggtttcttttctgctttgaaatttaatgtagtgtgtggtattcagttttgatcgttatgatttcctggaggagttcatgaaataagggggcattttgacctgtgcttgagaaaatcatgaagctttttgtgtccaaatttatataaaatatgtttgcatatgtatatattcataaaatggaatattctccacatccctatttgtgtgctttatgtgcaggagggtccaatcttttggcttccctgggctatattggaagatgaattgtcttgggccacataaaatacaccaacactaatgttagttgatgagcttaaaaaaaaa

SEQ ID NO: 48591 - DNA, 1356 bp, Homo sapiens
tgtattgaaacaatttaatgaaaatattaaatatttggtttcaaaaggcagatttatcttctcccaacattctgttatttctgatacttttgaaaaactaataaaaacaattgttcggcgatcgctggctgccgggacttttctcgcgctggtctcttcggtggtcagggatggcgcggaagtcgaacttgcctgtgcttctcgtgccgtttctgctctgccaggccctagtgcgctgctccagccctctgcccctggtcgtcaacacttggccctttaagaatgcaaccgaagcagcgtggagggcattagcatctggaggctctgccctggatgcagtggagagcggctgtgccatgtgtgagagagagcagtgtgacggctctgtaggctttggaggaagtcctgatgaacttggagaaaccacactagatgccatgatcatggatggcactactatggatgtaggagcagtaggagatctcagacgaattaaaaatgctattggtgtggcacggaaagtactggaacatacaacacacacacttttagtaggagagtcagccaccacatttgctcaaagtatggggtttatcaatgaagacttatctaccagtgcttctcaagctcttcattcagattggcttgctcggaattgccagccaaattattggaggaatgttataccagatccctcaaaatactgcggaccctacaaaccacctggtatcttaaagcaggatattcctatccataaagaaacagaagatgatcgtggtcatgacactattggcatggttgtaatccataagacaggacatattgctgctggtacatctacaaatggtataaaattcaaaatacatggccgtgtaggagactcaccaatacctggagctggagcctatgctgacgatactgcaggggcagccgcagccactgggaatggtgatatattgatgcgcttcctgccaagctaccaagctgtagaatacatgagaagaggagaagatccaaccatagcttgccaaaaagtgatttcaagaatccagaagcattttccagaattctttggggctgttatatgtgccaatgtgactggaagttacggtgctgcttgcaataaactttcaacatttactcagtttagtttcatggtttataattccgaaaaaaatcagccaactgaggaaaaagtggactgcatctaatccatctttactgtcaacatctgtatttaaagaagaaagaaacaaaggctgaaaaggctgctcactctcatcatctagtgttcctcatgtgttctaaagtctttttgtaaaataaacacaaaaataaatttatgttgaattggca

SEQ ID NO: 48592 - DNA, 2076 bp, Homo sapiens
tgtattgaaacaatttaatgaaaatattaaatatttggtttcaaaaggcagatttatcttctcccaacattctgttatttctgatacttttgaaaaactaataaaaacaattgttcggcgatcgctggctgccgggacttttctcgcgctggtctcttcggtggtcagggatggcgcggaagtcgaacttgcctgtgcttctcgtgccgtttctgctctgccaggccctagtgcgctgctccagccctctgcccctggtcgtcaacacttggccctttaagaatgcaaccgaagcagcgtggagggcattagcatctggaggctctgccctggatgcagtggagagcggctgtgccatgtgtgagagagagcagtgtgacggctctgtaggctttggaggaagtcctgatgaacttggagaaaccacactagatgccatgatcatggatggcactactatggatgtaggagcagtaggagatctcagacgaattaaaaatgctattggtgtggcacggaaagtactggaacatacaacacacacacttttagtaggagagtcagccaccacatttgctcaaagtatggggtttatcaatgaagacttatctaccagtgcttctcaagctcttcattcagattggcttgctcggaattgccagccaaattattggaggaatgttataccagatccctcaaaatactgcggaccctacaaaccacctggtatcttaaagcaggatattcctatccataaagaaacagaagatgatcgtggtcatgacactattgccgtgtaggagactcaccaatacctggagctggagcctatgctgacgatactgcaggggcagccgcagccactgggaatggtgatatattgatgcgcttcctgccaagctaccaagctgtagaatacatgagaagaggagaagatccaaccatagcttgccaaaaagtgatttcaagaatccagaagcattttccagaattctttggggctgttatatgtgccaatgtgactggaagttacggtgctgcttgcaataaactttcaacatttactcagtttagtttcatggtttataattccgaaaaaaatcagccaactgaggaaaaagtggactgcatctaatccatctttactgtcaacatctgtatttaaagaagaaagaaacaaaggctgaaaaggctgctcactctcatcatctagtgttcctcatgtgttctaaagtctttttgtaaaataaacacaaaaataaatttatgttgaattggcactttctatatctgaaattgtattatctatttttatttaacctttcttatattatctgaagatgaatatgtatgtggctgtattttgtatatatttaagttttaagtgacacttggatttctgatcagtgttgcaaaaaattgctactttgagatttatttccacagtgatatattaaacccaaaaggaatcatcatatttggatgcttaaaatagagtatacaagttttttagacccaaagaaaaaaacagcagagtctcagcatgatcagtcctgattgaatttcattatgtcacagtgatgcatgtcttagcactgattattggttttacttaatattccctaaaaacttgaggaaggaagatgatagaacatgagatactctttgttttgtacatactagaaaatacagctatcttctgatgagcaattgtgttgattttctttgcttttttcctcttatggagctctcagtgtgtgaaagttctaaagccacaagaatcaatgatgttttagctgctaatatttagtattgatcgtttcttttaaaaatgatttggggaacttgatctgtactgtaattttactaattccttgtgcagaggtgggtatggcaattagaagtcaagaaatgggttgtttagcttggtttgtttccctaacttctgattaactctctgtatgacaactctacagaagttgtgcgcgtgctttctcagcagcatttttccttcaaaatcatctttttaatcaacagtcattaataaatgtacatgtacgatattcaaaaaaaaaa

SEQ ID NO: 48593 - DNA, 1661 bp, Homo sapiens
tgtattgaaacaatttaatgaaaatattaaatatttggtttcaaaaggcagatttatcttctcccaacattctgttatttctgatacttttgaaaaactaataaaaacaattgttcggcgatcgctggctgccgggacttttctcgcgctggtctcttcggtggtcagggatggcgcggaagtcgaacttgcctgtgcttctcgtgccgtttctgctctgccaggccctagtgcgctgctccagccctctgcccctggtcgtcaacacttggccctttaagaatgcaaccgaagcagcgtggagggcattagcatctggaggctctgccctggatgcagtggagagcggctgtgccatgtgtgagagagagcagtgtgacggctctgtaggctttggaggaagtcctgatgaacttggagaaaccacactagatgccatgatcatggatggcactactatggatgtaggagcagtaggagatctcagacgaattaaaaatgctattggtgtggcacggaaagtactggaacatacaacacacacacttttagtaggagagtcagccaccacatttgctcaaagtatggggtttatcaatgaagacttatctaccagtgcttctcaagctcttcattcagattggcttgctcggaattgccagccaaattattggaggaatgttataccagatccctcaaaatactgcggaccctacaaaccacctggtatcttaaagcaggatattcctatccataaagaaacaaaggctgaaaaggctgctcactctcatcatctagtgttcctcatgtgttctaaagtctttttgtaaaataaacacaaaaataaatttatgttgaattggcactttctatatctgaaattgtattatctatttttatttaacctttcttatattatctgaagatgaatatgtatgtggctgtattttgtatatatttaagttttaagtgacacttggatttctgatcagtgttgcaaaaaattgctactttgagatttatttccacagtgatatattaaacccaaaaggaatcatcatatttggatgcttaaaatagagtatacaagttttttagacccaaagaaaaaaacagcagagtctcagcatgatcagtcctgattgaatttcattatgtcacagtgatgcatgtcttagcactgattattggttttacttaatattccctaaaaacttgaggaaggaagatgatagaacatgagatactctttgttttgtacatactagaaaatacagctatcttctgatgagcaattgtgttgattttctttgcttttttcctcttatggagctctcagtgtgtgaaagttctaaagccacaagaatcaatgatgttttagctgctaatatttagtattgatcgtttcttttaaaaatgatttggggaacttgatctgtactgtaattttactaattccttgtgcagaggtgggtatggcaattagaagtcaagaaatgggttgtttagcttggtttgtttccctaacttctgattaactctctgtatgacaactctacagaagttgtgcgcgtgctttctcagcagcatttttccttcaaaatcatctttttaatcaacagtcattaataaatgtacatgtacgatattcaaaaaaaaaa

SEQ ID NO: 48594 - DNA, 1151 bp, Homo sapiens
gactggactgtgtactcgccagaacacacaataggggaagaacagatctcttcaataaatggggctcaaaaaattagatatccatgtgccaatgtgactggaagttacggtgctgcttgcaataaactttcaacatttactcagtttagtttcatggtttataattccgaaaaaaatcagccaactgaggaaaaagtggactgcatctaatccatctttactgtcaacatctgtatttaaagaagaaagaaacaaaggctgaaaaggctgctcactctcatcatctagtgttcctcatgtgttctaaagtctttttgtaaaataaacacaaaaataaatttatgttgaattggcactttctatatctgaaattgtattatctatttttatttaacctttcttatattatctgaagatgaatatgtatgtggctgtattttgtatatatttaagttttaagtgacacttggatttctgatcagtgttgcaaaaaattgctactttgagatttatttccacagtgatatattaaacccaaaaggaatcatcatatttggatgcttaaaatagagtatacaagttttttagacccaaagaaaaaaacagcagagtctcagcatgatcagtcctgattgaatttcattatgtcacagtgatgcatgtcttagcactgattattggttttacttaatattccctaaaaacttgaggaaggaagatgatagaacatgagatactctttgttttgtacatactagaaaatacagctatcttctgatgagcaattgtgttgattttctttgcttttttcctcttatggagctctcagtgtgtgaaagttctaaagccacaagaatcaatgatgttttagctgctaatatttagtattgatcgtttcttttaaaaatgatttggggaacttgatctgtactgtaattttactaattccttgtgcagaggtgggtatggcaattagaagtcaagaaatgggttgtttagcttggtttgtttccctaacttctgattaactctctgtatgacaactctacagaagttgtgcgcgtgctttctcagcagcatttttccttcaaaatcatctttttaatcaacagtcattaataaatgtacatgtacgatattcaaaaaaaaaa

SEQ ID NO: 48595 - DNA, 2152 bp, Homo sapiens
tgtattgaaacaatttaatgaaaatattaaatatttggtttcaaaaggcagatttatcttctcccaacattctgttatttctgatacttttgaaaaactaataaaaacaattgttcggcgatcgctggctgccgggacttttctcgcgctggtctcttcggtggtcagggatggcgcggaagtcgaacttgcctgtgcttctcgtgccgtttctgctctgccaggccctagtgcgctgctccagccctctgcccctggtcgtcaacacttggccctttaagaatgcaaccgaagcagcgtggagggcattagcatctggaggctctgccctggatgcagtggagagcggctgtgccatgtgtgagagagagcagtgtgacggctctgtaggctttggaggaagtcctgatgaacttggagaaaccacactagatgccatgatcatggatggcactactatggatgtaggagcagtaggagatctcagacgaattaaaaatgctattggtgtggcacggaaagtactggaacatacaacacacacacttttagtaggagagtcagccaccacatttgctcaaagtatggggtttatcaatgaagacttatctaccagtgcttctcaagctcttcattcagattggcttgctcggaattgccagccaaattattggaggaatgttataccagatccctcaaaatactgcggaccctacaaaccacctggtatcttaaagcaggatattcctatccataaagaaacagaagatgatcgtggtcatgacactattggcatggttgtaatccataagacaggacatattgctgctggtacatctacaaatggtataaaattcaaaatacatggccgtgtaggagactcaccaatacctggagctggagcctatgctgacgatactgcaggggcagccgcagccactgggaatggtgatatattgatgcgcttcctgccaagctaccaagctgtagaatacatgagaagaggagaagatccaaccatagcttgccaaaaagtgatttcaagaatccagaagcattttccagaattctttggggctgttatatgtgccaatgtgactggaagttacggtgctgcttgcaataaactttcaacatttactcagtttagtttcatggtttataattccgaaaaaaatcagccaactgaggaaaaagtggactgcatctaatccatctttactgtcaacatctgtatttaaagaagaaagaaacaaaggctgaaaaggctgctcactctcatcatctagtgttcctcatgtgttctaaagtctttttgtaaaataaacacaaaaataaatttatgttgaattggcactttctatatctgaaattgtattatctatttttatttaacctttcttatattatctgaagatgaatatgtatgtggctgtattttgtatatatttaagttttaagtgacacttggatttctgatcagtgttgcaaaaaattgctactttgagatttatttccacagtgatatattaaacccaaaaggaatcatcatatttggatgcttaaaatagagtatacaagttttttagacccaaagaaaaaaacagcagagtctcagcatgatcagtcctgattgaatttcattatgtcacagtgatgcatgtcttagcactgattattggttttacttaatattccctaaaaacttgaggaaggaagatgatagaacatgagatactctttgttttgtacatactagaaaatacagctatcttctgatgagcaattgtgttgattttctttgcttttttcctcttatggagctctcagtgtgtgaaagttctaaagccacaagaatcaatgatgttttagctgctaatatttagtattgatcgtttcttttaaaaatgatttggggaacttgatctgtactgtaattttactaattccttgtgcagaggtgggtatggcaattagaagtcaagaaatgggttgtttagcttggtttgtttccctaacttctgattaactctctgtatgacaactctacagaagttgtgcgcgtgctttctcagcagcatttttccttcaaaatcatctttttaatcaacagtcattaataaatgtacatgtacgatattcaaaaaaaaaa

SEQ ID NO: 48596 - DNA, 2130 bp, Homo sapiens
tgtattgaaacaatttaatgaaaatattaaatatttggtttcaaaaggcagatttatcttctcccaacattctgttatttctgatacttttgaaaaactaataaaaacaattgttcggcgatcgctggctgccgggacttttctcgcgctggtctcttcggtggtcagggatggcgcggaagtcgaacttgcctgtgcttctcgtgccgtttctgctctgccaggccctagtgcgctgctccagccctctgcccctggtcgtcaacacttggccctttaagaatgcaaccgaagcagcgtggagggcattagcatctggaggctctgccctggatgcagtggagagcggctgtgccatgtgtgagagagagcagtgtgacggctctgtaggctttggaggaagtcctgatgaacttggagaaaccacactagatgccatgatcatggatggcactactatggatgtaggagcagtaggagatctcagacgaattaaaaatgctattggtgtggcacggaaagtactggaacatacaacacacacacttttagtaggagagtcagccaccacatttgctcaaagtatggggtttatcaatgaagacttatctaccagtgcttctcaagctcttcattcagattggcttgctcggaattgccagccaaattattggaggaatgttataccagatccctcaaaatactgcggaccctacaaaccacctggtatcttaaagcaggatattcctatccataaagaaacagaagatgatcgtggtcatgacactattggcatggttgtaatccataagacaggacatattgctgctggtacatctacaaatgccgtgtaggagactcaccaatacctggagctggagcctatgctgacgatactgcaggggcagccgcagccactgggaatggtgatatattgatgcgcttcctgccaagctaccaagctgtagaatacatgagaagaggagaagatccaaccatagcttgccaaaaagtgatttcaagaatccagaagcattttccagaattctttggggctgttatatgtgccaatgtgactggaagttacggtgctgcttgcaataaactttcaacatttactcagtttagtttcatggtttataattccgaaaaaaatcagccaactgaggaaaaagtggactgcatctaatccatctttactgtcaacatctgtatttaaagaagaaagaaacaaaggctgaaaaggctgctcactctcatcatctagtgttcctcatgtgttctaaagtctttttgtaaaataaacacaaaaataaatttatgttgaattggcactttctatatctgaaattgtattatctatttttatttaacctttcttatattatctgaagatgaatatgtatgtggctgtattttgtatatatttaagttttaagtgacacttggatttctgatcagtgttgcaaaaaattgctactttgagatttatttccacagtgatatattaaacccaaaaggaatcatcatatttggatgcttaaaatagagtatacaagttttttagacccaaagaaaaaaacagcagagtctcagcatgatcagtcctgattgaatttcattatgtcacagtgatgcatgtcttagcactgattattggttttacttaatattccctaaaaacttgaggaaggaagatgatagaacatgagatactctttgttttgtacatactagaaaatacagctatcttctgatgagcaattgtgttgattttctttgcttttttcctcttatggagctctcagtgtgtgaaagttctaaagccacaagaatcaatgatgttttagctgctaatatttagtattgatcgtttcttttaaaaatgatttggggaacttgatctgtactgtaattttactaattccttgtgcagaggtgggtatggcaattagaagtcaagaaatgggttgtttagcttggtttgtttccctaacttctgattaactctctgtatgacaactctacagaagttgtgcgcgtgctttctcagcagcatttttccttcaaaatcatctttttaatcaacagtcattaataaatgtacatgtacgatattcaaaaaaaaaa

SEQ ID NO: 48597 - DNA, 1280 bp, Homo sapiens
tgtattgaaacaatttaatgaaaatattaaatatttggtttcaaaaggcagatttatcttctcccaacattctgttatttctgatacttttgaaaaactaataaaaacaattgttcggcgatcgctggctgccgggacttttctcgcgctggtctcttcggtggtcagggatggcgcggaagtcgaacttgcctgtgcttctcgtgccgtttctgctctgccaggccctagtgcgctgctccagccctctgcccctggtcgtcaacacttggccctttaagaatgcaaccgaagcagcgtggagggcattagcatctggaggctctgccctggatgcagtggagagcggctgtgccatgtgtgagagagagcagtgtgacggctctgtaggctttggaggaagtcctgatgaacttggagaaaccacactagatgccatgatcatggatggcactactatggatgtaggagcagtaggagatctcagacgaattaaaaatgctattggtgtggcacggaaagtactggaacatacaacacacacacttttagtaggagagtcagccaccacatttgctcaaagtatggggtttatcaatgaagacttatctaccagtgcttctcaagctcttcattcagattggcttgctcggaattgccagccaaattattggaggaatgttataccagatccctcaaaatactgcggaccctacaaaccacctggtatcttaaagcaggatattcctatccataaagaaacagaagatgatcgtggtcatgacactattgccgtgtaggagactcaccaatacctggagctggagcctatgctgacgatactgcaggggcagccgcagccactgggaatggtgatatattgatgcgcttcctgccaagctaccaagctgtagaatacatgagaagaggagaagatccaaccatagcttgccaaaaagtgatttcaagaatccagaagcattttccagaattctttggggctgttatatgtgccaatgtgactggaagttacggtgctgcttgcaataaactttcaacatttactcagtttagtttcatggtttataattccgaaaaaaatcagccaactgaggaaaaagtggactgcatctaatccatctttactgtcaacatctgtatttaaagaagaaagaaacaaaggctgaaaaggctgctcactctcatcatctagtgttcctcatgtgttctaaagtctttttgtaaaataaacacaaaaataaatttatgttgaattggca

SEQ ID NO: 48598 - DNA, 253 bp, Homo sapiens
cactaccttactttttgggaaaaccaacccagtattagttttaaactctttgagctgtgattaacattttcaaacttgaagagtttttacttttattttcttttttgagactttttttttttttacttttttgagatggaatatcactctgtcccccaggctggagtgcagtggcatgatcttggctcactgcaacctctgcccccccgccccccgtccctccgcccagttcaagtgattttcctgcctcagc

SEQ ID NO: 48599 - DNA, 378 bp, Homo sapiens
acctcatctggcgaccagaagcggctgcggccctcgacctctgtggatgaggaagatgaagagtccgagcgagagcgagaccgggatatggcagacaccccctgtgagctcgccaagcgggaccccaagggcgtgggtgtgcggcggcggccggcgcggcctctggagctggacagtggtggggaggaggacgagaaggagtcattgtcggcgtcctcgtcctcatccgcgtcatcatcctcggggtcctcaaccacctcaccctcgtcctcggcctccgacaaggaggaggaacaggagagcaccgaggaggaagaggaggcggaggaggaggaggaggaggaagtccccaggagccagctctcctcctcctcaacc

SEQ ID NO: 48600 - DNA, 351 bp, Homo sapiens
cccagcccagctctgactccctcccttcctgcagagtccgagcgagagcgagaccgggatatggcagacaccccctgtgagctcgccaagcgggaccccaagggcgtgggtgtgcggcggcggccggcgcggcctctggagctggacagtggtggggaggaggacgagaaggagtcattgtcggcgtcctcgtcctcatccgcgtcatcatcctcggggtcctcaaccacctcaccctcgtcctcggcctccgacaaggaggaggaacaggagagcaccgaggaggaagaggaggcggaggaggaggaggaggaggaagtccccaggagccagctctcctcctcctcaacc

SEQ ID NO: 48601 - DNA, 608 bp, Homo sapiens
tctcacccctccttggtccccagaacccatcatgcagcccacagaagcagagcccatggagccagaccccactctgtccctgtcaggaggctctgccatcgggctccttgcggctgggatcctgggagccggggcactgattgcaggcatgtgtttcatcatcatccagagcctaaggactgacaggcagagaataggaatatgcagctgaaatgtgggcaactctcctgtcagctgaagagatgggtgctttgtacctctctatccacgtggaaaaaaaaacccatcccatagcttccaagtctacaacatctctgttcaagggaacaacccaacgtaaccagactccctttgccctgtttctgaaacacctgaagaaaacatctgatgggttgactcggtgccatccttggtcccatcgccgtgacacgttgtgcaagcaaagcatcagaggctcatccctgtctgtgggagctcagtgctcagaaaacaggggggaggttttaccttggaaattggccagaccccaaaatatgtcttttacacatgctgctttttttttctctttttcaaaaagaaccaaaaaataaattaaaacaccaccactt

SEQ ID NO: 48602 - DNA, 904 bp, Homo sapiens
tccatctcacagatgaggaaattgcagaactgagaggttccctaactgtctaagggtcaggccacttaccactgctggcaagtggtagaggcaggatttgcgatgtggttccagagcctactccttaactaccatgcaattccgcttgttcatctttgggtggttacccaccgggccttaaggtagtcttttcattttttcttgaatggagacagtctgtcagagttcgcaggaagtgtggtgtgctggtgacagttcacattccaagttaagcccccttaccacgagcttcattccgttggtggtttacgtgtggggggtgctggtgacagtgttggtcaatactagaggggcatggctaggcagcagctgcccagtcatttaaaactgaacaataaatagaacggggttgttaggggcggaacgaaggggcctagtgggaagtggtttctcagagggagatagttcagtcgcactagaagaatattttcttcagttaacctatgtgtaattttcaggcttatgagaagaaaggccctgttctcatcaccctcccttttgattcttctttggtctttttccatcatccatctgcctgccctgagatgctcatctgaggcctgattccatcaggtggtctgaagaaggtttctatgaagtctttatgagctggacttcagttttgttttgtttgtttgtttgtctgagacagaagtaagactccatctcaaaaaaaaaaaaaattgagtgcctactgtgtgcacatgtaccctgtgtgaccatgggccaggcacagtggttcatgcctgtaatcccagcactttgagaggctgaagcaggtggattgctcgagcccaggagttcgagaccagcctgggcaacatagtgagactccgtctctcca

SEQ ID NO: 48603 - DNA, 775 bp, Homo sapiens
tccatctcacagatgaggaaattgcagaactgagaggttccctaactgtctaagggtcaggccacttaccactgctggcaagtggtagaggcaggatttgcgatgtggttccagagcctactccttaactaccatgcaattccgcttgttcatctttgggtggttacccaccgggccttaaggtagtcttttcattttttcttgaatggagacagtctgtcagagttcgcaggaagtgtggtgtgctggtgacagttcacattccaagttaagcccccttaccacgagcttcattccgttggtggtttacgtgtggggggtgctggtgacagtgttggtcaatactagaggggcatggctaggcagcagctgcccagtcatttaaaactgaacaataaatagaacggggttgttaggggcggaacgaaggggcctagtgggaagtggtttctcagagggagatagttcagtcgcactagaagaatattttcttcagttaacctatgtgtaattttcaggcttatgagaagaaaggccctgttctcatcaccctcccttttgattcttctttggtctttttccatcatccatctgcctgccctgagatgctcatctgaggcctgattccatcaggtggtctgaagaaggtttctatgaagtctttatgagctggacttcagttttgttttgtttgtttgtttgtctgagacagagctttgctctgttgcccaggctggagtgcagtggcacgatcttggctcactgcaacttccgt

SEQ ID NO: 48604 - DNA, 304 bp, Homo sapiens
caagagtttgtgtctggtgagaggtggactgcagcacgtgggagagagaacagtgcgaaactgggagatggctagaaagggcgtcaaagtcctcagcagaatttctgtagaaatgactactacagctgacatttattgagcacatgagtatttcattctcataacagctctatgaggtagggatgactgtcatccttattctgcagtgaggtaacagccttggaaaggttaaaaaaaacttgactaaagtgaacaactaggtagtggtggaactggcattctaaggcggtctcactccagtccc

SEQ ID NO: 48605 - DNA, 355 bp, Homo sapiens
agaactggattatgagaaaaatggaaaagagaattccatatggagggaatagcattagcaaaataagaatgctcaagatttgtatggaaaataagtggttcattttgttgacgatacgatatatgaaaggaattagcagagcgtaagtttggagaggaatgttggagctactgatagaaggatttgaatgcaggaataaggaattcaagccttactctgtttgaaagccccagtgataaaggacattatcaggactatctttatgagtttgacaatgttacgtggaaagacagactgaaataaatacgactggttctcgaataatgtttcattcgatgttgtttcattataatgt

SEQ ID NO: 48606 - DNA, 179 bp, Homo sapiens
gagaacccaatcatattttaacatgtacactaacaaatattttaagataaatgtggcttcttcaggttttataactcattactctttcttatgagcacaaaatttctgatgatagaagcgttgaaatttgctagttaaaggtagttcagtctctttcaaattaaaagtttcacttgctt

SEQ ID NO: 48607 - DNA, 366 bp, Homo sapiens
ctcactgaaagatgaatacactgaggtttataatattgtgaaacttacccaagctcatgtgattacagaatagagccggccggaagcggtggctcatgcctgcaatcccagcactttgggaggctgagacgggcagatcacgaggtcaggagattgagaccatcatggctaacacggtgaaaccccgtctctactaaaaatacaaaaaaaaaattagccggtcatggtggcaggcgcctgtagtcccagctactcgggaggctgaggcaggagaatggcgtgaacccgggaggcggagcttgcagtgagccgagattgtgccactgcactccagcctgggcgacggagcgagactccacctcaaac

SEQ ID NO: 48608 - DNA, 345 bp, Homo sapiens
ccccagcattggggattacatttcaacatgagatttggatggggacacagatccaaaccatatcatcactgaattgaaactactcttgataaggtcaccaatgatcttcatattgctaaatctcaagttaatttctcaatagtcatcatttctcttgacttagcaacatttgatttagttgatcattccttcttatacatacttttttttcacatgacttctgggatgttatactttaaaaaaatcttctgcactcactttcttgatgatcgtgactgtaaataccaagtatgtgcttacaactcctaaatttatgtacctgtttaagaaactattcctgaattg

SEQ ID NO: 48609 - DNA, 241 bp, Homo sapiens
ggatccggttgcagtgagccgagattgcaccatcgcactccagtcttaacaacaagagtgaaactccatctcaaaaaaaaaaattaaaatataaaatgtagagaaaaaaaacccttcatgggtagaagaagactttcctaagtgtaaagtacagaagtggcacactgaaatccagctctgaactccataaacattttaagcttctccagcaaaacacttcccagagcatttaaaccactga

SEQ ID NO: 48610 - DNA, 371 bp, Homo sapiens
  misc_feature (368)..(368): n is a, c, g, or t
  misc_feature (370)..(370): n is a, c, g, or t
attctaagaccaaggtcagtacgggagtggatctggggtcatcactgccctagagccccggcaccagtaggcagttctctggggcccccacatggaaacctcagcagccctgagctatattcctggcctggcgtctctggaccacactgcaggcacgatgtggggttggattctttcttcacgacaccaattggccagtctcttgtatcacccctgctggccaaataatcatcttggaccccgaccattatggacctatattgagttccctccttgctgaatttggactactagagtactcttgtctgaagcacattttattttattttattttattttattttaagacagagcgagactgcatctcnant

SEQ ID NO: 48611 - DNA, 651 bp, Homo sapiens
gagaggaacaaagtaatctgtaatgaattgtgatcaattagttgtaagcactactgcactcagaccagcctgatgtggctctcttttcagttaaaactacttacctggaaagagtgagaaggcaaacagtgccctgggaggtgtcagaagctctaagtagcattagggagaatgttctaggatgccggatatggcagctacggctaactgataagaagacaatttccttctctctcctgaaagccgcctcctcttccttcttctcgaagaccctctatgcaatccctttagcctcccacttcctccccatggcctgggtgccctgggttgatctctggtgatggccattcacccggctgggcccaggcttcctgagggtctcccattgacacagtgaatttgccatgtgacttgcacagggaaatttggacagaatttcccaaagaaaggactggagcagtttacactcagattaaaaacacagaacacaatcctttaatccggtaacaatcacttgatttatttatttttttcttgatgtacatttttatttttatttattttatttattattattattattattaatttttttgagattgcgccattgcactccagcctaggcaacaagagcaaaactccgtctcaatt

SEQ ID NO: 48612 - DNA, 703 bp, Homo sapiens
ctctctatgttgcccaggctgatctgtgccttttttaacactaaagtattttatgttgtttaccatcaggaaaagaagatacaaaaaatgggccacacattgtcttttggatttccatgctcgtaggcctgctggagtgaccctggggggttgtgccccttagttgagaagtgggactgggtggaaggagcacagaccctggattccaagctgggtttgaattctagtattgccaccacttactagccatatgactaggaggaatttaattgacctctctgaactttggggcctttgtctgtaaagtggagtgattatccccactttgaagggccattttgaggatcagcgatacatttaaagcagcaagtacagtatgggatagagcaaacgtgaaaaaaatgtggttattgctgtgataaggcactgtgtttagaagacaccatgaacactttgtgtcccgagaaactagaagtcagtattggacataccatctttagaaaatcctaaagaaaagctgttaactgtttagtaatgtgtattgagtacctactatgtgtcaagctgttctaggcactagatatatagacgtaacaccaggaacctgcctacatggaacttgcactttaatggggatggaggatgggtaaatgttaaattaaccaaatgcacacaaatatatgattatgaattgtgtcaaatg

SEQ ID NO: 48613 - DNA, 181 bp, Homo sapiens
tagactaaaaaaggcaggcaatagcaagcagtggcaaggatgtgaaggaatggaaaccccgtatactcctcatgggaatgtaaacaggtacagctactttggcaaaaaataattagtaagtccttaaaatgttaaacttattgtttccatatgacctagcaattccattcctaggtatata

SEQ ID NO: 48614 - DNA, 505 bp, Homo sapiens
aggcatagcagaatcagtcattggatcaggctagggtcaaatactaggaaatcaccacatttgtcagagaagaatcgtgataaacaaaaaaggccagaataggtcaagaagggacaacagcaagagccagccagaccagcagtgttgatgaggaaccaaaaggttagagcattactagcacatcttgagacatagtttagaaagagcagacctgtgaaatggaactaactgcacagctcagagtcagcatggagacaggtaaaggaaggaaaatctggttcaagtaaatagatgcggacaagaaactcaagactatagccaggcaagtccctactatcacctcctctgtttctctttctaactctgaatctctggcataacttaaagaggaaagcttccagaaatcctttgctctaatgtggagaaagttccaggaatctctgatttcctgttttcttacatcctttgtactttaagcttcaagtattaaagtataaggactctt

SEQ ID NO: 48615 - DNA, 265 bp, Homo sapiens
ccgatttcttctttttaataagaggggagaaaagagtttttgtctttaataattggtagtgaaaacctctgaccttttctttactgggcccagtggaaaatttattagaattgtttgtagagcagcctgccctttaatatgctactttacttagtttatttactccactaaaatacacctgacttctcaactggaacattctccagcattacttgttggtctgaggaatagtagtgtaaaaagtagatgaggggttagttgtggt

SEQ ID NO: 48616 - DNA, 333 bp, Homo sapiens
ggaactttaatttataaaataaatacaagcaaactgttctgaccaaaatgggggtgggggtaagaactccttcgtaggattccaaggaatccctgagcttggcacagcacagcctgaaaagtattatctacagatagtatttggattaaaaaaaagcatctggcacatacagctttctgggacttttaagtacttctaggttaaaaataaagagatcacaaaaattaacagctctgatcaaaactgcgttattactcaaagtgagaaagaactggggtaacatacataaaaatacactggcttaccaaataaaattgtatttaaacattttaa

SEQ ID NO: 48617 - DNA, 193 bp, Homo sapiens
agggaaactttaacagaaggtttctttgcatactatgcatgttcttccaggcagggaagattaatgcaatacgtcaggaagtctaagctcaacttttcagaaaaggactttttttttttttttttttgagacggagccagcttcatttcgccactgcactccagcctgggcaacagagtgacgactctgtctc

SEQ ID NO: 48618 - DNA, 790 bp, Homo sapiens
ccaaacactgtggtccacagagcagcaggaaactcaacatagtttcagcatgtcctaagaatgtcacatggattactgacacaaccactgattttgtctcttctaaggtcagatctaaacattaaggcaagagttggaaaggaaagaggctgaccatccaggatcctaagcagaaacccacagagaagcctgttggggagttagaacagagagagtaactcgccaagggctttctcttgcccaaggagtgactcacccttcaggacaagccaagggacctccctgtccatcattaactgccatctatgagacagaaacatatccaacctttaaggcccttctgaacatatacagaattttgtcttcagctgattttctcgaattcttagttggtttcaacaattagttaatttcctatttgagggaataaaattaataatttacagaaagatattctcattgttttccaggatcatatttatgtctttaaaatttagtaacagaaatattagatttttatatacagagagagagacagggtcaccctctgtcacccaggctggagtacagcggtacagtcgtagctcactgtaccctcaaactcctgggctatcctaccacctcagcctcccacgatgttgggattataggcttgagcccctgcaccgggacagattattttttttaagcctagaggaatccaataagtttgagttttggttaaggatgcctttgcactcagggagctgaaggtagattgttgtccagttctgatctattttccttaaaa

SEQ ID NO: 48619 - DNA, 345 bp, Homo sapiens
gcagttttgatttccaggaagcctttagcaatttatattgttagtacagtaagagagtaaacaacacactaaaataccaagagaaactactttccaaaacatgttttagtcgtttaactttatgaatatggctagcaagggggcttcctgggggacagtgctggggaaagagcaggccctaggaatgggctttgaaagaagacttttgccaccgtcaggtcacatttgcaagaggccatcgtcgtggtctgccagggaacccttagcagaaaggctgctttgcccaggatctggcttgccgccccagaccagccctaccgctgtctggcattgaatgtccctggt

SEQ ID NO: 48620 - DNA, 161 bp, Homo sapiens
actctctctaacatatctactttcattcgatccaggtccccaccactctcccaacctttgtgaggctgtcattggaatcttgcgctgggaacaattacagccgaagcatgacttcctggcattacctaatctttctaattagcctcctaaaggcagacaag

SEQ ID NO: 48621 - DNA, 1874 bp, Homo sapiens
agaaagagtctccaaaggctagcaaaatgcccatcctttaaacagaataattagcaaagagaaattggagcagagcttcgtttagaaaacagttggtttttggtatgaatttgtcacttttctaatgtgaaaaatataagatgccaacgccaaaactgaaagtcaggactcaagatacttgtatccatttagaaattactatagccctgttattcagtacttctgccaatatcaacttctaatgcaagggaacttggaacaatggagaaaacagtggaaaagttggaattggataacctggatcagagtccttgccctgttcctacagctctttagccttaaggatgtgtcctaaccttttccagtcccagttgacttgtccatctaatggggatgaaaagagaatatatctcaagacatttttgtagatcaaattggcaaatccatgttatgtgtttagcatagtgcctgtcatctagcatacagaataatatatagtaataatataattatagtgatataattattatattagtgattataattattataactaataatatagcacagtaataatatatgaatataatatataatattgctaatattgtaatttttggtgaaatttattatagtaccacccaaagttagggactgtcatgaggaataaatgatgtgtgcatatacttttgtgtaaatacctatcacagtgattggaacatagcagggctaaatgaatagttgttgaataagctaatgtattggggaagctacaaagggtagattgttatacaaatgcttgtacttcttatttttaacaaaaatagattgagcaatcagaatctctctatgagcaaacaaaggaggtcaaaagatgctcaaaaatgtccctattgatcaagtatgttattagaatatttagcaatcaatagggcatggatgctgcccgactggaataaatgctggcagtagctcctgatgagggtcctaagggccccaactctgccatgcattatccctttagttagaaattgtggaaaggtcttggaggggtcctaagagtgtaccagagaagaggaagtggtagtatggggtgaaggtgtttgcataggatagcagccatgttccaacaagtacaaagcaatttcactatcttaatatctggtttagctgtgctggtgcttctgatctaaagtagctctgccccacaaacaaaatcctacataactagagttgaaaagagagacaatatatcctgtatatactatgttcctcaattcacttcccatcctaaacacagggacaaggatttgtttgcttgaaagtaatgatctgtcaacaaactgggtcaaagaaaagaccctggcagcttagcctgaggagaagggtgctagtatcacatcacgcatctataaaatgtgggccgcttttggaaatacgtgggtgagttgccaattgcatcagcctagctgttgcagttcttgataattattagtcatctttgttccagcaaaatcctcatcattctcaatagattagaggctaaatttcaaatccactttagtaaaaatctttacaattggactgttagaaaccttgcattatttgaacaaaagtgacgtatttgaagatcagtgggaaagttggaaaataaaccaattcctgctcactaattatttttttaaatgccatgaatggaggcttggtttcactgaatatgcctttaaagatttttaaatgttttatatccagtcaagttgagatttttaagaacatttttaatatgtaataaaattttataatgacttttttcaaaaaagttaacaaactgcaagcacttgttaataaatgtcttaatttaaaaaacgaacata

SEQ ID NO: 48622 - DNA, 1089 bp, Homo sapiens
cgagctcactggtgacgtagatctcatgtgaccaggagtcgacgtgtgcagaagtcctggtaatctggtccttgttcccgtctggataccagcttccttcagcagcgcaggcggtggtccctgaggcccgtggaaggagtcaaacttgcgggaattttgcagtttatctgcagggctgttgtttccagcaagacccaaagctagaaaaggaggaggaagaaactgacccgatcagtgccagaagtcattgtattcaaagaagaataagcaagaaagaaaagaaggaaggaagagaggtagacagatacaagatgaaatcctgtcaaaaaatggaaggaaaaccagaaaatgagagtgaaccaaagcatgaggaagagccaaagcctgaggaaaagccagaagaggaggagaagctagaggaggaggccaaagcaaaaggaacttttagagaaaggctgattcaatctctccaggagtttaaagaagatatacacaacaggcatttaagcaatgaagatatgtttagagaagtggatgaaatagatgagataaggagagtcagaaacaaacttatagtgatgcgttggaaggttaatcgaaaccatccttacccctatttaatgtagtttaccttgatttttatctgatattaacaataccatatagcttgctttttattagcatttcctgatattcctttgtccatatttctacttataacctgttgctattaatggttttagatgtatctcttgttatctgcatctcattgtttattgtattttgaaccaatctacaagtctctgtcttttaataaaagaactttacacatttgtaaaaaagaggttcttggtaagatataaaatggaaaaaggctaagtaatatgtgaatatcatatttttgaaaggtaaaaagtacatttgtatattacatatatggacataacttgtgaaggatgaaagaaagtacagcctctcggtggtgggattatgaatgatttttctccttttgcttgtttgtattttctatattcctaaaattaacacacattattattgctagaataataaaagttttataaaaaagaa

SEQ ID NO: 48623 - DNA, 1173 bp, Homo sapiens
cgagctcactggtgacgtagatctcatgtgaccaggagtcgacgtgtgcagaagtcctggtaatctggtccttgttcccgtctggataccagcttccttcagcagcgcaggcggtggtccctgaggcccgtggaaggagtcaaacttgcgggaattttgcagtttatctgcagggctgttgtttccagcaagacccaaagctagaaaaggaggaggaagaaactgacccgatcagtgccagaagtcattgtattcaaagaagaataagcaagaaagaaaagaaggaaggaagagaggtagacagatacaagatgaaatcctgtcaaaaaatggaaggaaaaccagaaaatgagagtgaaccaaagcatgaggaagagccaaagcctgaggaaaagccagaagaggaggagaagctagaggaggaggccaaagcaaaaggaacttttagagaaaggctgattcaatctctccaggagtttaaagaagatatacacaacaggcatttaagcaatgaagatatgtttagagaagtggatgaaatagatgagataaggagagtcagaaacaaacttatagtgatgcgttggaaggttaatcgaaaccatccttacccctatttaatgtagtttaccttgatttttatctgatattaacaataccatatagcttgctttttattagcatttcctgatattcctttgtccatatttctacttataacctgttgctattaatggttttagatgtatctcttgttatctgcatctcattgtttattgtattttgaaccaatctacaagtctctgtcttttaataaaagaactttacacatttgtaaaaaagaggttcttggtaagatataaaatggaaaaaggctaagtaatatgtgaatatcatatttttgaaaggtaaaaagtacatttgtatattacatatatggacataacttgtgaaggatgaaagaaagtacagcctctcggtggtgggattatgaatgatttttctccttttgcttgtttgtattttctatattcctaaaattaacacacattattattgctagaataataaaagttttataaaaaagaaaaaaaaatctcgagggggtggcctgggaccccaattttgccctataggtgagtcgttttacaaatacacttggcctgcgtttta

SEQ ID NO: 48624 - DNA, 335 bp, Homo sapiens
cgactactactactaaattccggccgcgtcgacaccaatctacaagtctctgtcttttaataaaagaactttacacatttgtaaaaaagaggttcttggtaagatataaaatggaaaaaggctaagtaatatgtgaatatcatatttttgaaaggtaaaaagtacatttgtatattacatatatggacataacttgtgaaggatgaaagaaagtacagcctctcggtggtgggattatgaatgatttttctccttttgcttgtttgtattttctatattcctaaaattaacacacattattattgctagaataataaaagttttataaaaaagaa

SEQ ID NO: 48625 - DNA, 1085 bp, Homo sapiens
cgagctcactggtgacgtagatctcatgtgaccaggagtcgacgtgtgcagaagtcctggtaatctggtccttgttcccgtctggataccagcttccttcagcagcgcaggcggtggtccctgaggcccgtggaaggagtcaaacttgcgggaattttgcaggttggtgtcactgtaggtgttgactggggatttctagtgtgggggggtttaaggcagagacttgtgggagtgccggtcaggtccgtccctccaccctccacctccaggtctacgggaactgatgacccttgggaaagggactaggggtcctaggagaagaacagggagacctgtggtagtttaaaaataatcatcctctgctatctaagactgctttccggacccccaccctcctcccgaaccccgcctcagtcttaaagatagtttggaaataatctgctttctcactctttgtctgatgggaaaaacgaactgacttgcatgcactgtggagagggggtgaactaggggaaacaaaaggtgggaaactttccatatccgaaaccctaaaggaggaaagctacgtgtgtcagtctctggcgctggtcggcccaccaagcgctcgccccacccccaccgtcccctcccgtttccagttttatctgcagggctgttgtttccagcaagacccaaagctagaaaaggaggaggaagaaactgacccgatcagtgccaggtaggtgagaggaatattataaagtctcctggggtggagacaaaggttgtaagcgccaccgttcctgccggctcccttccaccccacccctttcccctcttcttttctctcccccttctcctttcccctcttcctctgcctgccagccacctttctcttttctggcctggtccctgtgttaggccctatgggggaaaaaggtctggggagggctggacggcggaaaggagggccttggaaaaggttagagggaaggacaagagagaagtgaggaggtggaaagtggaggtaaaaggagtggggatagtgaagctctgattgctgactgggcttcttaggtggaagatattttataacagctctgaat

SEQ ID NO: 48626 - DNA, 340 bp, Homo sapiens
attcctggtcgcaggaggaaacttaaaatttccactaataaaggatctatgttgttacattgctgtgtctcctacagtccctagaactgtgacttgcctttaataaatggctattggtagtaagattaatcatcctaaacttgggaatccaccactgaagcataaatgtgcttgaagaagactttgcctggacataacttgtgaaggatgaaagaaagtacagcctctcggtggtgggattatgaatgatttttctccttttgcttgtttgtattttctatattcctaaaattaacacacattattattgctagaataataaaagttttataaaaaagaa

SEQ ID NO: 48627 - DNA, 1648 bp, Homo sapiens
  misc_feature (1094)..(1094): n is a, c, g, or t
  misc_feature (1175)..(1175): n is a, c, g, or t
  misc_feature (1187)..(1187): n is a, c, g, or t
cgagctcactggtgacgtagatctcatgtgaccaggagtcgacgtgtgcagaagtcctggtaatctggtccttgttcccgtctggataccagcttccttcagcagcgcaggcggtggtccctgaggcccgtggaaggagtcaaacttgcgggaattttgcagtttatctgcagggctgttgtttccagcaagacccaaagctagaaaaggaggaggaagaaactgacccgatcagtgccagaagtcattgtattcaaagaagaataagcaagaaagaaaagaaggaaggaagagaggtagacagatacaagatgaaatcctgtcaaaaaatggaaggaaaaccagaaaatgagagtgaaccaaagcatgaggaagagccaaagcctgaggaaaagccagaagaggaggagaagctagaggaggaggccaaagcaaaaggaacttttagagaaaggctgattcaatctctccaggagtttaaagaagatatacacaacaggcatttaagcaatgaagatatgtttagagaagtggatgaaatagatgagataaggagagtcagaaacaaacttatagtgatgcgttggaaggttaatcgaaaccatccttacccctatttaatgtagtttaccttgatttttatctgatattaacaataccatatagcttgctttttattagcatttcctgatattcctttgtccatatttctacttataacctgttgctattaatggttttagatgtatctcttgttatctgcatctcattgtttattgtattttgaaccaatctacaagtctctgtcttttaataaaagaactttacacatttgtaaaaaagaggttcttggtaagatataaaatggaaaaaggctaagtaatatgtgaatatcatatttttgaaaggtaaaaagtacatttgtatattacatatatggacataacttgtgaaggatgaaagaaagtacagcctctcggtggtgggattatgaatgatttttctccttttgcttgtttgtattttctatattcctaaaattaacacacattattattgctagaataataaaagttttataaaaaagaaaaaanaaaaaaaaaaaaaaaaaaaaaaaaaaaaaaaaaaaaaaaaaaaaaaaaaaaaaaaaaaaaaaaaaaaaaaaaaaaaaaaanaaaaaaaaaaanaaaaaaaaagaaagaaacagaagaaacaaaagaggaagagagaaggcagacacaaaccataaaagagggggaaggcgcagagcacaacgtcaccatcacgcgcgcagagggggagtaaaacagcgaccgaccgcaacttggtggagagacaacacccggaggaaacgaaagctaaatcaatagagaagacaggaggagcatcaagcagaagacaaagccatgcgacaggggagacagaaaaacaccgccaccgatgcgtgatcatgaagagagaaacagaacacacacaaaaacgacgggaggagagagggacagaatgaacaaccgaccagacaagaagaaaacaccaggagcgagaaaacataaacaaaatatccatcataggcagtgaacaacagtcctaatcggaggaaaacgagcagcgcaacacgaaaaaaaaacaaagccggcggagagaggat

SEQ ID NO: 48628 - DNA, 1530 bp, Homo sapiens
  misc_feature (1106)..(1106): n is a, c, g, or t
  misc_feature (1118)..(1118): n is a, c, g, or t
cgagctcactggtgacgtagatctcatgtgaccaggagtcgacgtgtgcagaagtcctggtaatctggtccttgttcccgtctggataccagcttccttcagcagcgcaggcggtggtccctgaggcccgtggaaggagtcaaacttgcgggaattttgcagtttatctgcagggctgttgtttccagcaagacccaaagctagaaaaggaggaggaagaaactgacccgatcagtgccagaagtcattgtattcaaagaagaataagcaagaaagaaaagaaggaaggaagagaggtagacagatacaagatgaaatcctgtcaaaaaatggaaggaaaaccagaaaatgagagtgaaccaaagcatgaggaagagccaaagcctgaggaaaagccagaagaggaggagaagctagaggaggaggccaaagcaaaaggaacttttagagaaaggctgattcaatctctccaggagtttaaagaagatatacacaacaggcatttaagcaatgaagatatgtttagagaagtggatgaaatagatgagataaggagagtcagaaacaaacttatagtgatgcgttggaaggttaatcgaaaccatccttacccctatttaatgtagtttaccttgatttttatctgatattaacaataccatatagcttgctttttattagcatttcctgatattcctttgtccatatttctacttataacctgttgctattaatggttttagatgtatctcttgttatctgcatctcattgtttattgtattttgaaccaatctacaagtctctgtcttttaataaaagaactttacacatttgtaaaaaagaggttcttggtaagatataaaatggaaaaaggctaagtaatatgtgaatatcatatttttgaaaggtaaaaagtacatttgtatattacatatatggacataacttgtgaaggatgaaagaaagtacagcctctcggtggtgggattatgaatgatttttctccttttgcttgtttgtattttctatattcctaaaattaacacacattattattgctagaataataaaagttttataaaaaagaaaaaaaaaaaaaaaaaanaaaaaaaaaaanaaaaaaacaacacctgtgtgtgcgcgcgcgcgccccgcgcgcccccccggaaaaccccttcttcacaacacccctcgtgtgggggggcgcgcgcgggcgccccccatggtgagtagcagcgagacaaacgtgtgcgccacaacagggtgtgttcccaagagagaaagcctcggggcgaaaaagaaaaaccaggcgggggggagttctcccacaccgacaataaaagaacacagcgcccgcgggggggacacagcgagagagggtgtttttgagaaaacaaaattccccgaaaagagagagggagtacaccgaggagaggggaaacacaacgggggggggcatcttaacaccaagagagggagagagccacacaaggaggagagcccgacgaaatatcaaaaaaaaagccccg

SEQ ID NO: 48629 - DNA, 1566 bp, Homo sapiens
cgagctcactggtgacgtagatctcatgtgaccaggagtcgacgtgtgcagaagtcctggtaatctggtccttgttcccgtctggataccagcttccttcagcagcgcaggcggtggtccctgaggcccgtggaaggagtcaaacttgcgggaattttgcaggttggtgtcactgtaggtgttgactggggatttctagtgtgggggggtttaaggcagagacttgtgggagtgccggtcaggtccgtccctccaccctccacctccaggtctacgggaactgatgacccttgggaaagggactaggggtcctaggagaagaacagggagacctgtggtagtttaaaaataatcatcctctgctatctaagactgctttccggacccccaccctcctcccgaaccccgcctcagtcttaaagatagtttggaaataatctgctttctcactctttgtctgatgggaaaaacgaactgacttgcatgcactgtggagagggggtgaactaggggaaacaaaaggtgggaaactttccatatccgaaaccctaaaggaggaaagctacgtgtgtcagtctctggcgctggtcggcccaccaagcgctcgccccacccccaccgtcccctcccgtttccagttttatctgcagggctgttgtttccagcaagacccaaagctagaaaaggaggaggaagaaactgacccgatcagtgccagaagtcattgtattcaaagaagaataagcaagaaagaaaagaaggaaggaagagaggtagacagatacaagatgaaatcctgtcaaaaaatggaaggaaaaccagaaaatgagagtgaaccaaagcatgaggaagagccaaagcctgaggaaaagccagaagaggaggagaagctagaggaggaggccaaagcaaaaggaacttttagagaaaggctgattcaatctctccaggagtttaaagaagatatacacaacaggcatttaagcaatgaagatatgtttagagaagtggatgaaatagatgagataaggagagtcagaaacaaacttatagtgatgcgttggaaggttaatcgaaaccatccttacccctatttaatgtagtttaccttgatttttatctgatattaacaataccatatagcttgctttttattagcatttcctgatattcctttgtccatatttctacttataacctgttgctattaatggttttagatgtatctcttgttatctgcatctcattgtttattgtattttgaaccaatctacaagtctctgtcttttaataaaagaactttacacatttgtaaaaaagaggttcttggtaagatataaaatggaaaaaggctaagtaatatgtgaatatcatatttttgaaaggtaaaaagtacatttgtatattacatatatggacataacttgtgaaggatgaaagaaagtacagcctctcggtggtgggattatgaatgatttttctccttttgcttgtttgtattttctatattcctaaaattaacacacattattattgctagaataataaaagttttataaaaaagaa

SEQ ID NO: 48630 - DNA, 964 bp, Homo sapiens
tttttttttataaaacttttattattctagcaaataataatgtgtgttaattttaggaatatagaaaatacaaacaagcaaaaggaggaggaagaaactgacccgatcagtgccagaagtcattgtattcaaagaagaataagcaagaaagaaaagaaggaaggaagagaggtagacagatacaagatgaaatcctgtcaaaaaatggaaggaaaaccagaaaatgagagtgaaccaaagcatgaggaagagccaaagcctgaggaaaagccagaagaggaggagaagctagaggaggaggccaaagcaaaaggaacttttagagaaaggctgattcaatctctccaggagtttaaagaagatatacacaacaggcatttaagcaatgaagatatgtttagagaagtggatgaaatagatgagataaggagagtcagaaacaaacttatagtgatgcgttggaaggttaatcgaaaccatccttacccctatttaatgtagtttaccttgatttttatctgatattaacaataccatatagcttgctttttattagcatttcctgatattcctttgtccatatttctacttataacctgttgctattaatggttttagatgtatctcttgttatctgcatctcattgtttattgtattttgaaccaatctacaagtctctgtcttttaataaaagaactttacacatttgtaaaaaagaggttcttggtaagatataaaatggaaaaaggctaagtaatatgtgaatatcatatttttgaaaggtaaaaagtacatttgtatattacatatatggacataacttgtgaaggatgaaagaaagtacagcctctcggtggtgggattatgaatgatttttctccttttgcttgtttgtattttctatattcctaaaattaacacacattattattgctagaataataaaagttttataaaaaagaa

SEQ ID NO: 48631 - DNA, 950 bp, Homo sapiens
tgagtcgaggtggaccctttgtaagcgcagtcgccccacaggcgcgattccccccgcatcgcctcccgtggaagcccaggcccgcttcgcagctttctccctttgtctcataaccatgtccaccaacgagaatgctaatacaccagctgcccgtcttcacagattcaagaacaagggacaagacagtacagaaatgaggcgtcgagaaaatgagagtgaaccaaagcatgaggaagagccaaagcctgaggaaaagccagaagaggaggagaagctagaggaggaggccaaagcaaaaggaacttttagagaaaggctgattcaatctctccaggagtttaaagaagatatacacaacaggcatttaagcaatgaagatatgtttagagaagtggatgaaatagatgagataaggagagtcagaaacaaacttatagtgatgcgttggaaggttaatcgaaaccatccttacccctatttaatgtagtttaccttgatttttatctgatattaacaataccatatagcttgctttttattagcatttcctgatattcctttgtccatatttctacttataacctgttgctattaatggttttagatgtatctcttgttatctgcatctcattgtttattgtattttgaaccaatctacaagtctctgtcttttaataaaagaactttacacatttgtaaaaaagaggttcttggtaagatataaaatggaaaaaggctaagtaatatgtgaatatcatatttttgaaaggtaaaaagtacatttgtatattacatatatggacataacttgtgaaggatgaaagaaagtacagcctctcggtggtgggattatgaatgatttttctccttttgcttgtttgtattttctatattcctaaaattaacacacattattattgctagaataataaaagttttataaaaaagaa

SEQ ID NO: 48632 - DNA, 843 bp, Homo sapiens
ccctctatccttaatcttcatcttactggttgtctgaccctgcacagtgggaactactgccttggagcagaaatctatagatgatttgagggaaccgagaaaatgagagtgaaccaaagcatgaggaagagccaaagcctgaggaaaagccagaagaggaggagaagctagaggaggaggccaaagcaaaaggaacttttagagaaaggctgattcaatctctccaggagtttaaagaagatatacacaacaggcatttaagcaatgaagatatgtttagagaagtggatgaaatagatgagataaggagagtcagaaacaaacttatagtgatgcgttggaaggttaatcgaaaccatccttacccctatttaatgtagtttaccttgatttttatctgatattaacaataccatatagcttgctttttattagcatttcctgatattcctttgtccatatttctacttataacctgttgctattaatggttttagatgtatctcttgttatctgcatctcattgtttattgtattttgaaccaatctacaagtctctgtcttttaataaaagaactttacacatttgtaaaaaagaggttcttggtaagatataaaatggaaaaaggctaagtaatatgtgaatatcatatttttgaaaggtaaaaagtacatttgtatattacatatatggacataacttgtgaaggatgaaagaaagtacagcctctcggtggtgggattatgaatgatttttctccttttgcttgtttgtattttctatattcctaaaattaacacacattattattgctagaataataaaagttttataaaaaagaa

SEQ ID NO: 48633 - DNA, 897 bp, Homo sapiens
cgagctcactggtgacgtagatctcatgtgaccaggagtcgacgtgtgcagaagtcctggtaatctggtccttgttcccgtctggataccagcttccttcagcagcgcaggcggtggtccctgaggcccgtggaaggagtcaaacttgcgggaattttgcagtttatctgcagggctgttgtttccagcaagacccaaagctagcagaagaggaggagaagctagaggaggaggccaaagcaaaaggaacttttagagaaaggctgattcaatctctccaggagtttaaagaagatatacacaacaggcatttaagcaatgaagatatgtttagagaagtggatgaaatagatgagataaggagagtcagaaacaaacttatagtgatgcgttggaaggttaatcgaaaccatccttacccctatttaatgtagtttaccttgatttttatctgatattaacaataccatatagcttgctttttattagcatttcctgatattcctttgtccatatttctacttataacctgttgctattaatggttttagatgtatctcttgttatctgcatctcattgtttattgtattttgaaccaatctacaagtctctgtcttttaataaaagaactttacacatttgtaaaaaagaggttcttggtaagatataaaatggaaaaaggctaagtaatatgtgaatatcatatttttgaaaggtaaaaagtacatttgtatattacatatatggacataacttgtgaaggatgaaagaaagtacagcctctcggtggtgggattatgaatgatttttctccttttgcttgtttgtattttctatattcctaaaattaacacacattattattgctagaataataaaagttttataaaaaagaa

SEQ ID NO: 48634 - DNA, 1035 bp, Homo sapiens
cgagctcactggtgacgtagatctcatgtgaccaggagtcgacgtgtgcagaagtcctggtaatctggtccttgttcccgtctggataccagcttccttcagcagcgcaggcggtggtccctgaggcccgtggaaggagtcaaacttgcgggaattttgcagtttatctgcagggctgttgtttccagcaagacccaaagctagaaaaggaggaggaagaaactgacccgatcagtgccagaagtcattgtattcaaagaagaataagcaagaaagaaaagaaggaaggaagagaggtagacagatacaagatgaaatcctgtcaaaaaatggaaggaaaaccagaaaatgagagtgaaccaaagcatgaggaagagccaaagcctgaggaaaagccagaagaggaggagaagctagaggaggaggccaaagctatacacaacaggcatttaagcaatgaagatatgtttagagaagtggatgaaatagatgagataaggagagtcagaaacaaacttatagtgatgcgttggaaggttaatcgaaaccatccttacccctatttaatgtagtttaccttgatttttatctgatattaacaataccatatagcttgctttttattagcatttcctgatattcctttgtccatatttctacttataacctgttgctattaatggttttagatgtatctcttgttatctgcatctcattgtttattgtattttgaaccaatctacaagtctctgtcttttaataaaagaactttacacatttgtaaaaaagaggttcttggtaagatataaaatggaaaaaggctaagtaatatgtgaatatcatatttttgaaaggtaaaaagtacatttgtatattacatatatggacataacttgtgaaggatgaaagaaagtacagcctctcggtggtgggattatgaatgatttttctccttttgcttgtttgtattttctatattcctaaaattaacacacattattattgctagaataataaaagttttataaaaaagaa

SEQ ID NO: 48635 - DNA, 1010 bp, Homo sapiens
cgagctcactggtgacgtagatctcatgtgaccaggagtcgacgtgtgcagaagtcctggtaatctggtccttgttcccgtctggataccagcttccttcagcagcgcaggcggtggtccctgaggcccgtggaaggagtcaaacttgcgggaattttgcagaagtcattgtattcaaagaagaataagcaagaaagaaaagaaggaaggaagagaggtagacagatacaagatgaaatcctgtcaaaaaatggaaggaaaaccagaaaatgagagtgaaccaaagcatgaggaagagccaaagcctgaggaaaagccagaagaggaggagaagctagaggaggaggccaaagcaaaaggaacttttagagaaaggctgattcaatctctccaggagtttaaagaagatatacacaacaggcatttaagcaatgaagatatgtttagagaagtggatgaaatagatgagataaggagagtcagaaacaaacttatagtgatgcgttggaaggttaatcgaaaccatccttacccctatttaatgtagtttaccttgatttttatctgatattaacaataccatatagcttgctttttattagcatttcctgatattcctttgtccatatttctacttataacctgttgctattaatggttttagatgtatctcttgttatctgcatctcattgtttattgtattttgaaccaatctacaagtctctgtcttttaataaaagaactttacacatttgtaaaaaagaggttcttggtaagatataaaatggaaaaaggctaagtaatatgtgaatatcatatttttgaaaggtaaaaagtacatttgtatattacatatatggacataacttgtgaaggatgaaagaaagtacagcctctcggtggtgggattatgaatgatttttctccttttgcttgtttgtattttctatattcctaaaattaacacacattattattgctagaataataaaagttttataaaaaagaa

SEQ ID NO: 48636 - DNA, 1104 bp, Homo sapiens
cgagctcactggtgacgtagatctcatgtgaccaggagtcgacgtgtgcagaagtcctggtaatctggtccttgttcccgtctggataccagcttccttcagcagcgcaggcggtggtccctgaggcccgtggaaggagtcaaacttgcgggaattttgcagtttatctgcagggctgttgtttccagcaagacccaaagctagaaaaggaggaggaagaaactgacccgatcagtgccagaagtcattgtattcaaagaagaataagcaagaaagaaaagaaggaaggaagagaggtagacagatacaagatgaaatcctgtcaaaaaatggaaggaaaaccagaaaatgagagtgaaccaaagcatgaggaagagccaaagcctgaggaaaagccagaagaggaggagaagctagaggaggaggccaaagcaaaaggaacttttagagaaaggctgattcaatctctccaggagtttaaagaagatatacacaacaggcatttaagcaatgaagatatgtttagagaagtggatgaaatagatgagataaggagagtcagaaacaaacttatagtgatgcgttggaaggttaatcgaaaccatccttacccctatttaatgtagtttaccttgatttttatctgatattaacaataccatatagcttgctttttattagcatttcctgatattcctttgtccatatttctacttataacctgttgctattaatggttttagatgtatctcttgttatctgcatctcattgtttattgtattttgaaccaatctacaagtctctgtcttttaataaaagaactttacacatttgtaaaaaagaggttcttggtaagatataaaatggaaaaaggctaagtaatatgtgaatatcatatttttgaaaggtaaaaagtacatttgtatattacatatatggacataacttgtgaaggatgaaagaaagtacagcctctcggtggtgggattatgaatgatttttctccttttgcttgtttgtattttctatattcctaaaattaacacacctttaaaaatggccgcataataatgtgtgttaattttagagaataagaaaaaaaa

SEQ ID NO: 48637 - DNA, 1001 bp, Homo sapiens
  misc_feature (34)..(34): n is a, c, g, or t
tctagaggatcccggtgttccctttgtctcatcnatttcatccacttctctaaacatatcttcattgcttaaattttatctgcagggctgttgtttccagcaagacccaaagctagaaaaggaggaggaagaaactgacccgatcagtgccagaagtcattgtattcaaagaagaataagcaagaaagaaaagaaggaaggaagagaggtagacagatacaagatgaaatcctgtcaaaaaatggaaggaaaaccagaaaatgagagtgaaccaaagcatgaggaagagccaaagcctgaggaaaagccagaagaggaggagaagctagaggaggaggccaaagcaaaaggaacttttagagaaaggctgattcaatctctccaggagtttaaagaagatatacacaacaggcatttaagcaatgaagatatgtttagagaagtggatgaaatagatgagataaggagagtcagaaacaaacttatagtgatgcgttggaaggttaatcgaaaccatccttacccctatttaatgtagtttaccttgatttttatctgatattaacaataccatatagcttgctttttattagcatttcctgatattcctttgtccatatttctacttataacctgttgctattaatggttttagatgtatctcttgttatctgcatctcattgtttattgtattttgaaccaatctacaagtctctgtcttttaataaaagaactttacacatttgtaaaaaagaggttcttggtaagatataaaatggaaaaaggctaagtaatatgtgaatatcatatttttgaaaggtaaaaagtacatttgtatattacatatatggacataacttgtgaaggatgaaagaaagtacagcctctcggtggtgggattatgaatgatttttctccttttgcttgtttgtattttctatattcctaaaattaacacacattattattgctagaataataaaagttttataaaaaagaa

SEQ ID NO: 48638 - DNA, 892 bp, Homo sapiens
ctatggatccccgggctgcaggattcgattagtgattgtgccaaaagtcattgtattcaaagaagaataagcaagaaagaaaagaaggaaggaagagaggtagacagatacaagatgaaatcctgtcaaaaaatggaaggaaaaccagaaaatgagagtgaaccaaagcatgaggaagagccaaagcctgaggaaaagccagaagaggaggagaagctagaggaggaggccaaagcaaaaggaacttttagagaaaggctgattcaatctctccaggagtttaaagaagatatacacaacaggcatttaagcaatgaagatatgtttagagaagtggatgaaatagatgagataaggagagtcagaaacaaacttatagtgatgcgttggaaggttaatcgaaaccatccttacccctatttaatgtagtttaccttgatttttatctgatattaacaataccatatagcttgctttttattagcatttcctgatattcctttgtccatatttctacttataacctgttgctattaatggttttagatgtatctcttgttatctgcatctcattgtttattgtattttgaaccaatctacaagtctctgtcttttaataaaagaactttacacatttgtaaaaaagaggttcttggtaagatataaaatggaaaaaggctaagtaatatgtgaatatcatatttttgaaaggtaaaaagtacatttgtatattacatatatggacataacttgtgaaggatgaaagaaagtacagcctctcggtggtgggattatgaatgatttttctccttttgcttgtttgtattttctatattcctaaaattaacacacattattattgctagaataataaaagttttataaaaaagaa

SEQ ID NO: 48639 - DNA, 373 bp, Homo sapiens
ccataatataccttttgctatcggctagtctaacttcctgactccccttttggtgctgtctgtgatcacctcccaaataaacaacttgtgcatgcattcttgtctcatggttggcttctggtggaagctaatgtaatacacagtccctgtgctctcatagcaggctacttagactttccccttcctaacttcatttagcgtgggcaatactcgtttgagaaaagtcgttgagatcagaaacagcatctttctcagcatgttcctttcaatacctagcacaatctcttactcgaagtaggcgttcaacaactaaaggttaagtgtaagtgcttcaatgaagaggaaaatctgcattatggcacttaaaataaaa

SEQ ID NO: 48640 - DNA, 417 bp, Homo sapiens
aaaattaatattattgctagaatttctgcaacaaaatgactccacaatattttttaaattaaaggtttgacttagaattcttatgtaaatatatattcaactgatattggtagttataaaatagtgttctgaatcaactattttctgaatagttttctgaatcaaattcagcttcagagttttctcttttagtcaaaactttgccaaattaagctggtaaccgatgcagagcccagctttctgaaatatggatttagacgtgcctgtttgtttttccctttttaatatcaattatctaattcataggtccaatacctgtgcaccaattcacatatatatgttacctcctaatctctggaagcacagtggatgggtccctaatatcttgtcagagagttaatattttggccaaaaaaa

SEQ ID NO: 48641 - DNA, 484 bp, Homo sapiens
ggacctgaatatgtgttttcgagttggggatcaccattcaacccactaggcctccgggcatacatgataggggatgtagctcctgtaatctgtataaacctaggtctaaatgtattcctttgagcccatcttgagaggccttttttttccctcttcagagttgcttaacttttccttgttaagaaaacttctcaagttaccaacagcaagaaagattttcatcatttctagaaaaccccagaactgaagggaggccaagatgttagaaggaagcaacaccattcctcatcctaaaagccctgattttcttctgcctgcctggacattctccaccaagcccaaatgtcactctttgaggcttcctgaaaccatcctctcacacacccctactcacaacatcatcagaaacacagtcagctttctgctgactttcactaatcaggtgtgtgacttcagtctgctcttcaagtttctaggcttgttt

SEQ ID NO: 48642 - DNA, 3987 bp, Homo sapiens
agggcgggctgggcgtattccacgagcgcctcggcggttggcgaagcggacggggtgcagcctccccggtgcgaggaacggtctccgctgacagataccctccttccggccgcgccactcgggaggcggatcccgtgggcctgaggaggcttcccccgcccggtttgctttccctccctcgctggcgctgccgcgagtccaccgagcggcctctgaggagcagccgcaggaggaggaggaggtcgtcgggggcggcgggcggagaccgcgctctcgcttccccggcggcggcaagggcaggacaatggaggtggcggtggagaaggcggtggcggcggcggcagcggcctcggctgcggcctccggggggccctcggcggcgccgagcggggagaacgaggccgagagtcggcagggcccggactcggagcgcggcggcgaggcggcccggctcaacctgttggacacttgcgccgtgtgccaccagaacatccagagccgggcgcccaagctgctgccctgcctgcactctttctgccagcgctgcctgcccgcgccccagcgctacctcatgctgcccgcgcccatgctgggctcggccgagaccccgccacccgtccctgcccccggctcgccggtcagcggctcgtcgccgttcgccacccaagttggagtcattcgttgcccagtttgcagccaagaatgtgcagagagacacatcatagataacttttttgtgaaggacactactgaggttcccagcagtacagtagaaaagtcaaatcaggtatgtacaagctgtgaggacaacgcagaagccaatgggttttgtgtagagtgtgttgaatggctctgcaagacgtgtatcagagctcatcagagggtaaagttcacaaaagaccacactgtcagacagaaagaggaagtatctccagaggcagttggtgtcaccagccagcgaccagtgttttgtccttttcataaaaaggagcagctgaagctgtactgtgagacatgtgacaaactgacatgtcgagactgtcagttgttagaacataaagagcatagataccaatttatagaagaagcttttcagaatcagaaagtgatcatagatacactaatcaccaaactgatggaaaaaacaaaatacataaaattcacaggaaatcagatccaaaacagaattattgaagtaaatcaaaatcaaaagcaggtggaacaggatattaaagttgctatatttacactgatggtagaaataaataaaaaaggaaaagctctactgcatcagttagagagccttgcaaaggaccatcgcatgaaacttatgcaacaacaacaggaagtggctggactctctaaacaattggagcatgtcatgcatttttctaaatgggcagtttccagtggcagcagtacagcattactttatagcaaacgactgattacataccggttacggcacctccttcgtgcaaggtgtgatgcatccccagtgaccaacaacaccatccaatttcactgtgatcctagtttctgggctcaaaatatcatcaacttaggttctttagtaatcgaggataaagagagccagccacaaatgcctaagcagaatcctgtcgtggaacagaattcacagccaccaagtggtttatcatcaaaccagttatccaagttcccaacacagatcagcctagctcaattacggctccagcatatgcagcaacagcaaccgcctccacgtttgataaactttcagaatcacagccccaaacccaatggaccagttcttcctcctcatcctcaacaactgagatatccaccaaaccagaacataccacgacaagcaataaagccaaaccccctacagatggctttcttggctcaacaagccataaaacagtggcagatcagcagtggacagggaaccccatcaactaccaacagcacatcctctactccttccagccccacgattactagtgcagcaggatatgatggaaaggcttttggttcacctatgatcgatttgagctcaccagtgggagggtcttataatcttccctctcttccggatattgactgttcaagtactattatgctggacaatattgtgaggaaagatactaatatagatcatggccagccaagaccaccctcaaacagaacggtccagtcaccaaattcatcagtgccatctccaggccttgcaggacctgttactatgactagtgtacaccccccaatacgttcacctagtgcctccagcgttggaagccgaggaagctctggctcttccagcaaaccagcaggagctgactctacacacaaagtcccagtggtcatgctggagccaattcgaataaaacaagaaaacagtggaccaccggaaaattatgatttccctgttgttatagtgaagcaagaatcagatgaagaatctaggcctcaaaatgccaattatccaagaagcatactcacctccctgctcttaaatagcagtcagagctctacttctgaggagactgtgctaagatcagatgcccctgatagtacaggagatcaacctggacttcaccaggacaattcctcaaatggaaagtctgaatggttggatccttcccagaagtcacctcttcatgttggagagacaaggaaagaggatgaccccaatgaggactggtgtgcagtttgtcaaaacggaggggaactcctctgctgtgaaaagtgccccaaagtattccatctttcttgtcatgtgcccacattgacaaattttccaagtggagagtggatttgcactttctgccgagacttatctaaaccagaagttgaatatgattgtgatgctcccagtcacaactcagaaaaaaagaaaactgaaggccttgttaagttaacacctatagataaaaggaagtgtgagcgcctacttttatttctttactgccatgaaatgagcctggcttttcaagaccctgttcctctaactgtgcctgattattacaaaataattaaaaatccaatggatttgtcaaccatcaagaaaagactacaagaagattattccatgtactcaaaacctgaagattttgtagctgattttagattgatctttcaaaactgtgctgaattcaatgagcctgattcagaagtagccaatgctggtataaaacttgaaaattattttgaagaacttctaaagaacctctatccagaaaaaaggtttcccaaaccagaattcaggaatgaatcagaagataataaatttagtgatgattcagatgatgactttgtacagccccggaagaaacgcctcaaaagcattgaagaacgccagttgcttaaataatatgcagcaccactagcttgtgctggtttttagatttttttgttttcaaaaaaacatttgtcagtaatttaacatcactacaaaaagaagagtttgtgactattctcatctctgttttggacgtttactagactttgatttccttaatagcccatttctgttaacctcttatcactaagaaagaaaggaaagaaggagatgaatagaagaaagaaaatggaaagaaggaaaaaaggaggatagaaaaaggatggaagaaagaagcattgaaaacaaagacattcttcccacttcttggatttttaaaccacagtctggagtgatagctactgtagaaaggaaatagactttgtatgaactctttaagttgaaaagtaaaaaatatatgtggtttggatgtgtgctttaattcagctttagaaattaataccactacccgtgaattatatggcctgacaatatgaattaggtgtactgtactgaagaacagtactccacaaacatgggtggtaacaagagttccatcccaggaggccaaacggtgcaacagaagggtaggttagatgctattaagaaggcacttaatagtacatcatgtaagatggcaactgtattaaagaaaaatccggaaa

SEQ ID NO: 48643 - DNA, 4078 bp, Homo sapiens
tctggccgagcttagttagtcgggaccgacagcctgacgtagtagcaaacgactgattacataccggttacggcacctccttcgtgcaaggtgtgatgcatccccagtgaccaacaacaccatccaatttcactgtgatcctagtttctgggctcaaaatatcatcaacttaggttctttagtaatcgaggataaagagagccagccacaaatgcctaagcagaatcctgtcgtggaacagaattcacagccaccaagtggtttatcatcaaaccagttatccaagttcccaacacagatcagcctagctcaattacggctccagcatatgcagcaacagcaaccgcctccacgtttgataaactttcagaatcacagccccaaacccaatggaccagttcttcctcctcatcctcaacaactgagatatccaccaaaccagaacataccacgacaagcaataaagccaaaccccctacagatggctttcttggctcaacaagccataaaacagtggcagatcagcagtggacagggaaccccatcaactaccaacagcacatcctctactccttccagccccacgattactagtgcagcaggatatgatggaaaggcttttggttcacctatgatcgatttgagctcaccagtgggagggtcttataatcttccctctcttccggatattgactgttcaagtactattatgctggacaatattgtgaggaaagatactaatatagatcatggccagccaagaccaccctcaaacagaacggtccagtcaccaaattcatcagtgccatctccaggccttgcaggacctgttactatgactagtgtacaccccccaatacgttcacctagtgcctccagcgttggaagccgaggaagctctggctcttccagcaaaccagcaggagctgactctacacacaaagtcccagtggtcatgctggagccaattcgaataaaacaagaaaacagtggaccaccggaaaattatgatttccctgttgttatagtgaagcaagaatcagatgaagaatctaggcctcaaaatgccaattatccaagaagcatactcacctccctgctcttaaatagcagtcagagctctacttctgaggagactgtgctaagatcagatgcccctgatagtacaggagatcaacctggacttcaccaggacaattcctcaaatggaaagtctgaatggttggatccttcccagaagtcacctcttcatgttggagagacaaggaaagaggatgaccccaatgaggactggtgtgcagtttgtcaaaacggaggggaactcctctgctgtgaaaagtgccccaaagtattccatctttcttgtcatgtgcccacattgacaaattttccaagtggagagtggatttgcactttctgccgagacttatctaaaccagaagttgaatatgattgtgatgctcccagtcacaactcagaaaaaaagaaaactgaaggccttgttaagttaacacctatagataaaaggaagtgtgagcgcctacttttatttctttactgccatgaaatgagcctggcttttcaagaccctgttcctctaactgtgcctgattattacaaaataattaaaaatccaatggatttgtcaaccatcaagaaaagactacaagaagattattccatgtactcaaaacctgaagattttgtagctgattttagattgatctttcaaaactgtgctgaattcaatgagcctgattcagaagtagccaatgctggtataaaacttgaaaattattttgaagaacttctaaagaacctctatccagaaaaaaggtttcccaaaccagaattcaggaatgaatcagaagataataaatttagtgatgattcagatgatgactttgtacagccccggaagaaacgcctcaaaagcattgaagaacgccagttgcttaaataatatgcagcaccactagcttgtgctggtttttagatttttttgttttcaaaaaaacatttgtcagtaatttaacatcactacaaaaagaagagtttgtgactattctcatctctgttttggacgtttactagactttgatttccttaatagcccatttctgttaacctcttatcactaagaaagaaaggaaagaaggagatgaatagaagaaagaaaatggaaagaaggaaaaaaggaggatagaaaaaggatggaagaaagaagcattgaaaacaaagacattcttcccacttcttggatttttaaaccacagtctggagtgatagctactgtagaaaggaaatagactttgtatgaactctttaagttgaaaagtaaaaaatatatgtggtttggatgtgtgctttaattcagctttagaaattaataccactacccgtgaattatatggcctgacaatatgaattaggtgtactgtactgaagaacagtactccacaaacatgggtggtaacaagagttccatcccaggaggccaaacggtgcaacagaagggtaggttagatgctattaagaaggcacttaatagtacatcatgtaagatggcaactgtattaaagaaaaatccggaaaacaaatgtttgatttttgtttttgtttttatcttgtctgtagaggtattttggtatagcaggttttcaaggccattttttatacatttctagatctagattttcaacttcttccactgagggaagtatatacatttgggtttgctgtgtgtctatgtgaggtttaattgtacaggtgatccttttacaacaagcctcattgtttgcagtatagcttttagtggaactacccaaaatataaatacagcagcgtgcactgtatttgatgtgagggttcttcatcatataccctactgggcattaaatataagttcctctgaaagggactcgtttttgtggttttcatctgtctataatttggaatgaaaatgtgttgtaggattttgggagcaggcagctggggggaattaatagtgatttttttttttcctgaagcatctatctcatgtttttcttttgagagtcagaacatcaaacttaatctttgatctgacttctgattttattcttctgattgattgatagaggtacaaaagacttatcttctgaggacaagcatattcttaatgtgccagacctacccggttcagctgatatagatagatagatagatagaagaaaattgctgtgccatacattaatccagcatttgacacaatatctaaatggtttgccgaagttaatctgtatttataaaacattaactggagtaaatttttctccttaggatgatagaataaaaagagctcacttgaaagaaggctattatttgcattatatcacctgccataaatttaacatagaagacttggttttatctacatggctttacttcttaaagtggaaaatatcctgtggctaattcattgggttttcaggtactgctaaagataaaatacagggagaaaataacttgttagcaatagatccccattgtttatatatataggtcttgttcataatatgtcaattatgtattgttaaaaagtcctactcacttttcaaatatgtgttacatggtaatgtttgtcattgttgttttaaagttgcatttgacatttgttctccaaagagtgtttgaacagattttgataacagtgcatacaccttttgtctttttttgctccagcattttatttttagcacagcagctgtggagcttttgctgataattttattgttggtatcttagaatactgttcgtctgacagtttattcttccatacttgtctcccaagttaaaacagagcaaaacagataaattattttgagaatcatcacaaaagggagttagaacttgtgagactaaaactataatttcctaaatgtgactaatgaaccccaaactgtcactattacattcagtgccatatttatctttcaaaacagtatttgtttcaccctaaccatctttggctgaatgaaaggcagttgagaaccatcttttggtcatacataatataattatattaaaagtaaagatc

SEQ ID NO: 48644 - DNA, 2401 bp, Homo sapiens
gtacccactagtcacgttggctactagtccacggttggctactagtccacggttggctacttctgaattcaatgagcctgattcagaagtagccaatgctggtataaaacttgaaaattattttgaagaacttctaaagaacctctatccagaaaaaaggtttcccaaaccagaattcaggaatgaatcagaagataataaatttagtgatgattcagatgatgactttgtacagccccggaagaaacgcctcaaaagcattgaagaacgccagttgcttaaataatatgcagcaccactagcttgtgctggtttttagatttttttgttttcaaaaaaacatttgtcagtaatttaacatcactacaaaaagaagagtttgtgactattctcatctctgttttggacgtttactagactttgatttccttaatagcccatttctgttaacctcttatcactaagaaagaaaggaaagaaggagatgaatagaagaaagaaaatggaaagaaggaaaaaaggaggatagaaaaaggatggaagaaagaagcattgaaaacaaagacattcttcccacttcttggatttttaaaccacagtctggagtgatagctactgtagaaaggaaatagactttgtatgaactctttaagttgaaaagtaaaaaatatatgtggtttggatgtgtgctttaattcagctttagaaattaataccactacccgtgaattatatggcctgacaatatgaattaggtgtactgtactgaagaacagtactccacaaacatgggtggtaacaagagttccatcccaggaggccaaacggtgcaacagaagggtaggttagatgctattaagaaggcacttaatagtacatcatgtaagatggcaactgtattaaagaaaaatccggaaaacaaatgtttgatttttgtttttgtttttatcttgtctgtagaggtattttggtatagcaggttttcaaggccattttttatacatttctagatctagattttcaacttcttccactgagggaagtatatacatttgggtttgctgtgtgtctatgtgaggtttaattgtacaggtgatccttttacaacaagcctcattgtttgcagtatagcttttagtggaactacccaaaatataaatacagcagcgtgcactgtatttgatgtgagggttcttcatcatataccctactgggcattaaatataagttcctctgaaagggactcgtttttgtggttttcatctgtctataatttggaatgaaaatgtgttgtaggattttgggagcaggcagctggggggaattaatagtgatttttttttttcctgaagcatctatctcatgtttttcttttgagagtcagaacatcaaacttaatctttgatctgacttctgattttattcttctgattgattgatagaggtacaaaagacttatcttctgaggacaagcatattcttaatgtgccagacctacccggttcagctgatatagatagatagatagatagaagaaaattgctgtgccatacattaatccagcatttgacacaatatctaaatggtttgccgaagttaatctgtatttataaaacattaactggagtaaatttttctccttaggatgatagaataaaaagagctcacttgaaagaaggctattatttgcattatatcacctgccataaatttaacatagaagacttggttttatctacatggctttacttcttaaagtggaaaatatcctgtggctaattcattgggttttcaggtactgctaaagataaaatacagggagaaaataacttgttagcaatagatccccattgtttatatatataggtcttgttcataatatgtcaattatgtattgttaaaaagtcctactcacttttcaaatatgtgttacatggtaatgtttgtcattgttgttttaaagttgcatttgacatttgttctccaaagagtgtttgaacagattttgataacagtgcatacaccttttgtctttttttgctccagcattttatttttagcacagcagctgtggagcttttgctgataattttattgttggtatcttagaatactgttcgtctgacagtttattcttccatacttgtctcccaagttaaaacagagcaaaacagataaattattttgagaatcatcacaaaagggagttagaacttgtgagactaaaactataatttcctaaatgtgactaatgaaccccaaactgtcactattacattcagtgccatatttatctttcaaaacagtatttgtttcaccctaaccatctttggctgaatgaaaggcagttgagaaccatcttttggtcatacataatataattatattaaaagtaaagatc

SEQ ID NO: 48645 - DNA, 522 bp, Homo sapiens
gatgaccccaatgaggactggtgtgcagtttgtcaaaacggaggggaactcctctgctgtgaaaagtgccccaaagtattccatctttcttgtcatgtgcccacattgacaaattttccaaggtaagatagtacttcccttcccacattcttttactgtaaacttttgaagattattttaacagaaagcctttgaaaaaacttaaatgaaattccacttggcacaagtgtatactccaaaatcccaatgaatagtctaggttttcccatacccttccgcttattctttgtgcttctttcaaaaaactaatcattcagcctgagcaacacagggagaccctgtctgtctgtacaaaataaaaaattagccgggtatggtagtgcatgcctgtagtcccagctactcaggaggctgaggtgggaggattggttgagcctgagaggtcaaggctgcagtaagctgtgcttgcaccactgcaccccagactgggcaacagagcaagaccctctccctagtcattac

SEQ ID NO: 48646 - DNA, 5470 bp, Homo sapiens
agggcgggctgggcgtattccacgagcgcctcggcggttggcgaagcggacggggtgcagcctccccggtgcgaggaacggtctccgctgacagataccctccttccggccgcgccactcgggaggcggatcccgtgggcctgaggaggcttcccccgcccggtttgctttccctccctcgctggcgctgccgcgagtccaccgagcggcctctgaggagcagccgcaggaggaggaggaggtcgtcgggggcggcgggcggagaccgcgctctcgcttccccggcggcggcaagggcaggacaatggaggtggcggtggagaaggcggtggcggcggcggcagcggcctcggctgcggcctccggggggccctcggcggcgccgagcggggagaacgaggccgagagtcggcagggcccggactcggagcgcggcggcgaggcggcccggctcaacctgttggacacttgcgccgtgtgccaccagaacatccagagccgggcgcccaagctgctgccctgcctgcactctttctgccagcgctgcctgcccgcgccccagcgctacctcatgctgcccgcgcccatgctgggctcggccgagaccccgccacccgtccctgcccccggctcgccggtcagcggctcgtcgccgttcgccacccaagttggagtcattcgttgcccagtttgcagccaagaatgtgcagagagacacatcatagataacttttttgtgaaggacactactgaggttcccagcagtacagtagaaaagtcaaatcaggtatgtacaagctgtgaggacaacgcagaagccaatgggttttgtgtagagtgtgttgaatggctctgcaagacgtgtatcagagctcatcagagggtaaagttcacaaaagaccacactgtcagacagaaagaggaagtatctccagaggcagttggtgtcaccagccagcgaccagtgttttgtccttttcataaaaaggagcagctgaagctgtactgtgagacatgtgacaaactgacatgtcgagactgtcagttgttagaacataaagagcatagataccaatttatagaagaagcttttcagaatcagaaagtgatcatagatacactaatcaccaaactgatggaaaaaacaaaatacataaaattcacaggaaatcagatccaaaacagaattattgaagtaaatcaaaatcaaaagcaggtggaacaggatattaaagttgctatatttacactgatggtagaaataaataaaaaaggaaaagctctactgcatcagttagagagccttgcaaaggaccatcgcatgaaacttatgcaacaacaacaggaagtggctggactctctaaacaattggagcatgtcatgcatttttctaaatgggcagtttccagtggcagcagtacagcattactttatagcaaacgactgattacataccggttacggcacctccttcgtgcaaggtgtgatgcatccccagtgaccaacaacaccatccaatttcactgtgatcctagtttctgggctcaaaatatcatcaacttaggttctttagtaatcgaggataaagagagccagccacaaatgcctaagcagaatcctgtcgtggaacagaattcacagccaccaagtggtttatcatcaaaccagttatccaagttcccaacacagatcagcctagctcaattacggctccagcatatgcagcaacagcaaccgcctccacgtttgataaactttcagaatcacagccccaaacccaatggaccagttcttcctcctcatcctcaacaactgagatatccaccaaaccagaacataccacgacaagcaataaagccaaaccccctacagatggctttcttggctcaacaagccataaaacagtggcagatcagcagtggacagggaaccccatcaactaccaacagcacatcctctactccttccagccccacgattactagtgcagcaggatatgatggaaaggcttttggttcacctatgatcgatttgagctcaccagtgggagggtcttataatcttccctctcttccggatattgactgttcaagtactattatgctggacaatattgtgaggaaagatactaatatagatcatggccagccaagaccaccctcaaacagaacggtccagtcaccaaattcatcagtgccatctccaggccttgcaggacctgttactatgactagtgtacaccccccaatacgttcacctagtgcctccagcgttggaagccgaggaagctctggctcttccagcaaaccagcaggagctgactctacacacaaagtcccagtggtcatgctggagccaattcgaataaaacaagaaaacagtggaccaccggaaaattatgatttccctgttgttatagtgaagcaagaatcagatgaagaatctaggcctcaaaatgccaattatccaagaagcatactcacctccctgctcttaaatagcagtcagagctctacttctgaggagactgtgctaagatcagatgcccctgatagtacaggagatcaacctggacttcaccaggacaattcctcaaatggaaagtctgaatggttggatccttcccagaagtcacctcttcatgttggagagacaaggaaagaggatgaccccaatgaggactggtgtgcagtttgtcaaaacggaggggaactcctctgctgtgaaaagtgccccaaagtattccatctttcttgtcatgtgcccacattgacaaattttccaagtggagagtggatttgcactttctgccgagacttatctaaaccagaagttgaatatgattgtgatgctcccagtcacaactcagaaaaaaagaaaactgaaggccttgttaagttaacacctatagataaaaggaagtgtgagcgcctacttttatttctttactgccatgaaatgagcctggcttttcaagaccctgttcctctaactgtgcctgattattacaaaataattaaaaatccaatggatttgtcaaccatcaagaaaagactacaagaagattattccatgtactcaaaacctgaagattttgtagctgattttagattgatctttcaaaactgtgctgaattcaatgagcctgattcagaagtagccaatgctggtataaaacttgaaaattattttgaagaacttctaaagaacctctatccagaaaaaaggtttcccaaaccagaattcaggaatgaatcagaagataataaatttagtgatgattcagatgatgactttgtacagccccggaagaaacgcctcaaaagcattgaagaacgccagttgcttaaataatatgcagcaccactagcttgtgctggtttttagatttttttgttttcaaaaaaacatttgtcagtaatttaacatcactacaaaaagaagagtttgtgactattctcatctctgttttggacgtttactagactttgatttccttaatagcccatttctgttaacctcttatcactaagaaagaaaggaaagaaggagatgaatagaagaaagaaaatggaaagaaggaaaaaaggaggatagaaaaaggatggaagaaagaagcattgaaaacaaagacattcttcccacttcttggatttttaaaccacagtctggagtgatagctactgtagaaaggaaatagactttgtatgaactctttaagttgaaaagtaaaaaatatatgtggtttggatgtgtgctttaattcagctttagaaattaataccactacccgtgaattatatggcctgacaatatgaattaggtgtactgtactgaagaacagtactccacaaacatgggtggtaacaagagttccatcccaggaggccaaacggtgcaacagaagggtaggttagatgctattaagaaggcacttaatagtacatcatgtaagatggcaactgtattaaagaaaaatccggaaaacaaatgtttgatttttgtttttgtttttatcttgtctgtagaggtattttggtatagcaggttttcaaggccattttttatacatttctagatctagattttcaacttcttccactgagggaagtatatacatttgggtttgctgtgtgtctatgtgaggtttaattgtacaggtgatccttttacaacaagcctcattgtttgcagtatagcttttagtggaactacccaaaatataaatacagcagcgtgcactgtatttgatgtgagggttcttcatcatataccctactgggcattaaatataagttcctctgaaagggactcgtttttgtggttttcatctgtctataatttggaatgaaaatgtgttgtaggattttgggagcaggcagctggggggaattaatagtgatttttttttttcctgaagcatctatctcatgtttttcttttgagagtcagaacatcaaacttaatctttgatctgacttctgattttattcttctgattgattgatagaggtacaaaagacttatcttctgaggacaagcatattcttaatgtgccagacctacccggttcagctgatatagatagatagatagatagaagaaaattgctgtgccatacattaatccagcatttgacacaatatctaaatggtttgccgaagttaatctgtatttataaaacattaactggagtaaatttttctccttaggatgatagaataaaaagagctcacttgaaagaaggctattatttgcattatatcacctgccataaatttaacatagaagacttggttttatctacatggctttacttcttaaagtggaaaatatcctgtggctaattcattgggttttcaggtactgctaaagataaaatacagggagaaaataacttgttagcaatagatccccattgtttatatatataggtcttgttcataatatgtcaattatgtattgttaaaaagtcctactcacttttcaaatatgtgttacatggtaatgtttgtcattgttgttttaaagttgcatttgacatttgttctccaaagagtgtttgaacagattttgataacagtgcatacaccttttgtctttttttgctccagcattttatttttagcacagcagctgtggagcttttgctgataattttattgttggtatcttagaatactgttcgtctgacagtttattcttccatacttgtctcccaagttaaaacagagcaaaacagataaattattttgagaatcatcacaaaagggagttagaacttgtgagactaaaactataatttcctaaatgtgactaatgaaccccaaactgtcactattacattcagtgccatatttatctttcaaaacagtatttgtttcaccctaaccatctttggctgaatgaaaggcagttgagaaccatcttttggtcatacataatataattatattaaaagtaaagatc

SEQ ID NO: 48647 - DNA, 4977 bp, Homo sapiens
gcccaggctggtctcaaactcctggcctcaagcaatcctcctgcttcagcctcccaaaatgttgggattacagttggagtcattcgttgcccagtttgcagccaagaatgtgcagagagacacatcatagataacttttttgtgaaggacactactgaggttcccagcagtacagtagaaaagtcaaatcaggtatgtacaagctgtgaggacaacgcagaagccaatgggttttgtgtagagtgtgttgaatggctctgcaagacgtgtatcagagctcatcagagggtaaagttcacaaaagaccacactgtcagacagaaagaggaagtatctccagaggcagttggtgtcaccagccagcgaccagtgttttgtccttttcataaaaaggagcagctgaagctgtactgtgagacatgtgacaaactgacatgtcgagactgtcagttgttagaacataaagagcatagataccaatttatagaagaagcttttcagaatcagaaagtgatcatagatacactaatcaccaaactgatggaaaaaacaaaatacataaaattcacaggaaatcagatccaaaacagaattattgaagtaaatcaaaatcaaaagcaggtggaacaggatattaaagttgctatatttacactgatggtagaaataaataaaaaaggaaaagctctactgcatcagttagagagccttgcaaaggaccatcgcatgaaacttatgcaacaacaacaggaagtggctggactctctaaacaattggagcatgtcatgcatttttctaaatgggcagtttccagtggcagcagtacagcattactttatagcaaacgactgattacataccggttacggcacctccttcgtgcaaggtgtgatgcatccccagtgaccaacaacaccatccaatttcactgtgatcctagtttctgggctcaaaatatcatcaacttaggttctttagtaatcgaggataaagagagccagccacaaatgcctaagcagaatcctgtcgtggaacagaattcacagccaccaagtggtttatcatcaaaccagttatccaagttcccaacacagatcagcctagctcaattacggctccagcatatgcagcaacaggtaatggctcagaggcaacaggtgcaacggaggccagcacctgtgggtttaccaaaccctagaatgcaggggcccatccagcaaccttccatctctcatcagcaaccgcctccacgtttgataaactttcagaatcacagccccaaacccaatggaccagttcttcctcctcatcctcaacaactgagatatccaccaaaccagaacataccacgacaagcaataaagccaaaccccctacagatggctttcttggctcaacaagccataaaacagtggcagatcagcagtggacagggaaccccatcaactaccaacagcacatcctctactccttccagccccacgattactagtgcagcaggatatgatggaaaggcttttggttcacctatgatcgatttgagctcaccagtgggagggtcttataatcttccctctcttccggatattgactgttcaagtactattatgctggacaatattgtgaggaaagatactaatatagatcatggccagccaagaccaccctcaaacagaacggtccagtcaccaaattcatcagtgccatctccaggccttgcaggacctgttactatgactagtgtacaccccccaatacgttcacctagtgcctccagcgttggaagccgaggaagctctggctcttccagcaaaccagcaggagctgactctacacacaaagtcccagtggtcatgctggagccaattcgaataaaacaagaaaacagtggaccaccggaaaattatgatttccctgttgttatagtgaagcaagaatcagatgaagaatctaggcctcaaaatgccaattatccaagaagcatactcacctccctgctcttaaatagcagtcagagctctacttctgaggagactgtgctaagatcagatgcccctgatagtacaggagatcaacctggacttcaccaggacaattcctcaaatggaaagtctgaatggttggatccttcccagaagtcacctcttcatgttggagagacaaggaaagaggatgaccccaatgaggactggtgtgcagtttgtcaaaacggaggggaactcctctgctgtgaaaagtgccccaaagtattccatctttcttgtcatgtgcccacattgacaaattttccaagtggagagtggatttgcactttctgccgagacttatctaaaccagaagttgaatatgattgtgatgctcccagtcacaactcagaaaaaaagaaaactgaaggccttgttaagttaacacctatagataaaaggaagtgtgagcgcctacttttatttctttactgccatgaaatgagcctggcttttcaagaccctgttcctctaactgtgcctgattattacaaaataattaaaaatccaatggatttgtcaaccatcaagaaaagactacaagaagattattccatgtactcaaaacctgaagattttgtagctgattttagattgatctttcaaaactgtgctgaattcaatgagcctgattcagaagtagccaatgctggtataaaacttgaaaattattttgaagaacttctaaagaacctctatccagaaaaaaggtttcccaaaccagaattcaggaatgaatcagaagataataaatttagtgatgattcagatgatgactttgtacagccccggaagaaacgcctcaaaagcattgaagaacgccagttgcttaaataatatgcagcaccactagcttgtgctggtttttagatttttttgttttcaaaaaaacatttgtcagtaatttaacatcactacaaaaagaagagtttgtgactattctcatctctgttttggacgtttactagactttgatttccttaatagcccatttctgttaacctcttatcactaagaaagaaaggaaagaaggagatgaatagaagaaagaaaatggaaagaaggaaaaaaggaggatagaaaaaggatggaagaaagaagcattgaaaacaaagacattcttcccacttcttggatttttaaaccacagtctggagtgatagctactgtagaaaggaaatagactttgtatgaactctttaagttgaaaagtaaaaaatatatgtggtttggatgtgtgctttaattcagctttagaaattaataccactacccgtgaattatatggcctgacaatatgaattaggtgtactgtactgaagaacagtactccacaaacatgggtggtaacaagagttccatcccaggaggccaaacggtgcaacagaagggtaggttagatgctattaagaaggcacttaatagtacatcatgtaagatggcaactgtattaaagaaaaatccggaaaacaaatgtttgatttttgtttttgtttttatcttgtctgtagaggtattttggtatagcaggttttcaaggccattttttatacatttctagatctagattttcaacttcttccactgagggaagtatatacatttgggtttgctgtgtgtctatgtgaggtttaattgtacaggtgatccttttacaacaagcctcattgtttgcagtatagcttttagtggaactacccaaaatataaatacagcagcgtgcactgtatttgatgtgagggttcttcatcatataccctactgggcattaaatataagttcctctgaaagggactcgtttttgtggttttcatctgtctataatttggaatgaaaatgtgttgtaggattttgggagcaggcagctggggggaattaatagtgatttttttttttcctgaagcatctatctcatgtttttcttttgagagtcagaacatcaaacttaatctttgatctgacttctgattttattcttctgattgattgatagaggtacaaaagacttatcttctgaggacaagcatattcttaatgtgccagacctacccggttcagctgatatagatagatagatagatagaagaaaattgctgtgccatacattaatccagcatttgacacaatatctaaatggtttgccgaagttaatctgtatttataaaacattaactggagtaaatttttctccttaggatgatagaataaaaagagctcacttgaaagaaggctattatttgcattatatcacctgccataaatttaacatagaagacttggttttatctacatggctttacttcttaaagtggaaaatatcctgtggctaattcattgggttttcaggtactgctaaagataaaatacagggagaaaataacttgttagcaatagatccccattgtttatatatataggtcttgttcataatatgtcaattatgtattgttaaaaagtcctactcacttttcaaatatgtgttacatggtaatgtttgtcattgttgttttaaagttgcatttgacatttgttctccaaagagtgtttgaacagattttgataacagtgcatacaccttttgtctttttttgctccagcattttatttttagcacagcagctgtggagcttttgctgataattttattgttggtatcttagaatactgttcgtctgacagtttattcttccatacttgtctcccaagttaaaacagagcaaaacagataaattattttgagaatcatcacaaaagggagttagaacttgtgagactaaaactataatttcctaaatgtgactaatgaaccccaaactgtcactattacattcagtgccatatttatctttcaaaacagtatttgtttcaccctaaccatctttggctgaatgaaaggcagttgagaaccatcttttggtcatacataatataattatattaaaagtaaagatc

SEQ ID NO: 48648 - DNA, 3404 bp, Homo sapiens
cgcttccgcccggagagagctggccgggttgaggcgccggctttcccgggtcttctccagctgccaccgctttactgcaaaactgacgggcgcaaaaacatgagtgactccgcgggagggcgcgctggtctccggcgttaccccaagctcccagtgtgggtggtggaggatcatcaggaggttctaccctttatataccgggccataggctcaaagcatcttcctgccagtaatgtaagttttttacatttcgactcacatccagacctccttattcctgtgaatatgccagcagacaccgtgtttgataaggaaacactctttggagaattaagtattgaaaattggattatgcctgcagtttatgctggccatttttcacatgtaatatggtttcatcccacatgggctcagcagatcagagagggcagacaccactttttagtaggcaaagacacttctaccacaacaatcagggttacaagtacagatcattatttcctaagtgatggtctgtatgtacctgaagaccagctagagaaccaaaaacctttacaattggatgtaattatggtaaaaccttataaactctgtaacaatcaagaagaaaacgatgcagtgtcttctgctaagaaaccaaagctagccctggaagattcggaaaacactgcctctactaactgtgactcttcttcagaaggactggaaaaggacacagcaacacagagaagtgaccagacttgcctagaaccatcatgttcatgttcttctgaaaatcaggaatgccagactgctgccagcactggggaaattctggaaattttgaagaaagggaaggcatttgttttagatattgacttggattttttttcagtcaagaatcccttcaaagaaatgttcactcaggaagagtacaaaatcttacaagagctgtaccaatttaagaaacctggcaccaacctaacagaggaagatttggtagatattgttgatactcgaattcatcaattagaggatttagaagccactttcgctgatttgtgtgatggtgatgatgaagaaacggtacagagatgggcttcaaaccctggaatggaatcactagttccccttgtacagagtttgaaaaaacggatggaagtaccagactatgaaatggttcaccaggctggtttaacctgcgattattcagaacttcctcaccatatcagcacagaacaagaaatagagtgtcttattcaatctgtgcattatttgctgaaaaatttaccaaatcctactcttgtgacaattgcaaggtcaagtctggatgattactgtccttctgaccaagttgacactattcaagaaaaggtcctcaatatgctacgtgccctctatggaaatctagacctccaagtgtatgcagcagagtctcctccatcttgaaacaaacaaaacattaggctcctgttgtatcttggtttagtaacaggcccttaattaacttatttgtacatgagtcttccagagaacactgttttatattaactttcagttgaaatctttcagatattttgaatctctgaacaaccattgtcagttgtgaatgatggtaaattttttggcatcaagtctcataaccccaactgatagaactgttgcttatctgtcttccttaagtattttttagggttttgtttttttttttgtttgtttgtttgtttgtcttcacttttcccccaggtctgttgagctgtatgagattcattcatacttcatttattcattcaactaatatttgttgaacacttacatgtaccagacattattaagtgctgggtatatggtaatgaacagaatagacaaggcccctgcccttttaggggagacagatgagaagtaaattacgggttatgagaaatgttatgaaggaaaggacaacaacagacatgtcttagtacttagggtatcatggctttataggaaagtaacattctctatcttttttttttttttaattttataaaaatagagatggggtctcaccatgttacccaggctggtctcaaactcctgggcacaagcaatccacctgccttcgcctcccgaagtgctgggattacagatgtaagtcactaccccagccagaaactaacattctcaaaagctactaccaaaaaaaccccacaaatttgccaatccatgaaagtatcataggaagtctacctttccaaggaatttggcattgtggccctgctcttgccaaatgctctccagcattgttggtatcaaggtggtctggttgagtaaacttgaccaaacaaaaattaactgttttttgcttttctgtttttgttttgctgatcaaaaaagcccttcagggtcttttgtgcatccaggaggtcattgtagatatcaataatatagtgcctaagtgccactttattgccaagtctagattgatacttttttcagataaaccagctttttatgtaaagagtaagggaaaaagttaaatctttaattctgacctgccataaatacccaaagatataaactgtcttccaccacccccctcataactaagacatccttcctgagtcactcttaatcatgaaacttgattttctcaattggccagtcttctgatctttagtatctctttagttcagtaatttttacctacctacttgatttattttcctttaaaaggtgaaatgacatttaaagaaaaacaaacacccatcattcctcagtcccaacacagcagttcttttcactcttgcttgtaactttcaggccttacccacatgtgttcctatagagttgcatgtagctaaaattatagtgtgctgcctaactttgtgctaataacgaaggacacacattatcattgcctcacagtggatggcacctgaccccatttttccaaggattctattttccagtgaatttttgtcaccgagttaatttcccaagtctgatagcatgaatgcttatttgtgctgtgaaaagcagagcagcctgactcagctttccattttcataggataatatgtgccaaaaaaggtttattttcttggtaaaatcagaattgtagaattgtgctatttttaatttttaaaatttttggttagagcttatagacattacttttatgattattttgcgtgctaaataagttaaagggtatgttttgaactatagcactaattaatgtgtgtgatcctagtatgttgatagctttgattttgtgagtggtttactagtcatttattatgattcccatgaactctgatatgattcattgtggttttaactcaggttgaataaaagcatccatttcttttataggaaggtttgtttaattctcatgttctgtgatcatctctttgagaataaaattcagtccctaatagttg

SEQ ID NO: 48649 - DNA, 3588 bp, Homo sapiens
cgcttccgcccggagagagctggccgggttgaggcgccggctttcccgggtcttctccagctgccaccgctttactgcaaaactgacgggcgcaaaaacatgagtgactccgcgggagggcgcgctggtctccggcgttaccccaagctcccagtgtgggtggtggaggatcatcaggaggttctaccctttatataccgggccataggctcaaagcatcttcctgccagtaatgtaagttttttacatttcgactcacatccagacctccttattcctgtgaatatgccagcagacaccgtgtttgataaggaaacactctttggagaattaagtattgaaaattggattatgcctgcagtttatgctggccatttttcacatgtaatatggtttcatcccacatgggctcagcagatcagagagggcagacaccactttttagtaggcaaagacacttctaccacaacaatcagggttacaagtacagatcattatttcctaagtgatggtctgtatgtacctgaagaccagctagagaaccaaaaacctttacaattggatgtaattatggtaaaaccttataaactctgtaacaatcaagaagaaaacgatgcagtgtcttctgctaagaaaccaaagctagccctggaagattcggaaaacactgcctctactaactgtgactcttcttcagaaggactggaaaaggacacagcaacacagagaagtgaccagacttgcctagaaccatcatgttcatgttcttctgaaaatcaggaatgccagactgctgccagcactggggaaattctggaaattttgaagaaagggaaggcatttgttttagatattgacttggattttttttcagtcaagaatcccttcaaagaaatgttcactcaggaagagtacaaaatcttacaagagctgtaccaatttaagaaacctggcaccaacctaacagaggaagatttggtagatattgttgatactcgaattcatcaattagaggatttagaagccactttcgctgatttgtgtgatggtgatgatgaagaaacggtacagagatgggcttcaaaccctggaatggaatcactagttccccttgtacagagtttgaaaaaacggatggaagtaccagactatgaaatggttcaccaggctggtttaacctgcgattattcagaacttcctcaccatatcagcacagaacaagaaatagagtgtcttattcaatctgtgcattatttgctgaaaaatttaccaaatcctactcttgtgacaattgcaaggtcaagtctggatgattactgtccttctgaccaagttgacactattcaagaaaaggtcctcaatatgctacgtgccctctatggaaatctagacctccaagtgtatgcagcagagtctcctccatcttgaaacaaacaaaacattaggctcctgttgtatcttggtttagtaacaggcccttaattaacttatttgtacatgagtcttccagagaacactgttttatattaactttcagttgaaatctttcagatattttgaatctctgaacaaccattgtcagttgtgaatgatggtaaattttttggcatcaagtctcataaccccaactgatagaactgttgcttatctgtcttccttaagtattttttagggttttgtttttttttttgtttgtttgtttgtttgtcttcacttttcccccaggtctgttgagctgtatgagattcattcatacttcatttattcattcaactaatatttgttgaacacttacatgtaccagacattattaagtgctgggtatatggtaatgaacagaatagacaaggcccctgcccttttaggggagacagatgagaagtaaattacgggttatgagaaatgttatgaaggaaaggacaacaacagacatgtcttagtacttagggtatcatggctttataggaaagtaacattctctatcttttttttttttttaattttataaaaatagagatggggtctcaccatgttacccaggctggtctcaaactcctgggcacaagcaatccacctgccttcgcctcccgaagtgctgggattacagatgtaagtcactaccccagccagaaactaacattctcaaaagctactaccaaaaaaaccccacaaatttgccaatccatgaaagtatcataggaagtctacctttccaaggaatttggcattgtggccctgctcttgccaaatgctctccagcattgttggtatcaaggtggtctggttgagtaaacttgaccaaacaaaaattaactgttttttgcttttctgtttttgttttgctgatcaaaaaagcccttcagggtcttttgtgcatccaggaggtcattgtagatatcaataatatagtgcctaagtgccactttattgccaagtctagattgatacttttttcagataaaccagctttttatgtaaagagtaagggaaaaagttaaatctttaattctgacctgccataaatacccaaagatataaactgtcttccaccacccccctcataactaagacatccttcctgagtcactcttaatcatgaaacttgattttctcaattggccagtcttctgatctttagtatctctttagttcagtaatttttacctacctacttgatttattttcctttaaaaggtgaaatgacatttaaagaaaaacaaacacccatcattcctcagtcccaacacagcagttcttttcactcttgcttgtaactttcaggccttacccacatgtgttcctatagagttgcatgtagctaaaattatagtgtgctgcctaactttgtgctaataacgaaggacacacattatcattgcctcacagtggatggcacctgaccccatttttccaaggattctattttccagtgaatttttgtcaccgagttaatttcccaagtctgatagcatgaatgcttatttgtgctgtgaaaagcagagcagcctgactcagctttccattttcataggataatatgtgccaaaaaaggtttattttcttggtaaaatcagaattgtagaattgtgctatttttaatttttaaaatttttggttagagcttatagacattacttttatgattattttgcgtgctaaataagttaaagggtatgttttgaactatagcactaattaatgtgtgtgatcctagtatgttgatagctttgattttgtgagtggtttactagtcatttattatgattcccatgaactctgatatgattcattgtggttttaactcaggttgaataaaagcatccatttcttttataggaaggtttgtttaattctcatgttctgtgatcatctctttgagaataaaattcagtccctaatagttgaaaagaatcaacttagtaaattatgtcttgcacattccaaataggaaggtatttactttatcaagatgtgtttcatttgtgttctgagtaccagtgaggggataccgtggtacagtgttttgaattgtgtactaatatcattaaagcatgggattttagtggctttttaaaaaatgtgacttaa

SEQ ID NO: 48650 - DNA, 3182 bp, Homo sapiens
cgcttccgcccggagagagctggccgggttgaggcgccggctttcccgggtcttctccagctgccaccgctttactgcaaaactgacgggcgcaaaaacatgagtgactccgcgggagggcgcgctggtctccggcgttaccccaagctcccagtgtgggtggtggaggatcatcaggaggttctaccctttatataccgggccataggctcaaagcatcttcctgccagtaatgtaagttttttacatttcgactcacatccagacctccttattcctgtgaatatgccagcagacaccgtgtttgataaggaaacactctttggagaattaagtattgaaaattggattatgcctgcagtttatgctggccatttttcacatgtaatatggtttcatcccacatgggctcagcagatcagagagggcagacaccactttttagtaggcaaagacacttctaccacaacaatcagaggactggaaaaggacacagcaacacagagaagtgaccagacttgcctagaaccatcatgttcatgttcttctgaaaatcaggaatgccagactgctgccagcactggggaaattctggaaattttgaagaaagggaaggcatttgttttagatattgacttggattttttttcagtcaagaatcccttcaaagaaatgttcactcaggaagagtacaaaatcttacaagagctgtaccaatttaagaaacctggcaccaacctaacagaggaagatttggtagatattgttgatactcgaattcatcaattagaggatttagaagccactttcgctgatttgtgtgatggtgatgatgaagaaacggtacagagatgggcttcaaaccctggaatggaatcactagttccccttgtacagagtttgaaaaaacggatggaagtaccagactatgaaatggttcaccaggctggtttaacctgcgattattcagaacttcctcaccatatcagcacagaacaagaaatagagtgtcttattcaatctgtgcattatttgctgaaaaatttaccaaatcctactcttgtgacaattgcaaggtcaagtctggatgattactgtccttctgaccaagttgacactattcaagaaaaggtcctcaatatgctacgtgccctctatggaaatctagacctccaagtgtatgcagcagagtctcctccatcttgaaacaaacaaaacattaggctcctgttgtatcttggtttagtaacaggcccttaattaacttatttgtacatgagtcttccagagaacactgttttatattaactttcagttgaaatctttcagatattttgaatctctgaacaaccattgtcagttgtgaatgatggtaaattttttggcatcaagtctcataaccccaactgatagaactgttgcttatctgtcttccttaagtattttttagggttttgtttttttttttgtttgtttgtttgtttgtcttcacttttcccccaggtctgttgagctgtatgagattcattcatacttcatttattcattcaactaatatttgttgaacacttacatgtaccagacattattaagtgctgggtatatggtaatgaacagaatagacaaggcccctgcccttttaggggagacagatgagaagtaaattacgggttatgagaaatgttatgaaggaaaggacaacaacagacatgtcttagtacttagggtatcatggctttataggaaagtaacattctctatcttttttttttttttaattttataaaaatagagatggggtctcaccatgttacccaggctggtctcaaactcctgggcacaagcaatccacctgccttcgcctcccgaagtgctgggattacagatgtaagtcactaccccagccagaaactaacattctcaaaagctactaccaaaaaaaccccacaaatttgccaatccatgaaagtatcataggaagtctacctttccaaggaatttggcattgtggccctgctcttgccaaatgctctccagcattgttggtatcaaggtggtctggttgagtaaacttgaccaaacaaaaattaactgttttttgcttttctgtttttgttttgctgatcaaaaaagcccttcagggtcttttgtgcatccaggaggtcattgtagatatcaataatatagtgcctaagtgccactttattgccaagtctagattgatacttttttcagataaaccagctttttatgtaaagagtaagggaaaaagttaaatctttaattctgacctgccataaatacccaaagatataaactgtcttccaccacccccctcataactaagacatccttcctgagtcactcttaatcatgaaacttgattttctcaattggccagtcttctgatctttagtatctctttagttcagtaatttttacctacctacttgatttattttcctttaaaaggtgaaatgacatttaaagaaaaacaaacacccatcattcctcagtcccaacacagcagttcttttcactcttgcttgtaactttcaggccttacccacatgtgttcctatagagttgcatgtagctaaaattatagtgtgctgcctaactttgtgctaataacgaaggacacacattatcattgcctcacagtggatggcacctgaccccatttttccaaggattctattttccagtgaatttttgtcaccgagttaatttcccaagtctgatagcatgaatgcttatttgtgctgtgaaaagcagagcagcctgactcagctttccattttcataggataatatgtgccaaaaaaggtttattttcttggtaaaatcagaattgtagaattgtgctatttttaatttttaaaatttttggttagagcttatagacattacttttatgattattttgcgtgctaaataagttaaagggtatgttttgaactatagcactaattaatgtgtgtgatcctagtatgttgatagctttgattttgtgagtggtttactagtcatttattatgattcccatgaactctgatatgattcattgtggttttaactcaggttgaataaaagcatccatttcttttataggaaggtttgtttaattctcatgttctgtgatcatctctttgagaataaaattcagtccctaatagttg

SEQ ID NO: 48651 - DNA, 3350 bp, Homo sapiens
cgcttccgcccggagagagctggccgggttgaggcgccggctttcccgggtcttctccagctgccaccgctttactgcaaaactgacgggcgcaaaaacatgagtgactccgcgggagggcgcgctggtctccggcgttaccccaagctcccagtgtgggtggtggaggatcatcaggaggttctaccctttatataccgggccataggctcaaagcatcttcctgccagtaatgtaagttttttacatttcgactcacatccagacctccttattcctgtgaatatgccagcagacaccgtgtttgataaggaaacactctttggagaattaagtattgaaaattggattatgcctgcagtttatgctggccatttttcacatgtaatatggtttcatcccacatgggctcagcagatcagagagggcagacaccactttttagtaggcaaagacacttctaccacaacaatcagggttacaagtacagatcattatttcctaagtgatggtctgtatgtacctgaagaccagctagagaaccaaaaacctttacaattggatgtaattatggtaaaaccttataaactctgtaacaatcaagaagaaaacgatgcagtgtcttctgctaagaaaccaaagctagccctggaagattcggaaaacactgcctctactaactgtgactcttcttcagaaggactggaaaaggacacagcaacacagagaagtgaccagacttgcctagaaccatcatgttcatgttcttctgaaaatcaggaatgccagactgctgccagcactggggaaattctggaaattttgaagaaagggaaggcatttgttttagatattgacttggattttttttcagtcaagaatcccttcaaagaaatgttcactcaggaagagtacaaaatcttacaagagctgtaccaatttaagaaacctggcaccaacctaacagaggaagatttggtagatattgttgatactcgaattcatcaattagaggatttagaagccactttcgctgatttgtgtgatggtgatgatgaagaaacggtacagagatgggcttcaaaccctggaatggaatcactagttccccttgtacagagtttgaaaaaacggatggaagtaccagactatgaaatggttcaccaggctggtttaacctgcgattattcagaacttcctcaccatatcagcacagaacaagaaatagagtgtcttattcaatctgtgcattatttgctgaaaaatttaccaaatcctactcttgtgacaattgcaaggtcaagtctggatgattactgtccttctgaccaagttgacactattcaagaaaaggtcctcaatatgctacgtgccctctatggaaatctagacctccaagtgtatgcagcagagtctcctccatcttgaaacaaacatttgtacatgagtcttccagagaacactgttttatattaactttcagttgaaatctttcagatattttgaatctctgaacaaccattgtcagttgtgaatgatggtaaattttttggcatcaagtctcataaccccaactgatagaactgttgcttatctgtcttccttaagtattttttagggttttgtttttttttttgtttgtttgtttgtttgtcttcacttttcccccaggtctgttgagctgtatgagattcattcatacttcatttattcattcaactaatatttgttgaacacttacatgtaccagacattattaagtgctgggtatatggtaatgaacagaatagacaaggcccctgcccttttaggggagacagatgagaagtaaattacgggttatgagaaatgttatgaaggaaaggacaacaacagacatgtcttagtacttagggtatcatggctttataggaaagtaacattctctatcttttttttttttttaattttataaaaatagagatggggtctcaccatgttacccaggctggtctcaaactcctgggcacaagcaatccacctgccttcgcctcccgaagtgctgggattacagatgtaagtcactaccccagccagaaactaacattctcaaaagctactaccaaaaaaaccccacaaatttgccaatccatgaaagtatcataggaagtctacctttccaaggaatttggcattgtggccctgctcttgccaaatgctctccagcattgttggtatcaaggtggtctggttgagtaaacttgaccaaacaaaaattaactgttttttgcttttctgtttttgttttgctgatcaaaaaagcccttcagggtcttttgtgcatccaggaggtcattgtagatatcaataatatagtgcctaagtgccactttattgccaagtctagattgatacttttttcagataaaccagctttttatgtaaagagtaagggaaaaagttaaatctttaattctgacctgccataaatacccaaagatataaactgtcttccaccacccccctcataactaagacatccttcctgagtcactcttaatcatgaaacttgattttctcaattggccagtcttctgatctttagtatctctttagttcagtaatttttacctacctacttgatttattttcctttaaaaggtgaaatgacatttaaagaaaaacaaacacccatcattcctcagtcccaacacagcagttcttttcactcttgcttgtaactttcaggccttacccacatgtgttcctatagagttgcatgtagctaaaattatagtgtgctgcctaactttgtgctaataacgaaggacacacattatcattgcctcacagtggatggcacctgaccccatttttccaaggattctattttccagtgaatttttgtcaccgagttaatttcccaagtctgatagcatgaatgcttatttgtgctgtgaaaagcagagcagcctgactcagctttccattttcataggataatatgtgccaaaaaaggtttattttcttggtaaaatcagaattgtagaattgtgctatttttaatttttaaaatttttggttagagcttatagacattacttttatgattattttgcgtgctaaataagttaaagggtatgttttgaactatagcactaattaatgtgtgtgatcctagtatgttgatagctttgattttgtgagtggtttactagtcatttattatgattcccatgaactctgatatgattcattgtggttttaactcaggttgaataaaagcatccatttcttttataggaaggtttgtttaattctcatgttctgtgatcatctctttgagaataaaattcagtccctaatagttg

SEQ ID NO: 48652 - DNA, 1405 bp, Homo sapiens
cccgcggcatatcgtcgaacccaacgccgatccaggcctcaagactcgctggcgcgacacagcaagctcgccagcctgccttcgcctcccgaagtgctgggattacagatgtaagtcactaccccagccagaaactaacattctcaaaagctactaccaaaaaaaccccacaaatttgccaatccatgaaagtatcataggaagtctacctttccaaggaatttggcattgtggccctgctcttgccaaatgctctccagcattgttggtatcaaggtggtctggttgagtaaacttgaccaaacaaaaattaactgttttttgcttttctgtttttgttttgctgatcaaaaaagcccttcagggtcttttgtgcatccaggaggtcattgtagatatcaataatatagtgcctaagtgccactttattgccaagtctagattgatacttttttcagataaaccagctttttatgtaaagagtaagggaaaaagttaaatctttaattctgacctgccataaatacccaaagatataaactgtcttccaccacccccctcataactaagacatccttcctgagtcactcttaatcatgaaacttgattttctcaattggccagtcttctgatctttagtatctctttagttcagtaatttttacctacctacttgatttattttcctttaaaaggtgaaatgacatttaaagaaaaacaaacacccatcattcctcagtcccaacacagcagttcttttcactcttgcttgtaactttcaggccttacccacatgtgttcctatagagttgcatgtagctaaaattatagtgtgctgcctaactttgtgctaataacgaaggacacacattatcattgcctcacagtggatggcacctgaccccatttttccaaggattctattttccagtgaatttttgtcaccgagttaatttcccaagtctgatagcatgaatgcttatttgtgctgtgaaaagcagagcagcctgactcagctttccattttcataggataatatgtgccaaaaaaggtttattttcttggtaaaatcagaattgtagaattgtgctatttttaatttttaaaatttttggttagagcttatagacattacttttatgattattttgcgtgctaaataagttaaagggtatgttttgaactatagcactaattaatgtgtgtgatcctagtatgttgatagctttgattttgtgagtggtttactagtcatttattatgattcccatgaactctgatatgattcattgtggttttaactcaggttgaataaaagcatccatttcttttataggaaggtttgtttaattctcatgttctgtgatcatctctttgagaataaaattcagtccctaatagttg

SEQ ID NO: 48653 - DNA, 2556 bp, Homo sapiens
tccgtggtcctcccgtaggaaccggcggactcggttggcgttgtggggcagggggtggtggagcaagatggcggctcatctgtcctacggccgagtgaacctaaacgtgttgcgcgaggcggtgcgtcgcgagctgcgcgagttcctggacaagtgcgcaggaagcaaggcaatagtttgggatgaatacctaactggaccctttggcctgattgcacagtattcactattgaaggaacatgaagtggaaaaaatgttcacacttaaaggaaatcgtttgccggcagctgatgtgaagaatataattttttttgtcagacccaggctagagttgatggatataatcgctgaaaacgtgctcagtgaagatagacgaggcccaacgagagattttcatattctgtttgtgccacgccgtagcctgttgtgcgaacagcggttgaaggatctgggtgtcttgggatcctttattcacagggaggagtacagcttagatctcattccattcgatggggatctcttatccatggaatcagagggtgcattcaaagagtgctacctggagggtgaccagacgagcctgtaccacgcagccaaggggctgatgaccctgcaagctctgtatggaacgatcccccagatctttgggaaaggagaatgcgctcggcaagtggccaatatgatgatcaggatgaagagagagtttacaggaagccagaattcaatatttcctgtttttgataatctcttgttgcttgatcggaatgtggatttattaacacctcttgccactcagctgacatatggaggactcattgatgaaatttatggcattcagaacagttatgtgaaattacctccagagaaatttgcacctaagaaacagggcgatggtggtaaggacctccccacggaagcaaagaagctgcagctgaattctgcagaggagctctatgctgagatccgagataagaacttcaacgcagttggctctgtgctcagcaagaaagcaaagatcatctctgcagcattcgaggaaagacacaatgctaagaccgtgggggagatcaagcagtttgtttcccagttgccccacatgcaggcagcaaggggctcgcttgcaaaccatacctcaattgcagaattgatcaaagatgtcactacttctgaagacttttttgataaattaaccgtggaacaggagtttatgtctggaatagacactgataaggtcaacaattacattgaggattgtatcgcccaaaagcactcgttgatcaaggtgttaagactagtttgcctccaatccgtgtgtaatagtgggctcaaacaaaaagttttggattattacaaaagagagattctccagacatacggctatgagcacatattgaccttacacaacctggagaaggccggcctgctgaaaccgcagacggggggcagaaacaattacccaactatacggaaaacattacgcctctggatggatgatgttaatgagcaaaaccccacggacatatcgtatgtgtacagtgggtatgccccgctcagtgtgcggctggcccagctgctttcccggcctggctggcggagcatcgaggaggtcctccgcatcctcccagggccccactttgaggagcggcagccactgcccacaggactgcagaagaaacgtcaaccgggagaaaaccgagtgactctgatatttttccttgggggcgtaaccttcgctgaaattgctgccctgcgatttctctcccagttggaagatggaggtacagaatatgtcattgccaccactaaactaatgaatggaaccagttggatagaggctctgatggaaaaacctttctaggatgttcagaggagacttaacaagtgtactgcagaataaactacctctttgaagaaattgctgaaaggaagtaaaaccccatagaagaaacatgggaatacagaatatattctggggtcagcttcttaaattatactactgtttactgctttctccgtctcttttgtattccctttttttttttcctttgagacggagtcttgctctgtcacccagactagagtgcagtggcacggtctcacctcactgcaacctccacctcctaggttcaagcaattctcctgcctcagcctcctgagtagctgggactacaggcatgcaccaccacacccggctaatttttgtatttttagtagccatggtgtttcaccatgttggccaggctggtctcaaactcctgacctcaggtgatccacctgcctcggcctcccacagtgctgggattacaggcctgagccaccgtgcctggcccctaatctgctgaagaaagaagaatagaagaaaatcaacctgagtaaaagcagcactggttttgagttttctaagctcagggtcttcattagagacctctggaaatacattaaggatggtgggggtagataatccattcagccagacaaacggggccagctcttaaaataagaaagctgagactgaggaggtgaaactgaaaataaaaagagaaagttcatcctcta

SEQ ID NO: 48654 - DNA, 785 bp, Homo sapiens
ttagtgaattgagtgacttcatagaacataactactgcgaatcacaagaatagactgacctgattttatgcctcattggcaaatggcagctgccttggtgcaagtgtcgggatgggtgccaacagcaaggtgcttttctagagctgcttatttctaagcaatgcactcttccagtttttctccttttttacttttttgattgtctttctggttttagacaaattttaaaatctgcttgttcccaggggggccccacctcatccaatgttttgtttccagcaagtggccaatatgatgatcaggatgaagagagagtttacaggaagccagaattcaatatttcctgtttttgataatctcttgttgcttgatcggaatgtggatttattaacacctcttgccactcagctgacatatggaggactcattgatgaaatttatggcattcagaacagtaagtacatgacatctgttttcactaataggtaatatgagaagaatatcctttgtggaggctactgtttgtatattgcacacttaagcataatttaaagtcagagatccgattttaatgattcagagtgtagattaatacagacctttttgtaagcaatttagcaacacataaaacttttctaacccttggccaaagaaaacccaaagcctaagaatgtgccttgaggaatcattccaaaaaagaggatcagtgaggtttgcataagaatttcgatttccattttcttaccagaattttccaaacacatttcaactggttgagtacatta

SEQ ID NO: 48655 - DNA, 2535 bp, Homo sapiens
tccgtggtcctcccgtaggaaccggcggactcggttggcgttgtggggcagggggtggtggagcaagatggcggctcatctgtcctacggccgagtgaacctaaacgtgttgcgcgaggcggtgcgtcgcgagctgcgcgagttcctggacaagtgcgcaggaagcaaggcaatagtttgggatgaatacctaactggaccctttggcctgattgcacagtattcactattgaaggaacatgaagtggaaaaaatgttcacacttaaaggaaatcgtttgccggcagctgatgtgaagaatataattttttttgtcagacccaggctagagttgatggatataatcgctgaaaacgtgctcagtgaagatagacgaggcccaacgagagattttcatattctgtttgtgccacgccgtagcctgttgtgcgaacagcggttgaaggatctgggtgtcttgggatcctttattcacagggaggagtacagcttagatctcttatccatggaatcagagggtgcattcaaagagtgctacctggagggtgaccagacgagcctgtaccacgcagccaaggggctgatgaccctgcaagctctgtatggaacgatcccccagatctttgggaaaggagaatgcgctcggcaagtggccaatatgatgatcaggatgaagagagagtttacaggaagccagaattcaatatttcctgtttttgataatctcttgttgcttgatcggaatgtggatttattaacacctcttgccactcagctgacatatggaggactcattgatgaaatttatggcattcagaacagttatgtgaaattacctccagagaaatttgcacctaagaaacagggcgatggtggtaaggacctccccacggaagcaaagaagctgcagctgaattctgcagaggagctctatgctgagatccgagataagaacttcaacgcagttggctctgtgctcagcaagaaagcaaagatcatctctgcagcattcgaggaaagacacaatgctaagaccgtgggggagatcaagcagtttgtttcccagttgccccacatgcaggcagcaaggggctcgcttgcaaaccatacctcaattgcagaattgatcaaagatgtcactacttctgaagacttttttgataaattaaccgtggaacaggagtttatgtctggaatagacactgataaggtcaacaattacattgaggattgtatcgcccaaaagcactcgttgatcaaggtgttaagactagtttgcctccaatccgtgtgtaatagtgggctcaaacaaaaagttttggattattacaaaagagagattctccagacatacggctatgagcacatattgaccttacacaacctggagaaggccggcctgctgaaaccgcagacggggggcagaaacaattacccaactatacggaaaacattacgcctctggatggatgatgttaatgagcaaaaccccacggacatatcgtatgtgtacagtgggtatgccccgctcagtgtgcggctggcccagctgctttcccggcctggctggcggagcatcgaggaggtcctccgcatcctcccagggccccactttgaggagcggcagccactgcccacaggactgcagaagaaacgtcaaccgggagaaaaccgagtgactctgatatttttccttgggggcgtaaccttcgctgaaattgctgccctgcgatttctctcccagttggaagatggaggtacagaatatgtcattgccaccactaaactaatgaatggaaccagttggatagaggctctgatggaaaaacctttctaggatgttcagaggagacttaacaagtgtactgcagaataaactacctctttgaagaaattgctgaaaggaagtaaaaccccatagaagaaacatgggaatacagaatatattctggggtcagcttcttaaattatactactgtttactgctttctccgtctcttttgtattccctttttttttttcctttgagacggagtcttgctctgtcacccagactagagtgcagtggcacggtctcacctcactgcaacctccacctcctaggttcaagcaattctcctgcctcagcctcctgagtagctgggactacaggcatgcaccaccacacccggctaatttttgtatttttagtagccatggtgtttcaccatgttggccaggctggtctcaaactcctgacctcaggtgatccacctgcctcggcctcccacagtgctgggattacaggcctgagccaccgtgcctggcccctaatctgctgaagaaagaagaatagaagaaaatcaacctgagtaaaagcagcactggttttgagttttctaagctcagggtcttcattagagacctctggaaatacattaaggatggtgggggtagataatccattcagccagacaaacggggccagctcttaaaataagaaagctgagactgaggaggtgaaactgaaaataaaaagagaaagttcatcctcta

SEQ ID NO: 48656 - DNA, 2296 bp, Homo sapiens
actcgacatcgcctgactccacatcggcagtggggataaaaaaagcaaaatggtccatgactcttaggagctcataagctaacaaatgttgcttcctttgcagtgaagatagacgaggcccaacgagagattttcatattctgtttgtgccacgccgtagcctgttgtgcgaacagcggttgaaggatctgggtgtcttgggatcctttattcacagggaggagtacagcttagatctcattccattcgatggggatctcttatccatggaatcagagggtgcattcaaagagtgctacctggagggtgaccagacgagcctgtaccacgcagccaaggggctgatgaccctgcaagctctgtatggaacgatcccccagatctttgggaaaggagaatgcgctcggcaagtggccaatatgatgatcaggatgaagagagagtttacaggaagccagaattcaatatttcctgtttttgataatctcttgttgcttgatcggaatgtggatttattaacacctcttgccactcagctgacatatggaggactcattgatgaaatttatggcattcagaacagttatgtgaaattacctccagagaaatttgcacctaagaaacagggcgatggtggtaaggacctccccacggaagcaaagaagctgcagctgaattctgcagaggagctctatgctgagatccgagataagaacttcaacgcagttggctctgtgctcagcaagaaagcaaagatcatctctgcagcattcgaggaaagacacaatgctaagaccgtgggggagatcaagcagtttgtttcccagttgccccacatgcaggcagcaaggggctcgcttgcaaaccatacctcaattgcagaattgatcaaagatgtcactacttctgaagacttttttgataaattaaccgtggaacaggagtttatgtctggaatagacactgataaggtcaacaattacattgaggattgtatcgcccaaaagcactcgttgatcaaggtgttaagactagtttgcctccaatccgtgtgtaatagtgggctcaaacaaaaagttttggattattacaaaagagagattctccagacatacggctatgagcacatattgaccttacacaacctggagaaggccggcctgctgaaaccgcagacggggggcagaaacaattacccaactatacggaaaacattacgcctctggatggatgatgttaatgagcaaaaccccacggacatatcgtatgtgtacagtgggtatgccccgctcagtgtgcggctggcccagctgctttcccggcctggctggcggagcatcgaggaggtcctccgcatcctcccagggccccactttgaggagcggcagccactgcccacaggactgcagaagaaacgtcaaccgggagaaaaccgagtgactctgatatttttccttgggggcgtaaccttcgctgaaattgctgccctgcgatttctctcccagttggaagatggaggtacagaatatgtcattgccaccactaaactaatgaatggaaccagttggatagaggctctgatggaaaaacctttctaggatgttcagaggagacttaacaagtgtactgcagaataaactacctctttgaagaaattgctgaaaggaagtaaaaccccatagaagaaacatgggaatacagaatatattctggggtcagcttcttaaattatactactgtttactgctttctccgtctcttttgtattccctttttttttttcctttgagacggagtcttgctctgtcacccagactagagtgcagtggcacggtctcacctcactgcaacctccacctcctaggttcaagcaattctcctgcctcagcctcctgagtagctgggactacaggcatgcaccaccacacccggctaatttttgtatttttagtagccatggtgtttcaccatgttggccaggctggtctcaaactcctgacctcaggtgatccacctgcctcggcctcccacagtgctgggattacaggcctgagccaccgtgcctggcccctaatctgctgaagaaagaagaatagaagaaaatcaacctgagtaaaagcagcactggttttgagttttctaagctcagggtcttcattagagacctctggaaatacattaaggatggtgggggtagataatccattcagccagacaaacggggccagctcttaaaataagaaagctgagactgaggaggtgaaactgaaaataaaaagagaaagttcatcctcta

SEQ ID NO: 48657 - DNA, 3024 bp, Homo sapiens
  misc_feature (2762)..(2762): n is a, c, g, or t
tccgtggtcctcccgtaggaaccggcggactcggttggcgttgtggggcagggggtggtggagcaagatggcggctcatctgtcctacggccgagtgaacctaaacgtgttgcgcgaggcggtgcgtcgcgagctgcgcgagttcctggacaagtgcgcaggaagcaaggcaatagtttgggatgaatacctaactggaccctttggcctgattgcacagtattcactattgaaggaacatgaagtggaaaaaatgttcacacttaaaggaaatcgtttgccggcagctgatgtgaagaatataattttttttgtcagacccaggctagagttgatggatataatcgctgaaaacgtgctcagtgaagatagacgaggcccaacgagagattttcatattctgtttgtgccacgccgtagcctgttgtgcgaacagcggttgaaggatctgggtgtcttgggatcctttattcacagggaggagtacagcttagatctcattccattcgatggggatctcttatccatggaatcagagggtgcattcaaagagtgctacctggagggtgaccagacgagcctgtaccacgcagccaaggggctgatgaccctgcaagctctgtatggaacgatcccccagatctttgggaaaggagaatgcgctcggcaagtggccaatatgatgatcaggatgaagagagagtttacaggaagccagaattcaatatttcctgtttttgataatctcttgttgcttgatcggaatgtggatttattaacacctcttgccactcagctgacatatggaggactcattgatgaaatttatggcattcagaacagttatgtgaaattacctccagagaaatttgcacctaagaaacagggcgatggtggtaaggacctccccacggaagcaaagaagctgcagctgaattctgcagaggagctctatgctgagatccgagataagaacttcaacgcagttggctctgtgctcagcaagaaagcaaagatcatctctgcagcattcgaggaaagacacaatgctaagaccgtgggggagatcaagcagtttgtttcccagttgccccacatgcaggcagcaaggggctcgcttgcaaaccatacctcaattgcagaattgatcaaagatgtcactacttctgaagacttttttgataaattaaccgtggaacaggagtttatgtctggaatagacactgataaggtcaacaattacattgaggattgtatcgcccaaaagcactcgttgatcaaggtgttaagactagtttgcctccaatccgtgtgtaatagtgggctcaaacaaaaagttttggattattacaaaagagagattctccagacatacggctatgagcacatattgaccttacacaacctggagaaggccggcctgctgaaaccgcagacggggggcagaaacaattacccaactatacggaaaacattacgcctctggatggatgatgttaatgagcaaaaccccacggacatatcgtatgtgtacagtgggtatgccccgctcagtgtgcggctggcccagctgctttcccggcctggctggcggagcatcgaggaggtcctccgcatcctcccagggccccactttgaggagcggcagccactgcccacaggactgcagaagaaacgtcaaccgggagaaaaccgagtgactctgatatttttccttgggggcgtaaccttcgctgaaattgctgccctgcgatttctctcccagttggaagatggaggtacagaatatgtcattgccaccactaaactaatgaatggaaccagttggatagaggctctgatggaaaaacctttctaggatgttcagaggagacttaacaagtgtactgcagaataaactacctctttgaagaaattgctgaaaggaagtaaaaccccatagaagaaacatgggaatacagaatatattctggggtcagcttcttaaattatactactgtttactgctttctccgtctcttttgtattccctttttttttttcctttgagacggagtcttgctctgtcacccagactagagtgcagtggcacggtctcacctcactgcaacctccacctcctaggttcaagcaattctcctgcctcagcctcctgagtagctgggactacaggcatgcaccaccacacccggctaatttttgtatttttagtagccatggtgtttcaccatgttggccaggctggtctcaaactcctgacctcaggtgatccacctgcctcggcctcccacagtgctgggattacaggcctgagccaccgtgcctggcccctaatctgctgaagaaagaagaatagaagaaaatcaacctgagtaaaagcagcactggttttgagttttctaagctcagggtcttcattagagacctctggaaatacattaaggatggtgggggtagataatccattcagccagacaaacggggccagctcttaaaataagaaagctgaaaaaaaaaaaaaaaaaaaaaaaaaaaaaattttgggggcggccactgcagcctcggaaagaagttctaagaaacacctgccggcggggcggcgcggggggccccatgttggtgttagacgtgaacaggggcaaagacgcgttgccgaggagaaaactcggtggcccaacgacaaggcggctggcgggctcctccaccccatataaaaaaccgcgcggggcggaacacccgcagccgtcggtgaaccacaaccncaagagagggaggttcgcgaggggaacacacgcgggggtccacaccaccgggagggccccaaggcggagacgggaaaataaaaataacccgcgggcggggggaaatcaacaccggcagcagagccccacaaagacgacgacccgacgagacgagcgcagccacgcacgacggcagcaacaacacctaacaacgaaggcacggccaacgacacgcacacgcaccaacccagcacatagcaccacacccaccaccaacaccaga

SEQ ID NO: 48658 - DNA, 1827 bp, Homo sapiens
tccgtggtcctcccgtaggaaccggcggactcggttggcgttgtggggcagggggtggtggagcaagatggcggctcatctgtcctacggccgagtgaacctaaacgtgttgcgcgaggcggtgcgtcgcgagctgcgcgagttcctggacaagtgcgcaggaagcaaggcaatagtttgggatgaatacctaactggaccctttggcctgattgcacagtattcactattgaaggaacatgaagtggaaaaaatgttcacacttaaaggaaatcgtttgccggcagctgatgtgaagaatataattttttttgtcagacccaggctagagttgatggatataatcgctgaaaacgtgctcagtgaagatagacgaggcccaacgagagattttcatattctgtttgtgccacgccgtagcctgttgtgcgaacagcggttgaaggatctgggtgtcttgggatcctttattcacagggaggagtacagcttagatctcattccattcgatggggatctcttatccatggaatcagagggtgcattcaaagagtgctacctggagggtgaccagacgagcctgtaccacgcagccaaggggctgatgaccctgcaagctctgtatggaacgatcccccagatctttgggaaaggagaatgcgctcggcaagtggccaatatgatgatcaggatgaagagagagtttacaggaagccagaattcaatatttcctgtttttgataatctcttgttgcttgatcggaatgtggatttattaacacctcttgccactcagctgacatatggaggactcattgatgaaatttatggcattcagaacagttatgtgaaattacctccagagaaatttgcacctaagaaacagggcgatggtggtaaggacctccccacggaagcaaagaagctgcagctgaattctgcagaggagctctatgctgagatccgagataagaacttcaacgcagttggctctgtgctcagcaagaaagcaaagatcatctctgcagcattcgaggaaagacacaatgctaagaccgtgggggagatcaagcagtttgtttcccagttgccccacatgcaggcagcaaggggctcgcttgcaaaccatacctcaattgcagaattgatcaaagatgtcactacttctgaagacttttttgataaattaaccgtggaacaggagtttatgtctggaatagacactgataaggtcaacaattacattgaggattgtatcgcccaaaagcactcgttgatcaaggtgttaagactagtttgcctccaatccgtgtgtaatagtgggctcaaacaaaaagttttggattattacaaaagagagattctccagacatacggctatgagcacatattgaccttacacaacctggagaaggccggcctgctgaaaccgcagacggggggcagaaacaattacccaactatacggaaaacattacgcctctggatggatgatgttaatgagcaagtaagccacacttctccacctcgtctcagcttagggactggttagatcgtccaggtgacaacacatgcttctgaacctacacatctgccttgctttctgaaaacaattttctaatgtttttgaaaaagtaatgtatgcatgtattgtatccatcagaatcctagaaggacacagagaatgctcttaaactggggagtttctggagagtttaataaagatgtgggctgggcgcggtggctcacacctataatcccagcactttgggaggccgaggcgggcagatcacttgagctcaggagtttgagaacagcctgactaac

SEQ ID NO: 48659 - DNA, 686 bp, Homo sapiens
tccgtggtcctcccgtaggaaccggcggactcggttggcgttgtggggcagggggtggtggagcaagatggcggctcatctgtcctacggccgagtgaacctaaacgtgttgcgcgaggcggtgcgtcgcgagctgcgcgagttcctggacaagtgcgcaggaagcaaggcaatagtttgggatgaatacctaactggaccctttggcctgattgcacagtattcactattgaaggaacatgaagtggaaaaaatgttcacacttaaaggaaatcgtttgccggcagctgatgtgaagaatataattttttttgtcagacccaggctagagttgatggatataatcgctgaaaacgtgctcagtgaagatagacgaggcccaacgagagattttcatattctgtttgtgccacgccgtagcctgttgtgcgaacagcggttgaaggatctgggtgtcttgggatcctttattcacagggaggagtacagcttagatctcattccattcgatggggatctcttatccatggaatcagagggtgcattcaaaattgtgctttttgagtcttcataaatcttccactctgcagacaaagaagaatgcacctggtgtaattttcagcttaactgtaacctttcacttcccaggtttaaagcagttactctggccttaagcctccaaagat

SEQ ID NO: 48660 - DNA, 3071 bp, Homo sapiens
  misc_feature (2809)..(2809): n is a, c, g, or t
tccgtggtcctcccgtaggaaccggcggactcggttggcgttgtggggcagggggtggtggagcaagatggcggctcatctgtcctacggccgagtgaacctaaacgtgttgcgcgaggcggtgcgtcgcgagctgcgcgagttcctggacaagtgcgcaggaagcaaggcaatagtttgggatgaatacctaactggaccctttggcctgattgcacagtattcactattgaaggaacatgaagtggaaaaaatgttcacacttaaaggaaatcgtttgccggcagctgatgtgaagaatataattttttttgtcagacccaggctagagttgatggatataatcgctgaaaacgtgctcagtgaagatagacgaggcccaacgagagattttcatattctgtttgtgccacgccgtagcctgttgtgcgaacagcggttgaaggatctgggtgtcttgggatcctttattcacagggaggagtacagcttagatctcattccattcgatggggatctcttatccatggaatcagagggtgcattcaaagagtgctacctggagggtgaccagacgagcctgtaccacgcagccaaggggctgatgaccctgcaagctctgtatggaacgatcccccagatctttgggaaaggagaatgcgctcggcaagtggccaatatgatgatcaggatgaagagagagtttacaggaagccagaattcaatatttcctgtttttgataatctcttgttgcttgatcggaatgtggatttattaacacctcttgccactcagctgacatatggaggactcattgatgaaatttatggcattcagaacagttatgtgaaattacctccagagaaatttgcacctaagaaacagggcgatggtggtaaggacctccccacggaagcaaagaagctgcagctgaattctgcagaggagctctatgctgagatccgagataagaacttcaacgcagttggctctgtgctcagcaagaaagcaaagatcatctctgcagcattcgaggaaagacacaatgctaagaccgtgggggagatcaagcagtttgtttcccagttgccccacatgcaggcagcaaggggctcgcttgcaaaccatacctcaattgcagaattgatcaaagatgtcactacttctgaagacttttttgataaattaaccgtggaacaggagtttatgtctggaatagacactgataaggtcaacaattacattgaggattgtatcgcccaaaagcactcgttgatcaaggtgttaagactagtttgcctccaatccgtgtgtaatagtgggctcaaacaaaaagttttggattattacaaaagagagattctccagacatacggctatgagcacatattgaccttacacaacctggagaaggccggcctgctgaaaccgcagacggggggcagaaacaattacccaactatacggaaaacattacgcctctggatggatgatgttaatgagcaaaaccccacggacatatcgtatgtgtacagtgggtatgccccgctcagtgtgcggctggcccagctgctttcccggcctggctggcggagcatcgaggaggtcctccgcatcctcccagggccccactttgaggagcggcagccactgcccacaggactgcagaagaaacgtcaaccgggagaaaaccgagtgactctgatatttttccttgggggcgtaaccttcgctgaaattgctgccctgcgatttctctcccagttggaagatggaggtacagaatatgtcattgccaccactaaactaatgaatggaaccagttggatagaggctctgatggaaaaacctttctaggatgttcagaggagacttaacaagtgtactgcagaataaactacctctttgaagaaattgctgaaaggaagtaaaaccccatagaagaaacatgggaatacagaatatattctggggtcagcttcttaaattatactactgtttactgctttctccgtctcttttgtattccctttttttttttcctttgagacggagtcttgctctgtcacccagactagagtgcagtggcacggtctcacctcactgcaacctccacctcctaggttcaagcaattctcctgcctcagcctcctgagtagctgggactacaggcatgcaccaccacacccggctaatttttgtatttttagtagccatggtgtttcaccatgttggccaggctggtctcaaactcctgacctcaggtgatccacctgcctcggcctcccacagtgctgggattacaggcctgagccaccgtgcctggcccctaatctgctgaagaaagaagaatagaagaaaatcaacctgagtaaaagcagcactggttttgagttttctaagctcagggtcttcattagagacctctggaaatacattaaggatggtgggggtagataatccattcagccagacaaacggggccagctcttaaaataagaaagctgagactgaggaggtgaaactgaaaataaaaagagaaagttcatcctctaaaaaaaaaaaaaaaaaaaaaaaaaaaaaattttgggggcggccactgcagcctcggaaagaagttctaagaaacacctgccggcggggcggcgcggggggccccatgttggtgttagacgtgaacaggggcaaagacgcgttgccgaggagaaaactcggtggcccaacgacaaggcggctggcgggctcctccaccccatataaaaaaccgcgcggggcggaacacccgcagccgtcggtgaaccacaaccncaagagagggaggttcgcgaggggaacacacgcgggggtccacaccaccgggagggccccaaggcggagacgggaaaataaaaataacccgcgggcggggggaaatcaacaccggcagcagagccccacaaagacgacgacccgacgagacgagcgcagccacgcacgacggcagcaacaacacctaacaacgaaggcacggccaacgacacgcacacgcaccaacccagcacatagcaccacacccaccaccaacaccaga

SEQ ID NO: 48661 - DNA, 1979 bp, Homo sapiens
tccgtggtcctcccgtaggaaccggcggactcggttggcgttgtggggcagggggtggtggagcaagatggcggctcatctgtcctacggccgagtgaacctaaacgtgttgcgcgaggcggtgcgtcgcgagctgcgcgagttcctggacaagtgcgcaggaagcaaggcaatagtttgggatgaatacctaactggaccctttggcctgattgcacagtattcactattgaaggaacatgaagtggaaaaaatgttcacacttaaaggaaatcgtttgccggcagctgatgtgaagaatataattttttttgtcagacccaggctagagttgatggatataatcgctgaaaacgtgctcagtgaagatagacgaggcccaacgagagattttcatattctgtttgtgccacgccgtagcctgttgtgcgaacagcggttgaaggatctgggtgtcttgggatcctttattcacagggaggagtacagcttagatctcattccattcgatggggatctcttatccatggaatcagagggtgcattcaaagagtgctacctggagggtgaccagacgagcctgtaccacgcagccaaggggctgatgaccctgcaagctctgtatggaacgatcccccagatctttgggaaaggagaatgcgctcggcaagtggccaatatgatgatcaggatgaagagagagtttacaggaagccagaattcaatatttcctgtttttgataatctcttgttgcttgatcggaatgtggatttattaacacctcttgccactcagctgacatatggaggactcattgatgaaatttatggcattcagaacagttatgtgaaattacctccagagaaatttgcacctaagaaacagggcgatggtggtaaggacctccccacggaagcaaagaagctgcagctgaattctgcagaggagctctatgctgagatccgagataagaacttcaacgcagttggctctgtgctcagcaagaaagcaaagatcatctctgcagcattcgaggaaagacacaatgctaagaccgtgggggagatcaagcagtttgtttcccagttgccccacatgcaggcagcaaggggctcgcttgcaaaccatacctcaattgcagaattgatcaaagatgtcactacttctgaagacttttttgataaattaaccgtggaacaggagtttatgtctggaatagacactgataaggtcaacaattacattgaggattgtatcgcccaaaagcactcgttgatcaaggtgttaagactagtttgcctccaatccgtgtgtaatagtgggctcaaacaaaaagttttggattattacaaaagagagattctccagacatacggctatgagcacatattgaccttacacaacctggagaaggccggcctgctgaaaccgcagacggggggcagaaacaattacccaactatacggaaaacattacgcctctggatggatgatgttaatgagcaaaaccccacggacatatcgtatgtgtacagtgggtatgccccgctcagtgtgcggctggcccagctgctttcccggcctggctggcggagcatcgaggaggtcctccgcatcctcccagggccccactttgaggagcggcagccactgcccacaggactgcagaagaaacgtcaaccgggagaaaaccgagtgactctgatatttttccttgggggcgtaaccttcgctgaaattgctgccctgcgatttctctcccagttggaagatggaggtacagaatatgtcattgccaccactaaactaatgaatggaaccagttggatagaggctctgatggaaaaacctttctaggatgttcagaggagacttaacaagtgtactgcagaataaactacctctttgagaatgtgaggagtaaacccattgagaactgggatcagattatcggggcggtctaatatactcgtactgt

SEQ ID NO: 48662 - DNA, 599 bp, Homo sapiens
acgtgactgcgtccgtggtcctcccgtaggaaccggcggactcggttggcgttgtggggcagggggtggtggagcaagatggcggctcatctgtcctacggccgagtgaacctaaacgtgttgcgcgaggcggtgcgtcgcgagctgcgcgagttcctggacaagtgcgcaggaagcaaggtgaggggcgggaggcagcgacaccgccctcgcctcccctggtccggcctggtttaatccgttccctgaccgcctgagttcgcggtttatgaggtccttggggcttccaaggaggcgagcctcagggcccttttacctgcacccctgtgcaggaggcagcgatgaaggggggggccctgggcgtacagcctggagccggagtggcaccgcgactgttttgtgagagcagagtaagccactgtgatagcccggcagctgatgagctggtttacgtcaggtgtttcctccgctgcctgccgaggcaccggacgggtgagcggtccaagaatgtggatggtccagtgtccattcattacagggatcatacgtgtaccttagaagctctcttgaaacacctgcaccttgcaacctgctgctca

SEQ ID NO: 48663 - DNA, 794 bp, Homo sapiens
gagaaaactataatttattatcacaataacatttctaaatcaagtcagtttcaaagagaagttgatttactctgatttaggcagcatttcctctaaatgtggaaaaggtttttaagttactttacctggaaagacatttttatcagatggcaacgattttactcacactttctatagtttcctatatccaagttgtgattcttcttaaacaatctagaagatatgcagtactaatgctttaggatatcatctccatttttattgatataagtacaacttcagaataatttattttaggcctttctaagatgactttagctatagagtttggggacaggatgaattagataccttagatatgtctgatcctaaaaatgtaggttctgaaatatattgcactagttttcaaacaattaaaataattaagtacaccgtcttagatagataaatatattttccaactcatggcaaacgaattgctctgtataaagaaaatgtaactaaatattagcagctacttgataatgcatttacttatagtcctgcagaaaagaagatgctggctggctggctgacaatattaacttggaacaccctggtgtatccagatcctcctgggagtgtctctaggggcaggttgcagagcttcaaccttctccctggcccgtgcaacagaagcagatttaaggatggccccagactgagagagatggagacagagatagagataaagggcaagagccagagtgggagacagtgtgtgagaacatccttagaagaccaaattagcatta

SEQ ID NO: 48664 - DNA, 2605 bp, Homo sapiens
agcgattctcctgcctcagccttccgagtagctgggattacaggcatgcaccaacacgctcagtgtttaactgctgaagagatcttttcccttcatggcttttcaaatgctacccaaataaccagctccaaattctctgtcatctgtccagcagtcttacagcaattgaactttcacccatgtgaggatcggcccaagcacaaaacaagaccaagtcattcagaagtttggggatatggattcctgtcagtgacgattattaatctggcatctctcctcggattgattttgactccactgataaagaaatcttatttcccaaagattttgaccttttttgtggggctggctattgggactcttttttcaaatgcaattttccaacttattccagaggcatttggatttgatcccaaagtcgacagttatgttgagaaggcagttgctgtgtttggtggattttacctacttttcttttttgaaagaatgctaaagatgttattaaagacatatggtcagaatggtcatacccactttggaaatgataactttggtcctcaagaaaaaactcatcaacctaaagcattacctgccatcaatggtgtgacatgctatgcaaatcctgctgtcacagaagctaatggacatatccattttgataatgtcagtgtggtatctctacaggatggaaaaaaagagccaagttcatgtacctgtttgaaggggcccaaactgtcagaaatagggacgattgcctggatgataacgctctgcgatgccctccacaatttcatcgatggcctggcgattggggcttcctgcaccttgtctctccttcagggactcagtacttccatagcaatcctatgtgaggagtttccccacgagttaggagactttgtgatcctactcaatgcagggatgagcactcgacaagccttgctattcaacttcctttctgcatgttcctgctatgttgggctagcttttggcattttggtgggcaacaatttcgctccaaatattatatttgcacttgctggaggcatgttcctctatatttctctggcagatatgtttccagagatgaatgatatgctgagagaaaaggtaactggaagaaaaaccgatttcaccttcttcatgattcagaatgctggaatgttaactggattcacagccattctactcattaccttgtatgcaggagaaatcgaattggagtaatagaaaatggaagatggtgttgttaataaaggcatttaatagataaaaacatctccaaaaaggattttgaagctgatcctatttagttaaaaagataattttgctttcaaccgtaggtccagaaaactaattattggcatcagtctgtgaaatagtccattatttgttgttaaaaatgcttcaaaaggttttcagtgtcagtctgagatgcctggtatataggagcctttgggaaatacctatttttcagtattccatgcatattggatatcaccatgaagcaagagacatgcattctataatcatgtagacactcagactcaggggaaaatacaagttatatcctgaaagcctttaaaactctatggtaggatcaaagattcaaatggtttcagagaggttttatttcaattaatttgttctagtgctttcaagagcaagtacatcaaaatgtagaaggtaaaatgtatgcaacactaatataaattattccaagtctttaaggagccaaagaaaaaaaagatttctcacagctttttgttctgttttgtatttcaattaggaacttgcagtattattttgaaaaccattctaaaataataggagttaggaaataaataaagttttgctagccctgctaagttcaggcttagaggcttatcgctaagtgtaaacttcaccagattccacgaaaagctggatagctttttttctgacttatgttgtggttgcacccctcacaaatggcagaacagtatgtaaagctggtaacacctcggtttcagtgcaccatgtgtttgctttgtgaaggtgaagaatatgttggtttagagaaagaaattggatgtaattttatgcaatttacttttaaagacaaacataactatttagcagagaatattttaataaatgcaaaacaacagctggactgctgtacatcaaggacagattaactggaaaacatatgttccttatgtgtgattgagagccattcagaaaagacttcctttgtgttcagcctatacttttccatatggtataccttgaaaaaaattagcacaccatggttatttttctaccttttataaaagacagagcctgtttactcatttagaagatagagaaaattggtctaaaattgaacatcctagattcacactcccaagtcacttaaggtgatttgatggtgaggaaaatgattgacaaagcccaacaatgatctcaggaattacattttccaacagaccaaaaaatgttttcatgtagcagcaatgcagatttggtgaatatttaatatatattttagtatgtatttcactttatgactgacaattaaaaaatattgtttggccaaatagtaaacacccttttgaaacca

SEQ ID NO: 48665 - DNA, 364 bp, Homo sapiens
ttactaagagctaatagaaaggctaggaccaaacctataatagtttatgctgtaatagtttatgctgtacagcataaactattcctgtttactcatttagaagatagagaaaattggtctaaaattgaacatcctagattcacactcccaagtcacttaaggtgatttgatggtgaggaaaatgattgacaaagcccaacaatgatctcaggaattacattttccaacagaccaaaaaatgttttcatgtagcagcaatgcagatttggtgaatatttaatatatattttagtatgtatttcactttatgactgacaattaaaaaatattgtttggccaaatagtaaacacccttttgaaacca

SEQ ID NO: 48666 - DNA, 3352 bp, Homo sapiens
gactccggaagagcccttttctgcagctccttggggactgcacgtctcacttctaagtttgcggcggagagaataaagcagaaagacaggaagaggaggtggagttctacagttagtgtggttttagtttttcctaagaagtggcgtggtttggggctttatatccgggaggagcatatgtacgcaaatcctggggcgtttgcaaacccggatccggggcgtctggccccatgcccggccgggcgtttgagggctactgccacgcagcgtttctggagcctgccggctggtgccctggtggcctttatctctgtccccctttgtcctctttatctcaggctctccaggaggccggggggcccactccgcctatcgctcccctcggctacgctgccacttcaatgccccgcaggtcgcgagctgctgttctttcgaaggcgtcggagaaccaggggcgtcccgcgccacctctgactcggagcagcgccgagcactgacgctcccgcccttgggcaaggacgccagtgcgcccgcgcgcgtccctctgcgcggcagcccgtcgcgggccctcaaggggaagcccaggccaggatggccccgggtcgcgcggtggccgggctcctgttgctggcggccgccggcctcggaggagtggcggaggggccagggctagccttcagcgaggatgtgctgagcgtgttcggcgcgaatctgagcctgtcggcggcgcagctccagcacttgctggagcagatgggagccgcctcccgcgtgggcgtcccggagcctggccagctgcacttcaaccagtgtttaactgctgaagagatcttttcccttcatggcttttcaaatgctacccaaataaccagctccaaattctctgtcatctgtccagcagtcttacagcaattgaactttcacccatgtgaggatcggcccaagcacaaaacaagaccaagtcattcagaagtttggggatatggattcctgtcagtgacgattattaatctggcatctctcctcggattgattttgactccactgataaagaaatcttatttcccaaagattttgaccttttttgtggggctggctattgggactcttttttcaaatgcaattttccaacttattccagaggcatttggatttgatcccaaagtcgacagttatgttgagaaggcagttgctgtgtttggtggattttacctacttttcttttttgaaagaatgctaaagatgttattaaagacatatggtcagaatggtcatacccactttggaaatgataactttggtcctcaagaaaaaactcatcaacctaaagcattacctgccatcaatggtgtgacatgctatgcaaatcctgctgtcacagaagctaatggacatatccattttgataatgtcagtgtggtatctctacaggatggaaaaaaagagccaagttcatgtacctgtttgaaggggcccaaactgtcagaaatagggacgattgcctggatgataacgctctgcgatgccctccacaatttcatcgatggcctggcgattggggcttcctgcaccttgtctctccttcagggactcagtacttccatagcaatcctatgtgaggagtttccccacgagttaggagactttgtgatcctactcaatgcagggatgagcactcgacaagccttgctattcaacttcctttctgcatgttcctgctatgttgggctagcttttggcattttggtgggcaacaatttcgctccaaatattatatttgcacttgctggaggcatgttcctctatatttctctggcagatatgtttccagagatgaatgatatgctgagagaaaaggtaactggaagaaaaaccgatttcaccttcttcatgattcagaatgctggaatgttaactggattcacagccattctactcattaccttgtatgcaggagaaatcgaattggagtaatagaaaatggaagatggtgttgttaataaaggcatttaatagataaaaacatctccaaaaaggattttgaagctgatcctatttagttaaaaagataattttgctttcaaccgtaggtccagaaaactaattattggcatcagtctgtgaaatagtccattatttgttgttaaaaatgcttcaaaaggttttcagtgtcagtctgagatgcctggtatataggagcctttgggaaatacctatttttcagtattccatgcatattggatatcaccatgaagcaagagacatgcattctataatcatgtagacactcagactcaggggaaaatacaagttatatcctgaaagcctttaaaactctatggtaggatcaaagattcaaatggtttcagagaggttttatttcaattaatttgttctagtgctttcaagagcaagtacatcaaaatgtagaaggtaaaatgtatgcaacactaatataaattattccaagtctttaaggagccaaagaaaaaaaagatttctcacagctttttgttctgttttgtatttcaattaggaacttgcagtattattttgaaaaccattctaaaataataggagttaggaaataaataaagttttgctagccctgctaagttcaggcttagaggcttatcgctaagtgtaaacttcaccagattccacgaaaagctggatagctttttttctgacttatgttgtggttgcacccctcacaaatggcagaacagtatgtaaagctggtaacacctcggtttcagtgcaccatgtgtttgctttgtgaaggtgaagaatatgttggtttagagaaagaaattggatgtaattttatgcaatttacttttaaagacaaacataactatttagcagagaatattttaataaatgcaaaacaacagctggactgctgtacatcaaggacagattaactggaaaacatatgttccttatgtgtgattgagagccattcagaaaagacttcctttgtgttcagcctatacttttccatatggtataccttgaaaaaaattagcacaccatggttatttttctaccttttataaaagacagagcctgtttactcatttagaagatagagaaaattggtctaaaattgaacatcctagattcacactcccaagtcacttaaggtgatttgatggtgaggaaaatgattgacaaagcccaacaatgatctcaggaattacattttccaacagaccaaaaaatgttttcatgtagcagcaatgcagatttggtgaatatttaatatatattttagtatgtatttcactttatgactgacaattaaaaaatattgtttggccaaatagtaaacacccttttgaaacca

SEQ ID NO: 48667 - DNA, 3169 bp, Homo sapiens
agtgagaaaaaaaagcaattcctgttaattatgtagacaatgcaagggtctccaggctccatttcagcaagttggtttcatcaagatcacgaaaagatgcatgcgtccccgagaccagagaggagttagggaccccgacacggaggtggcatcaggctctccaggaggccggggggcccactccgcctatcgctcccctcggctacgctgccacttcaatgccccgcaggtcgcgagctgctgttctttcgaaggcgtcggagaaccaggggcgtcccgcgccacctctgactcggagcagcgccgagcactgacgctcccgcccttgggcaaggacgccagtgcgcccgcgcgcgtccctctgcgcggcagcccgtcgcgggccctcaaggggaagcccaggccaggatggccccgggtcgcgcggtggccgggctcctgttgctggcggccgccggcctcggaggagtggcggaggggccagggctagccttcagcgaggatgtgctgagcgtgttcggcgcgaatctgagcctgtcggcggcgcagctccagcacttgctggagcagatgggagccgcctcccgcgtgggcgtcccggagcctggccagctgcacttcaaccagtgtttaactgctgaagagatcttttcccttcatggcttttcaaatgctacccaaataaccagctccaaattctctgtcatctgtccagcagtcttacagcaattgaactttcacccatgtgaggatcggcccaagcacaaaacaagaccaagtcattcagaagtttggggatatggattcctgtcagtgacgattattaatctggcatctctcctcggattgattttgactccactgataaagaaatcttatttcccaaagattttgaccttttttgtggggctggctattgggactcttttttcaaatgcaattttccaacttattccagaggcatttggatttgatcccaaagtcgacagttatgttgagaaggcagttgctgtgtttggtggattttacctacttttcttttttgaaagaatgctaaagatgttattaaagacatatggtcagaatggtcatacccactttggaaatgataactttggtcctcaagaaaaaactcatcaacctaaagcattacctgccatcaatggtgtgacatgctatgcaaatcctgctgtcacagaagctaatggacatatccattttgataatgtcagtgtggtatctctacaggatggaaaaaaagagccaagttcatgtacctgtttgaaggggcccaaactgtcagaaatagggacgattgcctggatgataacgctctgcgatgccctccacaatttcatcgatggcctggcgattggggcttcctgcaccttgtctctccttcagggactcagtacttccatagcaatcctatgtgaggagtttccccacgagttaggagactttgtgatcctactcaatgcagggatgagcactcgacaagccttgctattcaacttcctttctgcatgttcctgctatgttgggctagcttttggcattttggtgggcaacaatttcgctccaaatattatatttgcacttgctggaggcatgttcctctatatttctctggcagatatgtttccagagatgaatgatatgctgagagaaaaggtaactggaagaaaaaccgatttcaccttcttcatgattcagaatgctggaatgttaactggattcacagccattctactcattaccttgtatgcaggagaaatcgaattggagtaatagaaaatggaagatggtgttgttaataaaggcatttaatagataaaaacatctccaaaaaggattttgaagctgatcctatttagttaaaaagataattttgctttcaaccgtaggtccagaaaactaattattggcatcagtctgtgaaatagtccattatttgttgttaaaaatgcttcaaaaggttttcagtgtcagtctgagatgcctggtatataggagcctttgggaaatacctatttttcagtattccatgcatattggatatcaccatgaagcaagagacatgcattctataatcatgtagacactcagactcaggggaaaatacaagttatatcctgaaagcctttaaaactctatggtaggatcaaagattcaaatggtttcagagaggttttatttcaattaatttgttctagtgctttcaagagcaagtacatcaaaatgtagaaggtaaaatgtatgcaacactaatataaattattccaagtctttaaggagccaaagaaaaaaaagatttctcacagctttttgttctgttttgtatttcaattaggaacttgcagtattattttgaaaaccattctaaaataataggagttaggaaataaataaagttttgctagccctgctaagttcaggcttagaggcttatcgctaagtgtaaacttcaccagattccacgaaaagctggatagctttttttctgacttatgttgtggttgcacccctcacaaatggcagaacagtatgtaaagctggtaacacctcggtttcagtgcaccatgtgtttgctttgtgaaggtgaagaatatgttggtttagagaaagaaattggatgtaattttatgcaatttacttttaaagacaaacataactatttagcagagaatattttaataaatgcaaaacaacagctggactgctgtacatcaaggacagattaactggaaaacatatgttccttatgtgtgattgagagccattcagaaaagacttcctttgtgttcagcctatacttttccatatggtataccttgaaaaaaattagcacaccatggttatttttctaccttttataaaagacagagcctgtttactcatttagaagatagagaaaattggtctaaaattgaacatcctagattcacactcccaagtcacttaaggtgatttgatggtgaggaaaatgattgacaaagcccaacaatgatctcaggaattacattttccaacagaccaaaaaatgttttcatgtagcagcaatgcagatttggtgaatatttaatatatattttagtatgtatttcactttatgactgacaattaaaaaatattgtttggccaaatagtaaacacccttttgaaacca

SEQ ID NO: 48668 - DNA, 2988 bp, Homo sapiens
atcgcggagtttcaccgcggacctgtcagagatacagaggttgtgggggcgggagacagaaagagagagagatccagagaccgagtcttacgttgacacgcagagagaaagacgcagagacagacaaacaaacagataggagaggctctccaggaggccggggggcccactccgcctatcgctcccctcggctacgctgccacttcaatgccccgcaggtcgcgagctgctgttctttcgaaggcgtcggagaaccaggggcgtcccgcgccacctctgactcggagcagcgccgagcactgacgctcccgcccttgggcaaggacgccagtgcgcccgcgcgcgtccctctgcgcggcagcccgtcgcgggccctcaaggggaagcccaggccaggatggccccgggtcgcgcggtggccgggctcctgttgctggcggccgccggcctcggaggagtggcggaggggccagggctagccttcagcgaggatgtgctgagcgtgttcggcgcgaatctgagcctgtcggcggcgcagctccagcacttgctggagcagatgggagccgcctcccgcgtgggcgtcccggagcctggccagctgcacttcaaccagtgtttaactgctgaagagatcttttcccttcatggcttttcaaatgctacccaaataaccagctccaaattctctgtcatctgtccagcagtcttacagcaattgaactttcacccatgtgaggatcggcccaagcacaaaacaagaccaagtcattcagaaggcatttggatttgatcccaaagtcgacagttatgttgagaaggcagttgctgtgtttggtggattttacctacttttcttttttgaaagaatgctaaagatgttattaaagacatatggtcagaatggtcatacccactttggaaatgataactttggtcctcaagaaaaaactcatcaacctaaagcattacctgccatcaatggtgtgacatgctatgcaaatcctgctgtcacagaagctaatggacatatccattttgataatgtcagtgtggtatctctacaggatggaaaaaaagagccaagttcatgtacctgtttgaaggggcccaaactgtcagaaatagggacgattgcctggatgataacgctctgcgatgccctccacaatttcatcgatggcctggcgattggggcttcctgcaccttgtctctccttcagggactcagtacttccatagcaatcctatgtgaggagtttccccacgagttaggagactttgtgatcctactcaatgcagggatgagcactcgacaagccttgctattcaacttcctttctgcatgttcctgctatgttgggctagcttttggcattttggtgggcaacaatttcgctccaaatattatatttgcacttgctggaggcatgttcctctatatttctctggcagatatgtttccagagatgaatgatatgctgagagaaaaggtaactggaagaaaaaccgatttcaccttcttcatgattcagaatgctggaatgttaactggattcacagccattctactcattaccttgtatgcaggagaaatcgaattggagtaatagaaaatggaagatggtgttgttaataaaggcatttaatagataaaaacatctccaaaaaggattttgaagctgatcctatttagttaaaaagataattttgctttcaaccgtaggtccagaaaactaattattggcatcagtctgtgaaatagtccattatttgttgttaaaaatgcttcaaaaggttttcagtgtcagtctgagatgcctggtatataggagcctttgggaaatacctatttttcagtattccatgcatattggatatcaccatgaagcaagagacatgcattctataatcatgtagacactcagactcaggggaaaatacaagttatatcctgaaagcctttaaaactctatggtaggatcaaagattcaaatggtttcagagaggttttatttcaattaatttgttctagtgctttcaagagcaagtacatcaaaatgtagaaggtaaaatgtatgcaacactaatataaattattccaagtctttaaggagccaaagaaaaaaaagatttctcacagctttttgttctgttttgtatttcaattaggaacttgcagtattattttgaaaaccattctaaaataataggagttaggaaataaataaagttttgctagccctgctaagttcaggcttagaggcttatcgctaagtgtaaacttcaccagattccacgaaaagctggatagctttttttctgacttatgttgtggttgcacccctcacaaatggcagaacagtatgtaaagctggtaacacctcggtttcagtgcaccatgtgtttgctttgtgaaggtgaagaatatgttggtttagagaaagaaattggatgtaattttatgcaatttacttttaaagacaaacataactatttagcagagaatattttaataaatgcaaaacaacagctggactgctgtacatcaaggacagattaactggaaaacatatgttccttatgtgtgattgagagccattcagaaaagacttcctttgtgttcagcctatacttttccatatggtataccttgaaaaaaattagcacaccatggttatttttctaccttttataaaagacagagcctgtttactcatttagaagatagagaaaattggtctaaaattgaacatcctagattcacactcccaagtcacttaaggtgatttgatggtgaggaaaatgattgacaaagcccaacaatgatctcaggaattacattttccaacagaccaaaaaatgttttcatgtagcagcaatgcagatttggtgaatatttaatatatattttagtatgtatttcactttatgactgacaattaaaaaatattgtttggccaaatagtaaacacccttttgaaacca

SEQ ID NO: 48669 - DNA, 2516 bp, Homo sapiens
atcgcggagtttcaccgcggacctgtcagagatacagaggttgtgggggcgggagacagaaagagagagagatccagagaccgagtcttacgttgacacgcagagagaaagacgcagagacagacaaacaaacagataggagagtgtttaactgctgaagagatcttttcccttcatggcttttcaaatgctacccaaataaccagctccaaattctctgtcatctgtccagcagtcttacagcaattgaactttcacccatgtgaggatcggcccaagcacaaaacaagaccaagtcattcagaaggcatttggatttgatcccaaagtcgacagttatgttgagaaggcagttgctgtgtttggtggattttacctacttttcttttttgaaagaatgctaaagatgttattaaagacatatggtcagaatggtcatacccactttggaaatgataactttggtcctcaagaaaaaactcatcaacctaaagcattacctgccatcaatggtgtgacatgctatgcaaatcctgctgtcacagaagctaatggacatatccattttgataatgtcagtgtggtatctctacaggatggaaaaaaagagccaagttcatgtacctgtttgaaggggcccaaactgtcagaaatagggacgattgcctggatgataacgctctgcgatgccctccacaatttcatcgatggcctggcgattggggcttcctgcaccttgtctctccttcagggactcagtacttccatagcaatcctatgtgaggagtttccccacgagttaggagactttgtgatcctactcaatgcagggatgagcactcgacaagccttgctattcaacttcctttctgcatgttcctgctatgttgggctagcttttggcattttggtgggcaacaatttcgctccaaatattatatttgcacttgctggaggcatgttcctctatatttctctggcagatatgtttccagagatgaatgatatgctgagagaaaaggtaactggaagaaaaaccgatttcaccttcttcatgattcagaatgctggaatgttaactggattcacagccattctactcattaccttgtatgcaggagaaatcgaattggagtaatagaaaatggaagatggtgttgttaataaaggcatttaatagataaaaacatctccaaaaaggattttgaagctgatcctatttagttaaaaagataattttgctttcaaccgtaggtccagaaaactaattattggcatcagtctgtgaaatagtccattatttgttgttaaaaatgcttcaaaaggttttcagtgtcagtctgagatgcctggtatataggagcctttgggaaatacctatttttcagtattccatgcatattggatatcaccatgaagcaagagacatgcattctataatcatgtagacactcagactcaggggaaaatacaagttatatcctgaaagcctttaaaactctatggtaggatcaaagattcaaatggtttcagagaggttttatttcaattaatttgttctagtgctttcaagagcaagtacatcaaaatgtagaaggtaaaatgtatgcaacactaatataaattattccaagtctttaaggagccaaagaaaaaaaagatttctcacagctttttgttctgttttgtatttcaattaggaacttgcagtattattttgaaaaccattctaaaataataggagttaggaaataaataaagttttgctagccctgctaagttcaggcttagaggcttatcgctaagtgtaaacttcaccagattccacgaaaagctggatagctttttttctgacttatgttgtggttgcacccctcacaaatggcagaacagtatgtaaagctggtaacacctcggtttcagtgcaccatgtgtttgctttgtgaaggtgaagaatatgttggtttagagaaagaaattggatgtaattttatgcaatttacttttaaagacaaacataactatttagcagagaatattttaataaatgcaaaacaacagctggactgctgtacatcaaggacagattaactggaaaacatatgttccttatgtgtgattgagagccattcagaaaagacttcctttgtgttcagcctatacttttccatatggtataccttgaaaaaaattagcacaccatggttatttttctaccttttataaaagacagagcctgtttactcatttagaagatagagaaaattggtctaaaattgaacatcctagattcacactcccaagtcacttaaggtgatttgatggtgaggaaaatgattgacaaagcccaacaatgatctcaggaattacattttccaacagaccaaaaaatgttttcatgtagcagcaatgcagatttggtgaatatttaatatatattttagtatgtatttcactttatgactgacaattaaaaaatattgtttggccaaatagtaaacacccttttgaaacca

SEQ ID NO: 48670 - DNA, 1342 bp, Homo sapiens
ttttttttaggaatgaatgcccactcacatttaataatagcttatgtagcacacaactctgcagcataataccaacaacaggagtgttttaaagcaggatggagaagaaagtagacaatacaacttaaggtttcctttgtcctttcccctgttttcaccatgagaattcagctgaaaaacaactctccagaatgcccacccatattgtcctttgacccaccacattccaaacttctgacttctgatcccaagctcttggagccttagcctttagtgatgtatccttctctgatgaggaaatcatagattttccgggttttgttcacatctatcttgatgagtgctcttgcctgcgccagtcttaagcctccttgctcctcgtgccgaattcggcacgagggcaagtacatcaaaatgtagaaggtaaaatgtatgcaacactaatataaattattccaagtctttaaggagccaaagaaaaaaaagatttctcacagctttttgttctgttttgtatttcaattaggaacttgcagtattattttgaaaaccattctaaaataataggagttaggaaataaataaagttttgctagccctgctaagttcaggcttagaggcttatcgctaagtgtaaacttcaccagattccacgaaaagctggatagctttttttctgacttatgttgtggttgcacccctcacaaatggcagaacagtatgtaaagctggtaacacctcggtttcagtgcaccatgtgtttgctttgtgaaggtgaagaatatgttggtttagagaaagaaattggatgtaattttatgcaatttacttttaaagacaaacataactatttagcagagaatattttaataaatgcaaaacaacagctggactgctgtacatcaaggacagattaactggaaaacatatgttccttatgtgtgattgagagccattcagaaaagacttcctttgtgttcagcctatacttttccatatggtataccttgaaaaaaattagcacaccatggttatttttctaccttttataaaagacagagcctgtttactcatttagaagatagagaaaattggtctaaaattgaacatcctagattcacactcccaagtcacttaaggtgatttgatggtgaggaaaatgattgacaaagcccaacaatgatctcaggaattacattttccaacagaccaaaaaatgttttcatgtagcagcaatgcagatttggtgaatatttaatatatattttagtatgtatttcactttatgactgacaattaaaaaatattgtttggccaaatagtaaacacccttttgaaacca

SEQ ID NO: 48671 - DNA, 1118 bp, Homo sapiens
atcgcggagtttcaccgcggacctgtcagagatacagaggttgtgggggcgggagacagaaagagagagagatccagagaccgagtcttacgttgacacgcagagagaaagacgcagagacagacaaacaaacagataggagaggctctccaggaggccggggggcccactccgcctatcgctcccctcggctacgctgccacttcaatgccccgcaggtcgcgagctgctgttctttcgaaggcgtcggagaaccaggggcgtcccgcgccacctctgactcggagcagcgccgagcactgacgctcccgcccttgggcaaggacgccagtgcgcccgcgcgcgtccctctgcgcggcagcccgtcgcgggccctcaaggggaagcccaggccaggatggccccgggtcgcgcggtggccgggctcctgttgctggcggccgccggcctcggaggagtggcggaggggccagggctagccttcagcgaggatgtgctgagcgtgttcggcgcgaatctgagcctgtcggcggcgcagctccagcacttgctggagcagatgggagccgcctcccgcgtgggcgtcccggagcctggccagctgcacttcaaccagtgtttaactgctgaagagatcttttcccttcatggcttttcaaatgctacccaaataaccagctccaaattctctgtcatctgtccagcagtcttacagcaattgaactttcacccatgtgaggatcggcccaagcacaaaacaagaccaagtcattcagaagtttggggatatggattcctgtcagtgacgattattaatctggcatctctcctcggattgattttgactccactgataaagaaatcttatttcccaaagattttgaccttttttgtggggctggctattgggactcttttttcaaatgcaattttccaacttattccagaggcatttggatttgatcccaaagtcgacagttatgttgagaaggcagttgctgtgtttggtggattttacctacttttcttttttgaaagaatgctaaagatgttattaaagacatatggtcagaatggtcatacccacttcagattggtaacaccttcgtgcctgaatc

SEQ ID NO: 48672 - DNA, 412 bp, Homo sapiens
atcgcggagtttcaccgcggacctgtcagagatacagaggttgtgggggcgggagacagaaagagagagagatccagagaccgagtcttacgttgacacgcagagagaaagacgcagagacagacaaacaaacagataggagaggctctccaggaggccggggggcccactccgcctatcgctcccctcggctacgctgccacttcaactccccccacgttccaaacaaaagcttgccattttgacttggagatgcagcggtgggtcgagactcaagtcagatgcaaccgtgattattgaccttgcccttggcagtgcccaagatcgtcagagtgccagagcccgttctcctgtccgtcatcctgttcctgaagtaaaaggtgcagagaagaggtccatgtggactggtagc

SEQ ID NO: 48673 - DNA, 3158 bp, Homo sapiens
atcgcggagtttcaccgcggacctgtcagagatacagaggttgtgggggcgggagacagaaagagagagagatccagagaccgagtcttacgttgacacgcagagagaaagacgcagagacagacaaacaaacagataggagaggctctccaggaggccggggggcccactccgcctatcgctcccctcggctacgctgccacttcaatgccccgcaggtcgcgagctgctgttctttcgaaggcgtcggagaaccaggggcgtcccgcgccacctctgactcggagcagcgccgagcactgacgctcccgcccttgggcaaggacgccagtgcgcccgcgcgcgtccctctgcgcggcagcccgtcgcgggccctcaaggggaagcccaggccaggatggccccgggtcgcgcggtggccgggctcctgttgctggcggccgccggcctcggaggagtggcggaggggccagggctagccttcagcgaggatgtgctgagcgtgttcggcgcgaatctgagcctgtcggcggcgcagctccagcacttgctggagcagatgggagccgcctcccgcgtgggcgtcccggagcctggccagctgcacttcaaccagtgtttaactgctgaagagatcttttcccttcatggcttttcaaatgctacccaaataaccagctccaaattctctgtcatctgtccagcagtcttacagcaattgaactttcacccatgtgaggatcggcccaagcacaaaacaagaccaagtcattcagaagtttggggatatggattcctgtcagtgacgattattaatctggcatctctcctcggattgattttgactccactgataaagaaatcttatttcccaaagattttgaccttttttgtggggctggctattgggactcttttttcaaatgcaattttccaacttattccagaggcatttggatttgatcccaaagtcgacagttatgttgagaaggcagttgctgtgtttggtggattttacctacttttcttttttgaaagaatgctaaagatgttattaaagacatatggtcagaatggtcatacccactttggaaatgataactttggtcctcaagaaaaaactcatcaacctaaagcattacctgccatcaatggtgtgacatgctatgcaaatcctgctgtcacagaagctaatggacatatccattttgataatgtcagtgtggtatctctacaggatggaaaaaaagagccaagttcatgtacctgtttgaaggggcccaaactgtcagaaatagggacgattgcctggatgataacgctctgcgatgccctccacaatttcatcgatggcctggcgattggggcttcctgcaccttgtctctccttcagggactcagtacttccatagcaatcctatgtgaggagtttccccacgagttaggagactttgtgatcctactcaatgcagggatgagcactcgacaagccttgctattcaacttcctttctgcatgttcctgctatgttgggctagcttttggcattttggtgggcaacaatttcgctccaaatattatatttgcacttgctggaggcatgttcctctatatttctctggcagatatgtttccagagatgaatgatatgctgagagaaaaggtaactggaagaaaaaccgatttcaccttcttcatgattcagaatgctggaatgttaactggattcacagccattctactcattaccttgtatgcaggagaaatcgaattggagtaatagaaaatggaagatggtgttgttaataaaggcatttaatagataaaaacatctccaaaaaggattttgaagctgatcctatttagttaaaaagataattttgctttcaaccgtaggtccagaaaactaattattggcatcagtctgtgaaatagtccattatttgttgttaaaaatgcttcaaaaggttttcagtgtcagtctgagatgcctggtatataggagcctttgggaaatacctatttttcagtattccatgcatattggatatcaccatgaagcaagagacatgcattctataatcatgtagacactcagactcaggggaaaatacaagttatatcctgaaagcctttaaaactctatggtaggatcaaagattcaaatggtttcagagaggttttatttcaattaatttgttctagtgctttcaagagcaagtacatcaaaatgtagaaggtaaaatgtatgcaacactaatataaattattccaagtctttaaggagccaaagaaaaaaaagatttctcacagctttttgttctgttttgtatttcaattaggaacttgcagtattattttgaaaaccattctaaaataataggagttaggaaataaataaagttttgctagccctgctaagttcaggcttagaggcttatcgctaagtgtaaacttcaccagattccacgaaaagctggatagctttttttctgacttatgttgtggttgcacccctcacaaatggcagaacagtatgtaaagctggtaacacctcggtttcagtgcaccatgtgtttgctttgtgaaggtgaagaatatgttggtttagagaaagaaattggatgtaattttatgcaatttacttttaaagacaaacataactatttagcagagaatattttaataaatgcaaaacaacagctggactgctgtacatcaaggacagattaactggaaaacatatgttccttatgtgtgattgagagccattcagaaaagacttcctttgtgttcagcctatacttttccatatggtataccttgaaaaaaattagcacaccatggttatttttctaccttttataaaagacagagcctgtttactcatttagaagatagagaaaattggtctaaaattgaacatcctagattcacactcccaagtcacttaaggtgatttgatggtgaggaaaatgattgacaaagcccaacaatgatctcaggaattacattttccaacagaccaaaaaatgttttcatgtagcagcaatgcagatttggtgaatatttaatatatattttagtatgtatttcactttatgactgacaattaaaaaatattgtttggccaaatagtaaacacccttttgaaacca

SEQ ID NO: 48674 - DNA, 1103 bp, Homo sapiens
atcgcggagtttcaccgcggacctgtcagagatacagaggttgtgggggcgggagacagaaagagagagagatccagagaccgagtcttacgttgacacgcagagagaaagacgcagagacagacaaacaaacagataggagaggctctccaggaggccggggggcccactccgcctatcgctcccctcggctacgctgccacttcaatgccccgcaggtcgcgagctgctgttctttcgaaggcgtcggagaaccaggggcgtcccgcgccacctctgactcggagcagcgccgagcactgacgctcccgcccttgggcaaggacgccagtgcgcccgcgcgcgtccctctgcgcagctccagcacttgctggagcagatgggagccgcctcccgcgtgggcgtcccggagcctggccagctgcacttcaaccagttgggagctgaaagtgccgacagccattggtgccgtgttaaatagcaaagatgagcagagagcaacttgctgaacacaagcagaaacttgcagggcttccctatgaatacctctgctccaaaatgcaaaactgtaagtatctggatgaaggagacgacagcatgaacgacaaactgggccgactctccgggctgcactataaatggcccccggctgacgcacacattaggacatactgagcacgaggatcgtcgcaaagactccaagacagtgttcttacagggaaccccaagacgtccaattcccctaactgactaccggcccacaccagcggaacggcgcactatgaccccagcactcccctcacggcacgtgaggtacacccggccatgcctcggtaaaaacccatcacctgtaggcacactctcaggccaaggccgcgcccccgtcaattcatcgactccccgcaggcaaagccgccccacccagcgcacgaaaacacccccacacggagcgacccacgagccccccttcgcccatccccacccggaccccccccccacgcccgggcgagcactcgcccacccccgcggcaccccaaccgacgcgcgagccccgccccctgctcgaccgaacccgcgccccagccccgcatacccccacaccc

SEQ ID NO: 48675 - DNA, 3125 bp, Homo sapiens
gactccggaagagcccttttctgcagctccttggggactgcacgtctcacttctaagtttgcggcggagagaataaagcagaaagacaggaagaggaggtggagttctacagctctccaggaggccggggggcccactccgcctatcgctcccctcggctacgctgccacttcaatgccccgcaggtcgcgagctgctgttctttcgaaggcgtcggagaaccaggggcgtcccgcgccacctctgactcggagcagcgccgagcactgacgctcccgcccttgggcaaggacgccagtgcgcccgcgcgcgtccctctgcgcggcagcccgtcgcgggccctcaaggggaagcccaggccaggatggccccgggtcgcgcggtggccgggctcctgttgctggcggccgccggcctcggaggagtggcggaggggccagggctagccttcagcgaggatgtgctgagcgtgttcggcgcgaatctgagcctgtcggcggcgcagctccagcacttgctggagcagatgggagccgcctcccgcgtgggcgtcccggagcctggccagctgcacttcaaccagtgtttaactgctgaagagatcttttcccttcatggcttttcaaatgctacccaaataaccagctccaaattctctgtcatctgtccagcagtcttacagcaattgaactttcacccatgtgaggatcggcccaagcacaaaacaagaccaagtcattcagaagtttggggatatggattcctgtcagtgacgattattaatctggcatctctcctcggattgattttgactccactgataaagaaatcttatttcccaaagattttgaccttttttgtggggctggctattgggactcttttttcaaatgcaattttccaacttattccagaggcatttggatttgatcccaaagtcgacagttatgttgagaaggcagttgctgtgtttggtggattttacctacttttcttttttgaaagaatgctaaagatgttattaaagacatatggtcagaatggtcatacccactttggaaatgataactttggtcctcaagaaaaaactcatcaacctaaagcattacctgccatcaatggtgtgacatgctatgcaaatcctgctgtcacagaagctaatggacatatccattttgataatgtcagtgtggtatctctacaggatggaaaaaaagagccaagttcatgtacctgtttgaaggggcccaaactgtcagaaatagggacgattgcctggatgataacgctctgcgatgccctccacaatttcatcgatggcctggcgattggggcttcctgcaccttgtctctccttcagggactcagtacttccatagcaatcctatgtgaggagtttccccacgagttaggagactttgtgatcctactcaatgcagggatgagcactcgacaagccttgctattcaacttcctttctgcatgttcctgctatgttgggctagcttttggcattttggtgggcaacaatttcgctccaaatattatatttgcacttgctggaggcatgttcctctatatttctctggcagatatgtttccagagatgaatgatatgctgagagaaaaggtaactggaagaaaaaccgatttcaccttcttcatgattcagaatgctggaatgttaactggattcacagccattctactcattaccttgtatgcaggagaaatcgaattggagtaatagaaaatggaagatggtgttgttaataaaggcatttaatagataaaaacatctccaaaaaggattttgaagctgatcctatttagttaaaaagataattttgctttcaaccgtaggtccagaaaactaattattggcatcagtctgtgaaatagtccattatttgttgttaaaaatgcttcaaaaggttttcagtgtcagtctgagatgcctggtatataggagcctttgggaaatacctatttttcagtattccatgcatattggatatcaccatgaagcaagagacatgcattctataatcatgtagacactcagactcaggggaaaatacaagttatatcctgaaagcctttaaaactctatggtaggatcaaagattcaaatggtttcagagaggttttatttcaattaatttgttctagtgctttcaagagcaagtacatcaaaatgtagaaggtaaaatgtatgcaacactaatataaattattccaagtctttaaggagccaaagaaaaaaaagatttctcacagctttttgttctgttttgtatttcaattaggaacttgcagtattattttgaaaaccattctaaaataataggagttaggaaataaataaagttttgctagccctgctaagttcaggcttagaggcttatcgctaagtgtaaacttcaccagattccacgaaaagctggatagctttttttctgacttatgttgtggttgcacccctcacaaatggcagaacagtatgtaaagctggtaacacctcggtttcagtgcaccatgtgtttgctttgtgaaggtgaagaatatgttggtttagagaaagaaattggatgtaattttatgcaatttacttttaaagacaaacataactatttagcagagaatattttaataaatgcaaaacaacagctggactgctgtacatcaaggacagattaactggaaaacatatgttccttatgtgtgattgagagccattcagaaaagacttcctttgtgttcagcctatacttttccatatggtataccttgaaaaaaattagcacaccatggttatttttctaccttttataaaagacagagcctgtttactcatttagaagatagagaaaattggtctaaaattgaacatcctagattcacactcccaagtcacttaaggtgatttgatggtgaggaaaatgattgacaaagcccaacaatgatctcaggaattacattttccaacagaccaaaaaatgttttcatgtagcagcaatgcagatttggtgaatatttaatatatattttagtatgtatttcactttatgactgacaattaaaaaatattgtttggccaaatagtaaacacccttttgaaacca

SEQ ID NO: 48676 - DNA, 2641 bp, Homo sapiens
atcgcggagtttcaccgcggacctgtcagagatacagaggttgtgggggcgggagacagaaagagagagagatccagagaccgagtcttacgttgacactgtttaactgctgaagagatcttttcccttcatggcttttcaaatgctacccaaataaccagctccaaattctctgtcatctgtccagcagtcttacagcaattgaactttcacccatgtgaggatcggcccaagcacaaaacaagaccaagtcattcagaagtttggggatatggattcctgtcagtgacgattattaatctggcatctctcctcggattgattttgactccactgataaagaaatcttatttcccaaagattttgaccttttttgtggggctggctattgggactcttttttcaaatgcaattttccaacttattccagaggcatttggatttgatcccaaagtcgacagttatgttgagaaggcagttgctgtgtttggtggattttacctacttttcttttttgaaagaatgctaaagatgttattaaagacatatggtcagaatggtcatacccactttggaaatgataactttggtcctcaagaaaaaactcatcaacctaaagcattacctgccatcaatggtgtgacatgctatgcaaatcctgctgtcacagaagctaatggacatatccattttgataatgtcagtgtggtatctctacaggatggaaaaaaagagccaagttcatgtacctgtttgaaggggcccaaactgtcagaaatagggacgattgcctggatgataacgctctgcgatgccctccacaatttcatcgatggcctggcgattggggcttcctgcaccttgtctctccttcagggactcagtacttccatagcaatcctatgtgaggagtttccccacgagttaggagactttgtgatcctactcaatgcagggatgagcactcgacaagccttgctattcaacttcctttctgcatgttcctgctatgttgggctagcttttggcattttggtgggcaacaatttcgctccaaatattatatttgcacttgctggaggcatgttcctctatatttctctggcagatatgtttccagagatgaatgatatgctgagagaaaaggtaactggaagaaaaaccgatttcaccttcttcatgattcagaatgctggaatgttaactggattcacagccattctactcattaccttgtatgcaggagaaatcgaattggagtaatagaaaatggaagatggtgttgttaataaaggcatttaatagataaaaacatctccaaaaaggattttgaagctgatcctatttagttaaaaagataattttgctttcaaccgtaggtccagaaaactaattattggcatcagtctgtgaaatagtccattatttgttgttaaaaatgcttcaaaaggttttcagtgtcagtctgagatgcctggtatataggagcctttgggaaatacctatttttcagtattccatgcatattggatatcaccatgaagcaagagacatgcattctataatcatgtagacactcagactcaggggaaaatacaagttatatcctgaaagcctttaaaactctatggtaggatcaaagattcaaatggtttcagagaggttttatttcaattaatttgttctagtgctttcaagagcaagtacatcaaaatgtagaaggtaaaatgtatgcaacactaatataaattattccaagtctttaaggagccaaagaaaaaaaagatttctcacagctttttgttctgttttgtatttcaattaggaacttgcagtattattttgaaaaccattctaaaataataggagttaggaaataaataaagttttgctagccctgctaagttcaggcttagaggcttatcgctaagtgtaaacttcaccagattccacgaaaagctggatagctttttttctgacttatgttgtggttgcacccctcacaaatggcagaacagtatgtaaagctggtaacacctcggtttcagtgcaccatgtgtttgctttgtgaaggtgaagaatatgttggtttagagaaagaaattggatgtaattttatgcaatttacttttaaagacaaacataactatttagcagagaatattttaataaatgcaaaacaacagctggactgctgtacatcaaggacagattaactggaaaacatatgttccttatgtgtgattgagagccattcagaaaagacttcctttgtgttcagcctatacttttccatatggtataccttgaaaaaaattagcacaccatggttatttttctaccttttataaaagacagagcctgtttactcatttagaagatagagaaaattggtctaaaattgaacatcctagattcacactcccaagtcacttaaggtgatttgatggtgaggaaaatgattgacaaagcccaacaatgatctcaggaattacattttccaacagaccaaaaaatgttttcatgtagcagcaatgcagatttggtgaatatttaatatatattttagtatgtatttcactttatgactgacaattaaaaaatattgtttggccaaatagtaaacacccttttgaaacca

SEQ ID NO: 48677 - DNA, 1926 bp, Homo sapiens
atcgcggagtttcaccgcggacctgtcagagatacagaggttgtgggggcgggagacagaaagagagagagatccagagaccgagtcttacgttgacacgcagagagaaagacgcagagacagacaaacaaacagataggagaggctctccaggaggccggggggcccactccgcctatcgctcccctcggctacgctgccacttcaatgccccgcaggtcgcgagctgctgttctttcgaaggcgtcggagaaccaggggcgtcccgcgccacctctgactcggagcagcgccgagcactgacgctcccgcccttgggcaaggacgccagtgcgcccgcgcgcgtccctctgcgcggcagcccgtcgcgggccctcaaggggaagcccaggccaggatggccccgggtcgcgcggtggccgggctcctgttgctggcggccgccggcctcggaggagtggcggaggggccagggctagccttcagcgaggatgtgctgagcgtgttcggcgcgaatctgagcctgtcggcggcgcagctccagcacttgctggagcagatgggagccgcctcccgcgtgggcgtcccggagcctggccagctgcacttcaaccagtgtttaactgctgaagagatcttttcccttcatggcttttcaaatgctacccaaataaccagctccaaattctctgtcatctgtccagcagtcttacagcaattgaactttcacccatgtgaggatcggcccaagcacaaaacaagaccaagtcattcagaagtttggggatatggattcctgtcagtgacgattattaatctggcatctctcctcggattgattttgactccactgataaagaaatcttatttcccaaagattttgaccttttttgtggggctggctattgggactcttttttcaaatgcaattttccaacttattccagaggcatttggatttgatcccaaagtcgacagttatgttgagaaggcagttgctgtgtttggtggattttacctacttttcttttttgaaagaatgctaaagatgttattaaagacatatggtcagaatggtcatacccactttggaaatgataactttggtcctcaagaaaaaactcatcaacctaaagcattacctgccatcaatggtgtgacatgctatgcaaatcctgctgtcacagaagctaatggacatatccattttgataatgtcagtgtggtatctctacaggatggaaaaaaagagccaagttcatgtacctgtttgaaggggcccaaactgtcagaaatagggacgattgcctggatgataacgctctgcgatgccctccacaatttcatcgatggcctggcgattggggcttcctgcaccttgtctctccttcagggactcagtacttccatagcaatcctatgtgaggagtttccccacgagttaggagactttgtgatcctactcaatgcagggatgagcactcgacaagccttgctattcaacttcctttctgcatgttcctgctatgttgggctagcttttggcattttggtgggcaacaatttcgctccaaatattatatttgcacttgctggaggcatgttcctctatatttctctggcagatatgtttccagagatgaatgatatgctgagagaaaaggtaactggaagaaaaaccgatttcaccttcttcatgattcagaatgctggaatgttaactggattcacagccattctactcattaccttgtatgcaggagaaatcgaattggagtaatagaaaatggaagatggtgttgttaataaaggcatttaatagataaaattctccaaaggtttgaagtgatctaataagtaaagatcatttggttcaacggtggtcagaaaatattaggataggtggaaagcatattgggggaaggc

SEQ ID NO: 48678 - DNA, 388 bp, Homo sapiens
cgaagatgttagtggtaaacactgatgtggagaagtcttttatttctctttgtgttattgcaaacaattcctgttgactgaattgcaagattaaaagaaaaatcaaacacttcacagattccacctgaaggagagaaaatgcactgttgtgtaatactgtggttttcttggatgtctttagtgtcaacagtagctcagtcattcttacctcacttttactacctactaatcttaaatgtgaaaaaggagaaaagttccagcatcaatgtgcagcaggaaaaagaacaactgttgctccagtcattgttatacaacttactttctctccagagcccaaagattccaaaatagcaatacaaaagtgtgtttatagtcacccacaagtact

SEQ ID NO: 48679 - DNA, 437 bp, Homo sapiens
tgagcggattattagggggaatattatcattgctagtgtatcctttttatcccttaccttacttggggtatttcccatttttagtgtgaggctcaattccccttgctagaaatgtcttgcctatttttaaccctcaagataccccaaccagggaatacttcaccgccccacctcctccgtgtcttttcttaccttgatatgtcctgatcaaggaataccaccaccccctgtggcttctcttaccttggtctgtcccaaccaccaaggaaatactttgctggctcccaggcgtttccttcctcggtctgtgcacagagttgcctggtcactgtggtgtgtgaggatcctttcccctgggtcgccggctggtttctttcgacattgctgagtccaggtttatttgtcacaccaggtgagtctcgattcctgactcttga

SEQ ID NO: 48680 - DNA, 650 bp, Homo sapiens
tgagcggattattagggggaatattatcattgctagtgtatcctttttatcccttaccttacttggggtatttcccatttttagtgtgaggctcaattccccttgctagaaatgtcttgcctatttttaaccctcaagataccccaaccagggaatacttcaccgccccacctcctccgtgtcttttcttaccttgatatgtcctgatcaaggaataccaccaccccctgtggcttctcttaccttggtctgtcccaaccaccaaggaaatactttgctggctcccaggcgtttccttcctcggtctgtgcacagagttgcctggtcactgtggtgtgtgaggatcctttcccctgggtcgccggctggtttctttcgacattgctgagtccaggtttatttgtcacaccagtagttctggagcgaaagttcatgatgtgggtctccacacactgttctgtctgtccaagtgggagctgcaatctggtcctgcctgccgtctgccatgatgttcttgaaaaccaacaagtgcttcttaaatgctgacgtatcattttcccatgtctgagccaactcagcatgaacacaatgaggatgaaggcatttatgacgcccccacttcctcttaataaacagtttattaatattaa

SEQ ID NO: 48681 - DNA, 349 bp, Homo sapiens
ttctgttcaacatacacgtcctagctagtgcaacccagtgagtcacccacacgacccagcaatcctaccacctgtacaccccacggaactgaaagcagggagtcagagatctctgcattcgctttcatggcagcacggcacacaacacacagtgcaccgtacgcaacagccagaagaggaacacgtacgccagtatgtcgtggataagcaaactgcggcctgtccacacaacgggatgcttctcagccttcaaatggaataaaatcctgatacggacctgggtgaacattgaggaccttatgctaagtgaaataagcagtcactacagaacaagcaccgtatgactcca

SEQ ID NO: 48682 - DNA, 408 bp, Homo sapiens
cagatatggtggcctgtgactgtagtcccagctacttgggaggctgaggtgggatgatcgtctgagcctggggaggttgagactgcagtgagccatgatcaggccattgcactccagcctgggtgacagagtaagaccctgtcttaaaaaaaaaaagaaagaaagaaatattaattagaaacccatggttgaaacttacctgaatagaaggctttattttttttcataggtaagcctatgttttcttggatgtgaaactagggcactgggttgctcttaggtaatacaaggagatgaaatgcagcgatgcgatgatgagtgaagtagagcctgacctggtattgccattgcttcactgttggctttgaccagggtatgatctcttaatcttctctctgagctgattct

SEQ ID NO: 48683 - DNA, 319 bp, Homo sapiens
ggccactaagttaggtgtagtttgctacctggcaatagatgaccagagtggtgcatgccagtgactttacatatagccagggccatacatcccgatgttctggaaggatctggcacatgttggggacgctacctgatatgtgcagaggtacatttttgttgacactgagctgctcaaatattttcaccagcatgaaaggggattcaaaacagaagaatcctaattgtgtagccccaggggctctgggggtatgagggtatgaccccgggtttgcagttttgcctttaatccttaaaattcacttggattttgtattcta

SEQ ID NO: 48684 - DNA, 506 bp, Homo sapiens
ctggacatgatacatgcctgcccttcttgcttacatgtgaagtataaccaagtgccaaatgcttttataattgactaagcagccacacccaccctgctcagaaacagaaagctactgcaggcccctacaaagtgagtgagagtgtgtgagctcctgctgaagaggtgagacccagatcatagttcctacttgtttctctatgaagtggaaatacagaaaaagaagcaaatgtaagcataaattgtctatgttttaaaaacagttcagctcatgacttaaatttggtgtcaagctccttgctctagtatgtgtcctcagggtcaccttcatggcttaattttaagaagagagcaaaacagaattcagctttgatctgaatatgaatttagatagcagtgagcttggtgatgacatttctatatcattttctatatttcaaaggacagtgggaggatagaccttgcctttctgattaaagctgaatctaggccgggctcagtggctca

SEQ ID NO: 48685 - DNA, 108 bp, Homo sapiens
ttaagctcaacatcactactgatggaaaatcttggaaataattatttcagatcaggttttccaaccaggaacaggatttcatatttgagatataacatctaatgctag

SEQ ID NO: 48686 - DNA, 324 bp, Homo sapiens
aggaggaaaagttgtgttatacagttatgtgtacattaatgtttgtttaacatctgttatttgcttatgagttttcagcagtactcggttaatactcaactcacgtcttctggacttggaaaaggagtgattttccttcctgtaaaatgctggacttataactaaaatagtataagaataataaagtaagggaattacagtgtggtaatatgtataggttttgaaattagagacagtcgtgtttaaaattttcttgactgctatctaattgtattacctcaacaagttgcttaaacccacaatgttttctgggtaggaatcagt

SEQ ID NO: 48687 - DNA, 298 bp, Homo sapiens
ctattcttcctggtgctataagaaaaatttattggaaatgttgtttatatgtaggaagctggtatgtttctgattcttcaggtgacatttttctaattcttaaagttcttgaaaataccttatttatattatttttctgtttatacggaaaaactttctacataaaaattttggatatgaattttaattttggatatgaattttaactcagattctatttactttggttcacttcaacaaacatttattcagagccagaagctgttttagcagatacaaagataaacaaacacaaatg

SEQ ID NO: 48688 - DNA, 335 bp, Homo sapiens
taaaatgtaattgacaaaaattgtgtatattcaaggtgtacatgctatttttatatatggatatgttgtgaaatgatttccacatatcatattgtacttaacatagcacagtacctgatacatatttattgagtgaatgagagttttgactatgtaaataaagagactgagaatataaaataaaacattttacaactgtgaaaaggcaaggagaaaaacaggcaaactaatctctacccaacttaattttcatgttataaatcaaaaccctatcgtatcagatcaaggaaaggtgcttttctgtctcaactatttctcattctacctccatcact

SEQ ID NO: 48689 - DNA, 913 bp, Homo sapiens
gatgcctttcaggtgaaatcctggaacctgtctccaaacccccaagattatttaaagatcccaccactggactgtattcccggcccttggtcagtacttatttaccttcctacacgatgcctcttcccagcccgcccaccctcacacaccccttacctcccaatccccacagtctgcggctcgccttataccacccccccactctcctctctgtagaagcgggtacctttttgcgggacacttcgctggctgtgttgtttttgaggctttgggggctgagaagagcagatgaaaccctaaaatatttcatttaagagagtcttggcgaatgtgttttggccttggggtagcagatgaaggttatatttggcagttatattgaagcgattattgacccacagatggatctgggagagatgatcaggattgtattcgctcctgacgtacaaagcctgatgctttgacttctcagcagcccctaaccttccagcaatgggagataaagtgtgttctgtggctctcttctcttacactaaaaataatgattctcaggtgggttcagtcgtctttaataaaccagacagtcaagaaaagacaccatgccactttggaatctcaaaaacaagttcattatctccggctttgatatttgttcccagtggtggagcctgtgcagcggggtctttgttcacgggctaatgcttctcctaagcacctcgtgtgtgttcttcggcctcactgctctgtggcttaggtatctgtgctgtggggtttgagaaacatggtgaaggtgtatgaacagagcttgacatttgtggtgagataatgatttgcatgaataaggatgttcgtcgggccttattaagggccatgtttttggaatgtgtaacataatgttctctactgggtagta

SEQ ID NO: 48690 - DNA, 859 bp, Homo sapiens
gatgcctttcaggtgaaatcctggaacctgtctccaaacccccaagattatttaaagatcccaccactggactgtattcccggcccttggtcagtacttatttaccttcctacacgatgcctcttcccagcccgcccaccctcacacaccccttacctcccaatccccacagtctgcggctcgccttataccacccccccactctcctctctgtagaagcgggtacctttttgcgggacacttcgctggctgtgttgtttttgaggctttgggggctgagaagagcagatgaaaccctaaaatatttcatttaagagagtcttggcgaatgtgttttggccttggggtagcagatgaaggttatatttggcagttatattgaagcgattattgacccacagatggatctgggagagatgatcaggattgtattcgctcctgacgtacaaagcctgatgctttgacttctcagcagcccctaaccttccagcaatgggagataaagtgtgttctgtggctctcttctcttacactaaaaataatgattctcaggtgggttcagtcgtctttaataaaccagacagtcaagtgatatttgttcccagtggtggagcctgtgcagcggggtctttgttcacgggctaatgcttctcctaagcacctcgtgtgtgttcttcggcctcactgctctgtggcttaggtatctgtgctgtggggtttgagaaacatggtgaaggtgtatgaacagagcttgacatttgtggtgagataatgatttgcatgaataaggatgttcgtcgggccttattaagggccatgtttttggaatgtgtaacataatgttctctactgggtagta

SEQ ID NO: 48691 - DNA, 462 bp, Homo sapiens
gacccgtgtagcacccaccctgcctgcccagcatcagctgtgaagagacgggtgaacatccgtcagcctgggagagctctggcccagccaccaggtgtgtgcagagaaggcttgggcctactgcacagcctgtgtatccgctgagcagagcaaactggagatagctaagtcctcagctgtcctcaggtagagtctgctcctagacatcccccactaggaggaagctccacaatgccttttcagggtttcctgccagtgcctcatcatggatgtttcacagacttaatgagtaagctgactcttcaggctgcaaggcagcaccaggccctgggcagcagcctctggtcaagtcacagcccaaccctggggttcccgtcttagctgctgtcagatttcaaggccattgccctgctacaagtaagagcataaggaattgtgtccaccccttggcccaagaaacta

SEQ ID NO: 48692 - DNA, 1883 bp, Homo sapiens
ctggcacgaggcattatggcatagtgattaagatgagggaccctggaaccagcccgtgattttgggcaagttattttaggtccactttggactgcttcatctcttaaatgaagacagcaaccaccttcaggagtgtgaaggtgacaacacttaaaactgtgcctggcacattgtatttgctattgtcttaatgttctggaataatggtttccataacttgggaagaaaactttgagaacaggattggttacatcaagttgtatagtgaaaagataaagatctgttatttaaacttgcagtttaaaagtcattagaatcattcttttccgtaaggctttctttgcaagagatctgcattaaataaagttgctaggaaataactaaaattggggaaataatctaataatagcaagatgttaagcatactattattgtattttgggggttggtaataacattcacatggatttatcaatacacactgagaagcaaagcctctcaagctgtcccatatcctccatttcaaaggcacacatacattttaggtaactcataatttagaaaggttatttaatcttttccacatgtaaatatttgaatatgtacaaagacttgatttgactcttgtctgtttttgttttgttttgtttgtttgagacagaggctccgtcgcccaggctggagtaaaatggcatggtctcagctcactgcaagttccgcctcccgggttcacgccattctcctggctcagcctccggagtagttgggactacaggcactcgtcaccacacctggctaatgttttttgttttttgggtttttttgtatttttagtagagagagggtttcaccgtgttagccagggtggtctcgatctcctgacctcatgatccgcccaccccggcctcccaaaatgctgggattacaggtgtgagccactgcgcctggccgactcttgtctgtttgaatgcaaagttctcaatagtggtttttgtccataagtattaacttataattttggagagtgataggtatggttgctggttgattagcaataagattatgtagccttaaactagctagaagagtttgcatgggtgaggcaacaggctgttaacaaaaagaaactggaaatacagtttcccctgtttgtttctcctgtttgtacaatctgctttaaaaacaagtgaacatgcaccatgtcagtcatggtgaatcggccaacagccagcccttgccagttgacatcacagtctaagatgggaaactggtacagatagacatgaagagagcttagcagtggttgaggtggtgactaaatatacagtcattgaataaataccgtgtagcaaatgtaaaaaaaaaaaaaaaaagtaaagtacaacagaatacaaaagtgccatttaatattttatagctatttctatgcacaagtgctggttttaaatttatataaaagcaaagactgtttctgtgttttcttccagagtatttctgttacagccatagaagtaaagttaataaatgtaagactttttttgttttgttttgtgccataaatgtaagactccattttgtctgcaactgctaagtgccactttccttttattatgggtagggatgttgctaaggatacttaagtagttaagagcaagatgaaagaagttacagattattttctagttggctaatctgtgttgaatacattttttatgatgatttttattgacaccacaggacctcagcctgtatatattgataatgtaaccaaagctgctcaggaattggggtaatttttcagtcaactcagaagttaacaggaaatccttgttacacattcttaaattttagataagtgcaagaactattaacaaaataacatt

SEQ ID NO: 48693 - DNA, 963 bp, Homo sapiens
ctggcacgaggcattatggcatagtgattaagatgagggaccctggaaccagcccgtgattttgggcaagttattttaggtccactttggactgcttcatctcttaaatgaagacagcaaccaccttcaggagtgtgaaggtgacaacacttaaaactgtgcctggcacattgtatttgctattgtcttaatgttctggaataatggtttccataacttgggaagaaaactttgagaacaggattggttacatcaagttgtatagtgaaaagataaagatctgttatttaaacttgcagtttaaaagtcattagaatcattcttttccgtaaggctttctttgcaagagatctgcattaaataaagttgctaggaaataactaaaattggggaaataatctaataatagcaagatgttaagcatactattattgtattttgggggttggtaataacattcacatggatttatcaatacacactgagaagcaaagcctctcaagctgtcccatatcctccatttcaaaggcacacatacattttaggtaactcataatttagaaaggttatttaatcttttccacatgtaaatatttgaatatgtacaaagacttgatttgactcttgtctgtttttgttttgttttgtttgtttgagacagagcgaggctccgtctcaaaaaaaaaaaaaaaaaaaaaatattgttttagcgctgggtttcccaaggtgggagagacagacccagcctggagctggcccctggctgtgtgctgacttcttggggtcctcaaaccactgtatttttctgttgagcctgtacttggggagagatcagtagcatttgaggaagtaagagaaaagaatcatggtacctcagggtttctttccctttactcgctggcagccattgtctgtgggcacctcatgtttttccacactctactgggccgtggaggtaacgat

SEQ ID NO: 48694 - DNA, 781 bp, Homo sapiens
ctggcacgaggcattatggcatagtgattaagatgagggaccctggaaccagcccgtgattttgggcaagttattttaggtccactttggactgcttcatctcttaaatgaagacagcaaccaccttcaggagtgtgaaggtgacaacacttaaaactgtgcctggcacattgtatttgctattgtcttaatgttctggaataatggtttccataacttgggaagaaaactttgagaacaggattggttacatcaagttgtatagtgaaaagataaagatctgttatttaaacttgcagtttaaaagtcattagaatcattcttttccgtaaggctttctttgcaagagatctgcattaaataaagttgctaggaaataactaaaattggggaaataatctaataatagcaagatgttaagcatactattattgtattttgggggttggtaataacattcacatggatttatcaatacacactgagaagcaaagcctctcaagctgtcccatatcctccatttcaaaggcacacatacattttaggtaactcataatttagaaaggttatttaatcttttccacatgtaaatatttgaatatgtacaaagacttgatttgactcttgtctgtttttgttttgttttgtttgtttgagacagaggctccgtcgcccaggctggagtaaaatggcatgaacctgggaggcggagcttgcagtgagccaagattgcgccactgcactccagcctaggcgacaaagcgagactccgtctgggaaa

SEQ ID NO: 48695 - DNA, 371 bp, Homo sapiens
agcaaaacctcaaggagaacctggctaataagacctccaatctgactagaatccctccccaccccacctccttgtaaagaaccagcttctgtaatagtatcctacagaaccctcccaggtttgagcggacaggagagccggagagaagccctgatttggtcacatggtcctacctcagtaggaagcagctttgctcttttacaatttgttacaggcccgagcaggctcttggagcacagccttggggttgtcctgacagtcctggtgggctcagccaggggcagtacttcttgataatacctggaagggttattttaggtggactttcagagactacaaaaaggattaggtgaaaataacaacagctgtta

SEQ ID NO: 48696 - DNA, 408 bp, Homo sapiens
gaacttgtagtttgcatagtatccgacagatgtcaccgtatttaccttgaaaatttaaaatattttgcagcatccttgtgaatttgatgtgataccccaaggcacctgagcacacagtttgggaaccattgccttggaatattaatcatagttacctccagagagtgaaattttggataattaaaaaaatttcttttttcttgagatggagttttggtcttgttgcccaggctagagtgcaatggcgtgatctcggctcaccgcagactccgcctcccgctttcaagctattctcccgcctcatcctcccaagtagctgggattacaggcatgcaccaccacgcccggctaattttgtatttttagtagagacggggtttctccatgttggtcaggctggtctcgaat

SEQ ID NO: 48697 - DNA, 322 bp, Homo sapiens
caattacgtcatctggatagacccagaaacatgatactttttggttttctgtagccttggtgccattgttgatctttattaattatcattatcctcaaaatagccataatgtgctgagtctcttcctatttgctgggcagaggctgagtatttcagcgagctcactgagtccttaaaattgcattatgatagagagaaagagattattatttgcattttgcaaaatgaagaaattgaggtttagagatacccaagggccacgtgagtgtgagtgcctggaattggagcctaaatctagtcatctgatagcaaagcctgtttt

SEQ ID NO: 48698 - DNA, 553 bp, Homo sapiens
agaggatccccgctttataccatactgaagaaaaaaaagaaaagataactaagaaagataagttttttttttaaatagctggttttacaaatgggaagtggtttttgattgttttaatgtatatttctttgattactgttttattccagaagaggatttaaagctgctttatgggttgctaggaaatacaaacttactgaagttaagagagggagaggtgggatgtagtatgataacactaggaggagggaaaacccgggactatgaaacagggcaattgctaggtagaaaagggagtggagttgcgtgaacgttggtgtggggaaggggaggcattttaagtcgttagtgtgggaattactgttattcagccagcaatactaaccttaggtataaacatgcagtcttagggacaacacgcatatccagtaattatttggaaggctattcaccagaatgtttagtggctttcacttgtgaagatgtttgggctcatttttcctttcttttttattcctttaattattgagatttgagtattttataaagtaga

SEQ ID NO: 48699 - DNA, 831 bp, Homo sapiens
ggagaacaactaatactttgttacttttcttgtatgttttcctttttgtttggttgatttttctccctagcagaaacagcatgatgttaggatgaggattaagctgtagtgtctcgatttctttcttccttttgtaatattcttttattccactcttattttatacactaaaaatatgtaaggaacttaagagcatttacaaaattcttaaaatacagttttagtacatttaaacaattatttctttcatgtatccatcatggaaataatgcttattcattgaagataattttttaaatgtaaggaagaaaaaaaagaaaagataactaagaaagataagttttttttttaaatagctggttttacaaatgggaagtggtttttgattgttttaatgtatatttctttgattactgttttattccagaagaggatttaaagctgctttatgggttgctaggaaatacaaacttactgaagttaagagagggagaggtgggatgtagtatgataacactaggaggagggaaaacccgggactatgaaacagggcaattgctaggtagaaaagggagtggagttgcgtgaacgttggtgtggggaaggggaggcattttaagtcgttagtgtgggaattactgttattcagccagcaatactaaccttaggtataaacatgcagtcttagggacaacacgcatatccagtaattatttggaaggctattcaccagaatgtttagtggctttcacttgtgaagatgtttgggctcatttttcctttcttttttattcctttaattattgagatttgagtattttataaagtaga

SEQ ID NO: 48700 - DNA, 325 bp, Homo sapiens
attggtaattaactgcatttaataaagcaacttcctttatctcttaagttgctttactctcattagaacattagtagcagctcattagaacaattgttttctattgctgactggtaatttatcaaagaggagagattggtctttatgtggttatttacttttcctgattactttttgggaaattgtaattaaatcaatgagtggcaataaatgtaaaattacaccctcaagttatctatccttaacttttagcactcacttgaggagacacattttgcctttgagaattgttatttttttgagatagggtctcactctgtcaccc

SEQ ID NO: 48701 - DNA, 843 bp, Homo sapiens
acttaatatcactgttcaggaagaacttacataaacaggaacatctcactttcctaattcttgacccaaactcagccttagtgaagcctcttctcttcacctagggagaatgtggaatcattgtccagaaacccctgacccttcagctttccagcctcaggacaaggctcagctcctgcctgcctgttctgagagttccttgttagcatgtgctgaactctttgcaggcctgtcgtgcagtttgtgggattaatcttgacaaatagaattacttttgtattttgaaatctattaaattcaaatctgttttttaatattgctctcaggacagaattaatatgttgtgtgttagtaataataagttaattttttaaagcatgtggtcatttaaaatggaagatatatgatcactaattatatgttaagctggaggatggtgttttactaagttattttcattgtttaattatgggtgattaaaatgtattgtggaggtacatttttaaatatgtctttatatttttcatgaatgtagaaatcatctgagcagggtcagacttttaaaatgttatcataatggtttgccagctgaccttaggcaaatcagaatctctgtgaaagttattttcttcagttttcctctgttaagtaggacttcccaggcagttcctgttgaatttgggggtatggattttacttaaggaaagtcattgatcacagaaatgaaactgggatgatattttttcgagataataaagggagggggcttttgccttttaaatcaggagacagtggtagaaaatggagcaggaaggggcctgaagcaggtgcgttggtctcatg

SEQ ID NO: 48702 - DNA, 479 bp, Homo sapiens
aagaaacccaaatgagatgggtcgtaattgattagtggaagttaaatcatgttaaggataggaggcttgtcccctccatcatgatttagtatatcatccttcccaagagaagttttgagaacttgtcctctggtatccaggaaatggcctccccagcagtgtgcatagtcccagggaagccgtctcatgagcccctccttctcttgactcctctcctaatggtcacatggtgccaccactctttcaagccaagtcaaattgcatgcagcagaaaacccaaataagtttatgcagtagaggtttattctcacaccgaagtaattcagcattggtatggtggctccatggacttcaaggatcaaggatcctttcctctttctgttccaccatcctcagaacatggcttccagtttcaaagttaccttatggcccaatgtggctgttggagctccagccatcacatccaaattccagatagg

SEQ ID NO: 48703 - DNA, 244 bp, Homo sapiens
aaagggaatagttttctccccctgcaatgctcagagtgcacttgggaaaccataagcaggtgattatcattgaggctttaggaggtacgttagtttcctgtggctgctgtacaaagtgccacaaactgggtggcttaaaacaacagaaatgattcctccctagttctggaagctggaagtgaaatccacatgtcctgagtccatgttccctctgaagctcttgggggtgggggatcctttctct

SEQ ID NO: 48704 - DNA, 275 bp, Homo sapiens
cctggttttgtgaacccatctaaaataaaaggctttcctaaggcagaaggaaaaaaaaaaatcactagatttagggcatgttctgagaaagcactccctagaggcagtcatgagcaagacaagtgttttccaagtctgcttctcagtttgcccacatcagaatcccctgggatgctcatcacaaatgcagatttctgggctcagtcttacagaagtgtctggataggagcccaggattttacgtcacaacagggtccccaacttatgcacacaca

SEQ ID NO: 48705 - DNA, 290 bp, Homo sapiens
ccgtctctactaaaaatacaaaaaattagccaggcatggtggcaggcacctgtagtcccagctactcgggatgctgaggcaggagaatggcgtgaactcaggaggcggagcttgcagtgagccgagatcacgccactgcactcaagcctgggtgacacagcgagactccctctcaaaaataaataaataaataaataaaattaaaataagtaaaaggttgagaattaagaatgttgttttctcattaaaaaggaacaaacttactactgggtctacattttaataatcga

SEQ ID NO: 48706 - DNA, 262 bp, Homo sapiens
cctgcattcatttagatgcctgaaaaaagcaaaaagcctccttttggcagaaatggggagaacattttggaaatggaaactctttgcatgctccattgacctaggcttggcttctgccatgtttaccattggttcagttcagtccagtctcaagcatacttcagaattagcagttcttctctatctgtagtttattagtatgttatttccatatagttcaagatccagtgaggtagaaggtaaagaatggggcaaagaaaga

SEQ ID NO: 48707 - DNA, 406 bp, Homo sapiens
tctgtgcttggtagtttataccactgagtgaataactactgagtttttaagattatgaaaacacagcaattgcatattgccttgaggcggtagcactatctaaaaatttacagcactaggttcagctgaatgtttagtccaagacaaagttctgccttgttgaaattttctgttttgctttatctttaacattttccttcaccaaagtttttatctcctcggattacttttcccctgagaaagtgcataataccaaaagggaatagagtgtctactaaatcaagttaggtactgctggaatatttggtattttctttccctaattaaggaagcagtattaggagcattacctctggagtccaggttccctcagcctggacctgcacttcccagctgggtgattttg

SEQ ID NO: 48708 - DNA, 357 bp, Homo sapiens
gacaggttcagctggggctatccctaagaaaggctacctgactcctctccagcatattggtctcagggtagtctgtctttttacatggcagctcagcactccaagagcaactgcttcagaggacaagatagagtggtttggccttttatgatcaagtctcagaagttacctagtatcacttctgtcatgctgtatgggtcaaagtagccacaagcacacgtagatttaaggagaggatcccacctaccaatgagaggagtgtccgagaattgtggccattttgttcaactgccacagtcctctttcatggcaccttttgtttataatgccttaacacctcttgtaactgttccttcc

SEQ ID NO: 48709 - DNA, 260 bp, Homo sapiens
ttaacatattaagtaagcatagttgttttttactctatatccaatcattccaatatttaatgtctatgtagggttgattcagctgcttagtgtttctgatgattcttattcatagtacttcatttccttgtagcttttcgtgttcagtggtaaataatgtatggtatttctttgaattttaggacaaagtgaattcaccagagaatctgcatttgttttggtcagttgtccgaacgcactatccatcatagactacttta

SEQ ID NO: 48710 - DNA, 417 bp, Homo sapiens
agaataacggctgtgaaggagctaggaaggtagaaaaggcaagtcatatggggccttgtgcacagttctgaggagtcggacttggtcagatggggggttggggatcttaagcaggcaggaagtgatgagattagaaggggcacagtgggccgggcacggtggctcacgcctgtaatcccagcactttgggcggccgaggcgggtggatcaccgggggtcaggagttcgagaccagcctggccaacatggtgaaaccccgtctctactaaaaatacaaaaattagccgggcatggtggcaggcgcctgtaagctacttggtcggctggggcaagagaattggttgaacctgggaggcagagattgcagtgagccaagactgcaccactgcactccagactgggtgacagagcgagact

SEQ ID NO: 48711 - DNA, 379 bp, Homo sapiens
ttttagagacaaggtctcgctatgttgcaggtttcaccatgttgtccagggtggtcttgaactcctgcgttcaagcaatcctcctgcttcagcctcccaagtagttggatctacagggatggcatgcaccatcatacccagctctgaactattttttaagtaaaattttttttagatgaagacaagcttgtatacaagagtagttaagacagtgtggtactgactcaaggatgtactaatagacaaaggatagaaaacagacccacacacatacagtcatacagttacagcaaagatgccactgggatatagaggagaaaggatagtattgggatcagtggatattcatatggaaaaaattaactcctaccttatacca

SEQ ID NO: 48712 - DNA, 2613 bp, Homo sapiens
acttggtctggggctggccacatggagcccgggctggagcacgcactgcgcaggaccccttcctggagcagccttgggggttctgagcatcaagagatgagcttcctagagcaagaaaacagcagctcatggccatcaccagctgtgaccagcagctcagaaagaatccgtgggaaacggagggccaaagccttgagatggacaaggcagaagtcggtggaggaaggggagccaccaggtcagggggaaggtccccggtccaggccagctgctgagtccaccgggctggaggccacattccccaagaccacacccttggctcaagctgatcctgccggggtgggcactccaccaacagggtgggactgcctcccctctgactgtacagcctcagctgcaggctccagcacagatgatgtggagctggccacggagttcccagccacagaggcctgggagtgtgagctagaaggcctgctggaagagaggcctgccctgtgcctgtccccgcaggccccatttcccaagctgggctgggatgacgaactgcggaaacccggcgcccagatctacatgcgcttcatcgcaggagcacacctgctacgatgccatggcaactagctccaagctagtcatcttcgacaccatgctggagatcaagaaggccttctttgctctggtggccaacggtgtgcgggcagcccctctatgggacagcaagaagcagagctttgtggggatgctgaccatcactgacttcatcctggtgctgcatcgctactacaggtcccccctggtccagatctatgagattgaacaacataagattgagacctggagggagatctacctgcaaggctgcttcaagcctctggtctccatctctcctaatgatagcctgtttgaagctgtctacaccctcatcaagaaccggatccatcgcctgcctgttcttgacccggtgtcaggcaacgtactccacatcctcacacacaaacgcctgctcaagttcctgcacatctttggttccctgctgccccggccctccttcctctaccgcactatccaagatttgggcatcggcacattccgagacttggctgtggtgctggagacagcacccatcctgactgcactggacatctttgtggaccggcgtgtgtctgcactgcctgtggtcaacgaatgtggtcaggtcgtgggcctctattcccgctttgatgtgattcacctggctgcccagcaaacctacaaccacctggacatgagtgtgggagaagccctgaggaagaggacactatgtctggagggagtcctttcctgccagccccacgagagcttgggggaagtgatcgacaggattgctcgggagcaggtacacaggctggtgctagtggacgagacccagcatctcttgggcgtggtctccctctccgacatccttcaggcactggtgctcagccctgctggcatcgatgccctcggggcctgagaagatctgagtcctcaatcccaagccacctgcacacctggaagccaatgaagggaactggagaactcagccttcatcttcccccacccccatttgctggttcagctatgattcaggcttcttcagccctcccaaattgcccttgccctacctgtgctcccagaagccctcggcatgcccagtgcaccatgggatgatgaaattaaggagaacagctgagtcaagcttggaggtccctgaaccagaggcactaggattaccccagggccatctgtgctccatgcccgcccatccccttgccgcctgactgggtcggatggcccccagtgggtttagtcagggcttctggattcctcggtttctgggctacctatggcttcagccttcagctcctgggagtcccagctgttgttcccagcaacgtcgccactgccctcctactctccaggctttgtcatttcaaggctgctgaaatgctgcatttcaggggccaccatggagcagccgttatttatagaactgcctgttggaggtggggagtcctccctccattcttgtccagaaaactccttagctctcgcagtgagccatgttcttagtctccagggatggatggccttgtatatggacccctgagaatgagcaattgagaaaacaaaacaaaaggaacaatccatgaacttagattttattggtttcactcaaaatgctgcagtcatttgacctgaacttgtggcaagagacttgtgctttctaaattcaaagactagaaggaaaatggataaaaatcacaagtgccgtttctcttgcaatgtagcgctattctactgaaatttctttcttctcttttctttacaaaatcataaagaaaaaattaattcattacttatatagtaggtacaactcagcctacaaactctaatctgcaagaagcataactttatttttctaacacagaatgtaatttctattaggaaccccgtttcagcaggtggtagaaattaatctcagtcaattcaaagtctccccctgaccttttcctggggttaagctcggtcgggtgggggtgtggctttaagtcatgtaagactctgttcctcggctatcatcatccgtccatg

SEQ ID NO: 48713 - DNA, 455 bp, Homo sapiens
tgaatatggaaaagagttagacgaacgatgccgacgagtttctgaagctccttccctccctgttgtgttcattgatggccattaccttgggggtgctgagaaaattttgtcaatgaatgaatcaggagaactgcaagacatcctaaccaaaattgagagagtacagcatccacatgagtgtccctcttgtggaggctttggctttcttccatgctccgtgtgccatgggagcaagatgtccatgtttcgaaactgcttcacagactctttcaaagccctgaagtgtacggcttgcaatgaaaatggtcttcagcgttgtaagaactgtgctggttaattggagcttctacccaggaaaaacctcattttattaatcaaaggcaatactttgatttatatatatatttttaaatggttatgtttatggattaatcaataaactttgtttattataa

SEQ ID NO: 48714 - DNA, 859 bp, Homo sapiens
tgaatatggaaaagagttagacgaacgatgccgacgagtttctgaagctccttccctccctgttgtgttcattgatggccattaccttgggggtgctgagaaaattttgtcaatgaatgaatcaggagaactgcaagacatcctaaccaaaattgagagagtacagcatccacatgagtgtccctcttgtggaggctttggctttcttccatgctccgtgtgccatgggagcaagatgtccatgtttcgaaactgcttcacagactctttcaaagccctgaagtgtacggcttgcaatgaaaatggtcttcagcgttgtaagaactgtgctggttaattggagcttctacccaggaaaaacctcattttattaatcaaaggcaatactttgatttatatatatatttttaaatggttatgtttatggattaatcaataaactttgtttattataaaatccccaatatatatttagctccttgattgcccccaccccccattctcctctctctcgatccccccgctctccctcccccctcccccccataccccccccacccccccctttcatctctcttcccatgttttcccccttccccccccatcgtttctttcttcctccctctctcccctccttcttctcaatctatcccccgtacctcactttctctcatataatcactctccctacatcacgcccccctcatcccttaccacccttcccaccctattcccttcccccacatccgcccccctctttctctcgccccccattcttccattcctccacccactcccccatactcatctcccccccagacgcacaccatccacttcccatctcgaatctcgtacacag

SEQ ID NO: 48715 - DNA, 412 bp, Homo sapiens
gaccccctggtttggtccagccttagagcgggtttgcaggtagacaccttcctaatgtttgttccacgtaagcccccggagcacagtatttccatcagctattttgtggaagtgagcgattctcttttggttgtaaaccttcactatttcatgtgggtgacttgacaatggctccatttttgaatggcccattgatagttgtagtctaaaaatttccagagattacacaagggtttatttaaagggaatgggaatagggagaaggtataacctttccaaaacaatctttaaggcaattataagctgttaggaaatgtcatgtaataataacacagatacccaagcttatatcacataaatcattcattttgcatgtttttgacagggagatttattttccaggttaaaaaca

SEQ ID NO: 48716 - DNA, 495 bp, Homo sapiens
ctgaggcggcgtgggaagcgggcgaccttatctctgctcagctggaaaaaggcccagggtaacaccggaagtgggcttatttgcgcatcagctactttcgcttctacttaaaaacggaggatctgggtaaaagaaccgaaaggctgtacgaacctaagacttgtctccgatgtccttctcaaccatcaatttcatatgcgagggaaaacacctgctgggttcacgcagaatataaaggtctttgaaataattcttgatctctaggccaaggagttttacattttaaaataatcaagcgtgcctactgcttgccaggccctgctctcgccttcactcgcattattcaattaatcgacacaggcctgtgcagtgcgtcttaatgacaaggactcctaccctccactgcctgtgttggaatcctggttctgccagttattagctgtgtatcctggcctaagttactctctgccacagtttctgactctgtaaaatagg

SEQ ID NO: 48717 - DNA, 2826 bp, Homo sapiens
gaatcttcctagttctagtggttggacaagtctttaactccatagcctagctccagctaggttcatgagctggccctactgctctctcctttccccttttcctcttatcccattgcattagtctggattcttgcttacagataaccaaaaccttagtcaatctgatttaagcaaaaaccagaattgataggctcacataactgaaattccagggtagaccctaaggccgggctggatgcagggactcagtcatctcactcgggctaggtctctctcaatgcctagtccctatttcatctgagttggcttccctctcaggtgggctttttctcatggagatcctcagcagcccatggaaggagagtctgtttttcccatcatcttgtacaagtccccaggttgagtctcattggcctgctggccccatgcccatccctgaacaatactgcaattggtcacctgcagtcacatgccctgtgactgcaggaaggtggggatgggctagttacccaaaggaaagtccaggtgctgtgcccagaagggagaatggatgtggggcagagcaaaccgtagatgtctaccttacccagccagacaagactgcatgtaagaaccaggcttacgggccagcccctctctgcaggcccacactgtacactcctgaaatgccattccttagtctggccaaccctcattcacccttccaatctcagcttatatagatggctccccatgctgcctaggaactaccccacattgcactcccatctctgcatgctccctggaggcagggaggaggttttgtccacctctatatccccagtctctggcccacatcagtgttttcagtaagtgttagtgtgttagtggcatcacttccaactgatatacctccttggtactacccttcccagacttaggaggccatctttggacaatggtgtatggtgggaaagtgctcagcaaggaggctctccttccatcctaggaccctgggccagttgtttcacctccggtcctcataccccagactgtgctgatacggttttccttcctaccccacaagataggatcaaatgagatgctgtgtggaaagccctctgacatacacagatatgaggggttgtttggattaggggtggaggcagcaggatgagcagaaaggaaactgcacagtgtccccaggaggccatggttaggttatctccaactatgagatacaggagacagaaagtatccaaccaggacaatgtgaccaaactaaagtgagaaaaatgtaggctttggggcagtgtaagtgggtatatcttctgtgaatagcaatttggcaaaatccattacatttcagagcaagcacattctttgacctgaaattccatgcccaggagtttatataagagagacagtgatgagcaaagatttatttgctgaagtgttacttaccatagcagaagattgaaaatgacccaaatgcacgtcctttggggataaataagttagagcatatctaaacaagaaaatattacgtaaaataaattggaggtctccacaaaaaaaaaaaaaaacccattttttttcagacaggatctcacaccgttgcccaggctggagggcagtgacgtgatcagagctcactgcagcttcaacaccccagggctcgagcagttgtcccacttcagcctcccaaatagctgggactacaggtctacaccaccactcccggctaattttttaatattttgtaatgacagggtctccatatgttgcccaggctggtctcgaactcctggcctcgagcagtcttcctgcctcgggctcccaacatgctggcattacaggtatgagccaccgcgcccagcccatctcacttctgaaaatgactcagtgccatgaacccttcatccctagtggcctttgggggtgggaggtcttcaaagtacagccgtctctttctacctaatgtgtgtctgcaacatcgaacttgttcatcataagtacgtattacttctgtaaccaggaaaagttacaagaagagggggccaggcacagtggctcatgcccgtaattctcacattttgggaggtcgaggcaggagtattgcttgagcccggaagttcgagaccagctttgggcaacacagtgagacctcatctctaaaaaaaagttcttttaattagctgggcatggtggtgtgctgcgtgcctgtggtcccagctacttggaaggctaaggtaggaggaggattcctttagcctggaggtcaaggctgcagtgagccatgttcatgacactgcactccagcctgggtgatagagtgagaacttgtctcaaaggaaagaaaaaaaaaataagaaaatgttgggttctcagcacttccagcccacccccatccatatacattccagcacattgttggggccatttgcaagctctgagatgagattctgcacaagtcagcagtgcagagactcccagggaaggcctgaggccgccaagagcaactctgcagggtctgctccaagaggcagaggtgggccccaccgtccttggcaaaatggagattggtctgagggttccatgaggcaggcttgcaggagcaagggagtgatagaaagccatgtgaggggacgagagggaggacaccctcccctgcagaagtcaggaaggtctttgagcttgttctgagaggaaaacccattctctgggtagaggaatgaagactcagaggagactggggttcgctttgtgtgatactgatatggttactgaaaggctagcccagtcccaggctacgtgaacagacttaaaaaaaaaaaaaaaaaaact

SEQ ID NO: 48718 - DNA, 416 bp, Homo sapiens
gcccctgctgttccactctgctgcccctctgccatcactctgctagtggagcttggggttttttatgggtacaagatgggaggcagggagagccaaaaagcagcatttgagtgggaaaacaggaatgcatgttctcactttgggccacagtacccaggcctaagggtgtggccctcaccagggactgtcctcttctacccgggatttccgtgtctcctgtttgtatcagtactatgcagttcttttctctttaaaataaccctttgatggggggaggggggagggatagcattaggagatatacctaatgctaaatgacgagttaatgggtgcagcaccccagcatggcacatgtatacatatgtaactaacctgcacattgtgcacatgtaccctaaaacttaaagtataataat

SEQ ID NO: 48719 - DNA, 848 bp, Homo sapiens
ctaccttgccccacaattggcagagttttgatggaattcctaccaaatcttttaccttgcctccttgctgttttctttagtatattaaaattctataacctttatgtttagtactttgtttgacttggtgaacttaatttgcatttatgccattatacctcctaatttttagtgaaattcaaaaagacctcaccaatcatactaacaaggtagagggaaaaatccatgattaattagcttaaaaaagttttaaattatagggatgttaaagattcttatttttaacttttaagctagagcaaaatatatttatttctaggatataatgatttagtgactagctaaaagtggttttaaatgaacgttttgcagtatgaatggaacttaggtattttttaaagcttcttggtaaatgaaacctttatttgaataactgcaaatttctccctcctataaggacagtggcagagggtggacatgatatatctggattctggtctttacctacaattttcatgcagagtttgtcatgaacagctgctgcattttttgtaatctaattttctttactgctttaagtgatccaagtgttactcccaaccactgaatgattgcaactaaaataaaatgaatggattaatattgaaaagggaatattaaattttgatcttaagcacacctgggtatcagagatgaggacaactcactattttaagtcttcttaggattagtagagtacccctgtttattgcaaaggaaagttgaaaaggatgttaatagcatgtcaatgggagaggtggggactatagtatagagaagtaaaaaagttatcttaaaggtagctttta

SEQ ID NO: 48720 - DNA, 365 bp, Homo sapiens
acacttcctctggtgtactgggcactgtgctgggtagtataggagttataaacaagaaatcaggctgggtgcagtggctcacacctgaaatctcagcactttaggaggctgaggcgggtggatcacttgagcccaggagtttgagaccagcttgggcaatagtatagtgagacctcgtctctactaaaaacaaaacaaaacaaaaacaacaacaacaaaattagccggacaagcgcctgtgatcccagctacttgggaggctgaggtgggaggatcgcttgagatggtcaaggctacggtgagttgtgatggcaccactgcactccagcctggatgtgagcaagaccctgtcttgaaaaaaaaaa

SEQ ID NO: 48721 - DNA, 395 bp, Homo sapiens
  misc_feature (1)..(1): n is a, c, g, or t
nccgagtggggcccccactcttccctttgccccggatgagtgttctctgacaccaggttccccgccccaccctctaaacaaacagaagcatcaccctccccacccttctcaaacccagaaggatctggtgcccaggtcacctcagctggagaaatccagaatccgcctacggagaacactgaggaaccttggtggaggcaggggtcagaggggacagtgacatttgagggccttgggggaaagttagcctatgctgagctgaggctctggctaggggcccagtattggctttgctatttcctggctgtgagagcttgagtgagtcttccaacctctttgaacttcaggttttcatctgtaaaatggggctgatcacagaatttgcttcatagggc

SEQ ID NO: 48722 - DNA, 383 bp, Homo sapiens
agaatttattacagcaaaagggtgtaaagcaaaatcaccaaagggaaaagactcatggggcagaagtccaaagtccaaagttaggcagtccagagttaggcagtgggtgccctggtgaccagcccccaataaaaaccctgggcactgagcttctaatgagcttccctggtaggcaacacttaacacttctcacaaaccatggctgcaggaattaagcatattccatgtgacttcactgggagaggactattggaagctttctccaagccagggagaaagccaggtactcactgcctagcatgtatcaaaatttctagattcccagaaggaaagcagatgttcaccataaatcacactgtacaacagtttaggcacaatgagcc

SEQ ID NO: 48723 - DNA, 314 bp, Homo sapiens
aaataatgggacttctgaggcaaggtcatgaaagcactccacctggggtctctctctctctctctcagcatgctccttggtagttctgagccggcatgtaagaagtcggccacagagaggtagagaagcccagggagtcccagctgtttgagtcttcccaccccaggcatcagacatataagtaagtaattcaaatgatttcatcccccagtttttaagctgtcccaggtgacaccaagtggtacagagacaagctgtccctgcaaagccctacagattcaataaatgtcatggtttaaaccactaagttttgg

SEQ ID NO: 48724 - DNA, 760 bp, Homo sapiens
taaatcagatttgtaaagtatgtaatcatgaactcctggatgatttgagtcagatatttattcctatttccatctaaagcaccaagcacagtacttgaaaagtcacatggatttatcaaatttcaataaatttaaattagaacatgtctttatcctttaaaaattgaaataatactgagaaatacctcccttgagagcctggtatgctaaaatcttgctactaaaagccagacttagcttaggtcactgataactagaaactcatgcagataatacaaattgtactttttgcttattttgatctattttttaaagtatgtatctaatgagcttcaaagcttaagttttgtttctttttgccctaatggaatgatgagtggcagagcagagaagttaaaaaggatgtttgaaagctataaaacaacaatttggatgagatagatgttgtatagccttgcaatattaactttgaattggtctgattagaacaaacctaggaacaaacatattccttttctcacctcttaaatttgcagctaaatctacaatattatgaccactgactaaagttgtctatggagaacctggttagcaaacattaaaaaaattacactattttttctcatcattattcagcagtaaacacagaaggcagtcttttaattatatttagctagactgacaatcttgagattaaagaccccctaaggagttctcatcattttccacctgaaagtagaattaaaagtaaatacttaca

SEQ ID NO: 48725 - DNA, 325 bp, Homo sapiens
tggggacgaacttctagccaaccttcctacactgccaggatatccccttagggacctctgccactcagaaagggcatgctctgatcatttactagagctgaggtgaacctggcgtaaagacgccacctagagctgaaaagaagacagtccatagcaataaagaacctttaagcaattgtagccaataaaaatcaaaacaagccagacagagaagactggaataaataattaatccttcaatgtaaagacatagacatacatccacaagaaacaacagcaaacaggaaaccaaggtctccccaaatggacaaaacaagaaaccagt

SEQ ID NO: 48726 - DNA, 303 bp, Homo sapiens
tgcaccaccacatccggctaatttatttttatttttagtagagacgaggtttcaatacattgcccaggcttgtatcgacatcccgggctcaagccatcctcccaccttggcttcccagagtgccttgattacagacatgagccactgtacccggcccctgcattatctcttttaatgtaggacatcctctccatctccatcaccttcatttctttttatttttattttttctagacagggtcttgctctgtcccccaggctgggatgaagtggcacaatctcagctcaccacaacctccacct

SEQ ID NO: 48727 - DNA, 476 bp, Homo sapiens
tgggggtaaaactttggaacgtgttcaaagcctagctgctctagtaatcctctctcctcttctggagtggaagatattggaagtctgagaataagcaaagcatgcagattatgaagctgaggggttataactatttcatttattgaaatatatttcaatgatattcaacttgctcagagagaatccgtgagctgtattttaaaaatcaatacaggctgggcacggtggctcacgcctgtaatcccagcactttgggaggccgaggtgggtggatcatgaggtaaggagttcaagaccagcctggccaagatggtgaaaccccgtctctactaaaaatacaaaaattagccaggcgtggtggcgagcgcctataatcccagctactcaggaggctgaagcagggaattgcttgaacccttgggcggaggttgcagtgagcttagattgcgccactgcactccagcctgggcgacaga

SEQ ID NO: 48728 - DNA, 261 bp, Homo sapiens
gtggaaaatcagatcagatataccttgaaaagctcactcagcagatagaaaataagaataaggggatggggaagggacaaaagggagtatgataaatatggagggctgacaaaaatacaacataagaaaaatgggttttctggaagaagagtaataaataaatgccaataaccaaagacataatatagcaaaagaaaacttcattccatcaaagaaagacctaactttgcagaacaaaatgtgctgttgtttaaccaagta

SEQ ID NO: 48729 - DNA, 384 bp, Homo sapiens
ggaaaataatggtttcttatatacctaaatcattaaagttcagaaaataaactgtgggtattctttttacagcggtctttgaatagatttatttactatcatcccttgatctcatttctactctttttacagttctaacattttataacttttgagttccactcgtggaataagatattctctttactgtaacaggttctttggagatttgatgggaataaaccagatgccttaggtctcaatactcggctgtacaggtggataccccagaatgaccttctaggtcatccaaaaaccagagcttttataactcatggtggagccaatggcatctacgagacaatctaccatgggatccctatggtgggcattccattgtttttt

SEQ ID NO: 48730 - DNA, 410 bp, Homo sapiens
gatacagcacagaagcatcctggctaattcccatttgttgtcctgccagcaaaagcaccatcgtttctaagcataagaagtgagagaaggcaatttgtgttgctttgtttatgcaggacaacccttaagccagttgtggcatgcaaaatacttaagagtgaatgcgtatttccacagtggttcagaaagtaaaagatggccatatacacccgatgattctaattccatattatgcttgtgaggcagtgcagagactttcagaaactttaggaagtgatcctaaactcttcacactctataaactgaagcctaccctaatgaagctccacaaaggacgttgatcttatgctcatttcaaattggccatgttttctaaactgtagtttttcctatcagctgtatatcagacc

SEQ ID NO: 48731 - DNA, 866 bp, Homo sapiens
ctcccaaagtgttgggactacaggcgtgagccactgcacctgacttaatcttagcattcttaatgaagacttacagtacataagccatgatttttttggtcaggcaatcaatagttacttattagtgtctactcaatgcaaagcacctttcttggcattctggagaaacaaagagagattataatttagggaaggagataaattaaaaggttaatttaaaaaatgataagtgcacagttgaagagatgtcacaagccaagaagactggcacaaatggtagtgctaaaggagttcttggtcatggtgccatgtgcctgtaatcccagttacttgagaggctgtgacaggagggttgcttgaaccaaggtgttcaagactagcctgagcaacatagcaagtcccgatctcaaaaaaaaaaaaaaaaagttataaaaaaagataggttcaaatcctagctagggaaaaaaagatagaagtcactagactggcatattctacaaaagcataattgctagactttcttatgcgtcctgcctttgtaactgctgttgcctctgcctgatctcctttccacctactctttcccacaaactaattcatgtgcttcaaaactactatttttttcgtatcatttctaatatggtgcttgatgcctagaacatgtagtcatctatgtaatgcccattcccaacaaacttccaagcttttgttaatgctggaataaattaatataaacctaaagtttatgaattagtataaacctaaatgtctgaaaataatagacatgtagtattgtattcttacctcaaaatatgttgaatcttgccaacattaaatcaacactggtgttcttgcctgttaattct

SEQ ID NO: 48732 - DNA, 830 bp, Homo sapiens
ggtgagagaggtttgttgttcaggaggagaacgaagaaggtgtgaagaccagcctctgtggatactcatcttcatggcaacttcactgcccccaatacagaattatttgctttttataacacctcagcctcctttaccacagccacaaaaatgtcagactcacatttcaatcttagatcactacttcctggcttttcggccctttctcactctatacaccacactccacttacttttcaactttaccaagacttctagtgcctgatccctgcacttctactctcaggacattcctggcgtcttttcctttctgtgcttaacctagaactctatggataatatcccaaatatcatcaaaccggcattatccatggcctcatgctctctaccttctacttctgctggggccagcctcaagggcatgagaccatacacccacatagcaccacatcctcagaaggtggccctcatcagtggcttatgattttctactcataatcttaaaattttgtataactgtctttgcatttgtattttgctggtgaagtccaatgggtcaatgaacatgtgtcaggggctgggaccctctgttcatgcatggacctacctgccaccacctgttcaccaccttgggataagtttttacctgtctgctccctcacctctactaaaaaaatcactgctgcccttcacctgcactgaatcctggagaaacacacaagatgatcgaggttgggcacctgcacttcaagtcatgagctatgggtgtctacaccaacctcaagagtaccctggagccacagggagcatctcagcaataaatggccaat

SEQ ID NO: 48733 - DNA, 861 bp, Homo sapiens
cacaatcgtggtagaaggcaaggaggagcaagtcacatcttacgtggatggtggtgggcaaaagagagagagcttgtgcaggggaactcctctttttaaaagtatcagatctcgtgagatttattcactattatgacaacagcagaagacagacctgcccccatgattcaattacctcccactgagtgcctccctcaacatgtgggaattacgagttatacttcaagatgatttgggtggggacacacagccaaaccatattagggagcaggaaaaagaaacaaaaacagcaactaataactcccaagaccacagcttcgctcctgtctagagctttgctacttagccacaggaacacgggtgatcatacctcaacagaagtctgccagcattcattacgaccagtgcttaatctcatctgacaatatcaatgtcaaaatcagagcttggagctggcggtgtttcagcagaggagtctttggagcttccacgaactggttcaataaacaatcttgctgtgaaacacagagcttggtatttagaagggttttagctggcatatccacaaagctgcagcatcctgtccactgctaattccactgtgaaatgttgaaatacagctcttagctccgagaaagcatgtaggcttctatttgcatgcaaatcattgccattcatgtgtgaactacagcaggtaacagctctgccagatggaataatttggggtaaggccatcctctttgttaaaggccacaggtatccatgcatgctgcagtgtagctcattcctactttccacgtcaccccctggggaataatcattttaatgatgggcctcaaggaaaggaaacgccattctacc

SEQ ID NO: 48734 - DNA, 311 bp, Homo sapiens
attgactctgtgacatcagatgtgctggagactgttagtgcctggagcgtaaaggttttatcacggggacacagtatggtgtattgggttcaaaccctggctctgcctgttactgacctgtcattctttggcgtaatactaacttattaatgcttagagtccttccatgcaaaataaggacaatgttagctatttcacaggtgacatgaaataacctaggaaataaaatcagatatatagggtgcctgataaatggtagcctctcaatcatttccgtttccccctttttgccttcacgttttgtcctgttt

SEQ ID NO: 48735 - DNA, 282 bp, Homo sapiens
ctttgactctgagatttatcttcaaatgctgatgcattctaagatttatagaagtacaaacttatcttattattgctaatttgtcccattactagactatgccccttagagttataattatgactagcccaattacattttattgtcgtgcccttttttggcaaaaaataaaatttctttgttaaactcaaggatttaaaatttagcacaagttcataaacttactttgatacttcttcatttcctttttaaaaatacatcagtagactcaaaatgtaaaag

SEQ ID NO: 48736 - DNA, 313 bp, Homo sapiens
ggtccccaccaagctgtccttggataggagggacgcggaggtggcaggcacttgtaatgagcagagagctcgcccaggcaaggccggccattgatcgcctggctcctgacttgtttcagcagcaagggaggagggagagggagtatgtgtgtccccaggagcagcatgcaagtgtccaggcatcagcgtgaccctgaagtagagatggcggggggtggcaagggggatggccagaggcccccaacccatctgtgctcagcacacatgagtgtgccaggtgagttccaggtacttggcattcgtgatctcctgt

SEQ ID NO: 48737 - DNA, 679 bp, Homo sapiens
agtgtggtttttaaaagtggtatctcttcagtaacttttgaggtaattgttggcatagtggtagttgctaaaactgtgataaaaagaagttaagagaaactgtgtgaaagtaagcctgtcacacatgtataaagaaggttagttccccaccacctcagggccagccccaccctaaggctctatccctgcattagagcctggatctgcctctgccacagagtcacactgcacacacatcattggattttcagatttctgtagtcatccagtcaaagcccaggacttcttccccaagccttgagtttacatggtatttagaaataggtgtaaggtttgctgctttcaggcacagtggggcttgtcgtttactcagcagctgggatccttctgttcagagtactgttttgcatgggattctcagagaagtagatttttctccccaaagcaaccaataggatgattaggtctattaactggtaactggcaaaatgaactccattgtcagagactggggacggctgtgattgcccaaccagcagaagaagcctcgattgtcattggtttataatgatgaaaggggaagagaaagagagtgtctgattgtttttttctaaaggaaacttagtggttcgatttgttgaatgttcttcagggatagccttagagaagcaacatgtgt

SEQ ID NO: 48738 - DNA, 601 bp, Homo sapiens
  misc_feature (17)..(17): n is a, c, g, or t
  misc_feature (34)..(34): n is a, c, g, or t
  misc_feature (40)..(41): n is a, c, g, or t
ttggatacttcctcccnggaaactggactccagntcttcnngcttgggactgggctggcttccttgcccctcagcctgcagacagtctattgtgggaccttgtgatcgtgtgagttaatacccgaataaatgcccctttctatatatctatcctgttagttctgtccctctagagaaccctgaccaatacagggtccgttccttaccccctacatctataaccctgctgcctcagttgatagggaagcagaaagagccgcttttttaatgtttaattttattaagtttgcagtttcccagtgcccaaactcatgttgatttcaaaaactgtccttttaaagcatgtgggcagggtgacaattcatagcaggtgacaaaaatgttttataaataatatccatggaaatggaagctgtcattgtctgcagaatgcagccaaaatattcagaagatttgtatcactctaagttctcgtgctagtaagaaataaaaaagcaaatgatgactgggcctctaagaaataaagtaaaattaggaagcaggagtatgaaaataatgacattgtgcagaaataaatacaaaaggaaagtagcagagaagc

SEQ ID NO: 48739 - DNA, 503 bp, Homo sapiens
  misc_feature (501)..(502): n is a, c, g, or t
ggtgtgtgtgaactcaaggctgggcatgaagataatattccttcagaggcagtgttcatagtcggaactccaccaatgcatggatacctccaaaaatttataccagaagaaggcagcttgggtgcagatgaaaagtccctttgactttcacacaaccggatgtggaggatggcaatatcctttatgtgcagacatcccccaaccaagaacaggactgtttttccctggatgtgatgaatggtttccaagttgtgagcagagtcgaaatcttggtggacaccacgcctaagtggatttttctgcaggtacagaatttcacagttcaagaaggtggctccagagaacttctagaagactacctcaaaattccaagtaaatattttgagggatttgactgtgaatttgttctacttattaaaccactgaaacacagttatgttaaaagttctaattttccaagaggaaagctaataaaatttattgggaaacaggtaaaaaaanna

SEQ ID NO: 48740 - DNA, 1039 bp, Homo sapiens
aactggagaaacagaaacctttacataatggacttcatctgttgagaaatgtatggatataatatttggttcatgacacactttcatcactggtccatgcttaggcttttatttaacttttgtatttatgtattcatatttaatattcaaaaaactgccatgaaccaaccacctaacacaactgactaatgtagtagctttaaaatttgactgccccactggatatcagacttgcatgggccagtagccacatgtgactatttaaatttaaattaataaaaattaagtaatattaaaaattcagttactcatgaacgccagccacatttcaaggactcaataatcacatgggactagtagctaccatactgtacaggaacagattacaggaacatttccatcactgcagaaagttctactgcggacgggtatggtggcttgcacctgtaaccagctgtttgggagccaaggccggtgaactgcttgagcctaggagttcaagaccagcctgggcaacatggagaaaccctgtctccacaaaaaatacaaaaattagctgggtatggtggtgcacacctgtagtcctaggctactcagggaggctgaggtgggaggatcacctgagcacaggggaggtctagcctgggcaacagagtgagacctgtctcaaggcaaaaaaaaaaaaaaagaaagaaagttcccattgggcaatacctagaaaatacctccttaggttatattcctagaactttttcctaatgaaccctaattggattaatcatgatctctgccttcatgaaacatcatcattggtttatgctgacactcttttatttgatttgatcatttctaaagaagttgcaatgagcaatcataaatccaatctgttactccactaatagaacactgacgtcatctttcatctctttgtgtgctccttggtcagagtaaatagcccagatttctatttatgggcaaacgtgtaaataaactatgttcatgtacaaaatgaaatacaaaacagctggtaaaggaagtg

SEQ ID NO: 48741 - DNA, 604 bp, Homo sapiens
ctatcagtctatttctacaccatggctatgagaaaaccaagaactgatcagagtggagttaatagtaatagaaagttccagggtagagtggtgagagtgcttatgacctataatgatagcatcatctccatcttcatctctctccctggtggacacacacaggcacgtgtgtccacacatgggtagacatttttatccctaactgtggtaagattgggcctatgataaagctgagtacagagacttaacgtcctatcctcaaaccaaaaagagtgaggagtgggagcacacaagcacattttcatatctaaataagaaaagtccaagttgagtctataaatgttataaacgggtaaggaaggtagagagtttatggatttagataatgtggaaactagaaggaatgggcacttctttctcaagcctgggaagactgtttgaagtaggattcttcaagttagttgccattgtgatttcctgtacaaaattattcatcacttaactgctgatgcttttctcttgaatgactggtcaggtttttaatgtaactttgagactagagcaaatctgacttgttctgcttgcttcctttccattcatttta

SEQ ID NO: 48742 - DNA, 258 bp, Homo sapiens
agagggagttgagtaagttggtctgtattgatgattacagttctaaaagttgattctgtggaaccggactgggaccactggagaatgcaggtctacagggcacacacaatgttcaatgagtgcctacccataacaggggtgtgagcagccttatttttgcttcacctttttaaactgattgttggatgatagtgctgctggtaaattttgcaacccatattccactgcttttcagacagttatttaaaaataaaataa

SEQ ID NO: 48743 - DNA, 338 bp, Homo sapiens
ataatgaacttccatgaatatatttacatatgttttaaccaccccccacctcataacagaaaaattcaggcaactaaactctagcaaaatggattgtttggcaccatgaagatcaatcacattatctataaggttggtgcaaaagtaattgcagtttttgcaattagaagtaatgacaaaaaaatgcaattacttttgtttcaaacctgatatcacccttcacaattttaaaattatctctttaattctgtgagaacagaaacttatactcatttgcgttttcactcctttttggtgcttaaacattcaatttttttctctcattgcgatatcagctc

SEQ ID NO: 48744 - DNA, 774 bp, Homo sapiens
cagaagcaagatggagtcaattatgtccaatttatcttactgtcataatttttcaaaggcagtttcaaggttactattctcatgattcaacacatcctcaaggagtgagattcagtctgtgtaagtgtatcatgactttctataacacgccttgtcatgcactcttctaccctgctagaattggagtctggcctcagctggttcctaccagcagtactgccatcacctcatcctcatctgccccatctgttgttttggaaccacttgtgtcctctgaaatgcatatgttgaagtcctaaccacctgtgcctcagaatgggactatgtttggagaaagggttttaaagaggtacttaaagttaaatgagatcattactgtgaaccctgatccaaattgacttatgcccttataagaaaaggaaatttggccacttacactcacagaggaagaaatcatttgaagacacagagagaagagggccgaggagagaggtctcagagaaaccaacccaatgacatttcgtcttggatttccagcccccagaattactggaaaatacatttttcttgtttaggccacccaatctgtactactttgttatggcaaccctagcaaactaatgcagtcaccaacccagggtgaaaatgggacattcccaactctagctcttaggccaagcttatttgtaatagattcttgttttcaaaggatatagatattgagattctcaatgtatttgttaaaatacattgtttcttgttaaaagcaaaaga

SEQ ID NO: 48745 - DNA, 388 bp, Homo sapiens
gggccctctgtgtctttagaagcagcttccaagggcaggaagacttccagagtgcaggactgagcgtgctgctaatcttgttctggtcgagagactgatgagagaggtctcagagaaaccaacccaatgacatttcgtcttggatttccagcccccagaattactggaaaatacatttttcttgtttaggccacccaatctgtactactttgttatggcaaccctagcaaactaatgcagtcaccaacccagggtgaaaatgggacattcccaactctagctcttaggccaagcttatttgtaatagattcttgttttcaaaggatatagatattgagattctcaatgtatttgttaaaatacattgtttcttgttaaaagcaaaaga

SEQ ID NO: 48746 - DNA, 349 bp, Homo sapiens
agcaccatcattttcccagtgtgtgtctccaaacacttggaatggtgtttgctttttagtttatgccctggaccgaaagccccacgccaaatttgtatcatgattagggacagcagagaattgtgccctccactagggtagccacagatggccatggtgcacttgaaatgtggctagtgtgactgaaaaactgaattttaattttattttaattttaaaagtgatgtttggctacacacggtggctcgcacctgtaatcccagcactttgggaggctgaggctgacagatgcttgagcccaggagtttgagaccaccctgggcaacaaagaaaaaactcatctctacaa

SEQ ID NO: 48747 - DNA, 391 bp, Homo sapiens
aaccgagaaagtagtgatggattgcctgatttttaccataaatatgacctgaaaataccttttgtccttatagagcagagggtcattaaaatgatcccgttctgtgtgtcaaatacatgaggtatacccactgagtcacatatgtaaatgttatcagctagaacagaacatggcatgagatgaggaccatgagagaggaatgagtagagaagcagattttacttccaagtggagggaagaaggcttcttggaggaggcggcatttgagtagggtgttgaaggatggtatccggacagaagagaatgaggctttccttgtacaatagcagaggtacacagctgataaagtacatgtgcttttcaagcccaaatacctttcaaaaaagaccat

SEQ ID NO: 48748 - DNA, 1313 bp, Homo sapiens
ggcgagtaaggggttgtgatgccccaccctgctgcaggaaccctgggccatggcggctgccagcagatggcaagggtgtgttgagggcctggagcccagagcggggccagctgctcaccccctttcccgggaagggcccaggtagggagcacatgggggctgccagcgctgggaagaggggccagaaaggcagctggcagcagactccagggtctgagtgggccaaccttgactaccccggcccagggctcacctacaagaccgccaaggactccttccgctgggccacaggggagcaccaggccttcaccagttttgcctttgggcagcctgacaaccacgggtttggcaactgcgtggagctgcaggcttcagctgccttcaactggaacgaccagcgctgcaaaacccgaaaccgttacatctgccagtttgcccaggagcacatctcccggtggggcccagggtcctgaggcctgaccacatggctccctcgcctgccctgggagcaccggctctgcttacctgtctgcccacctgtctggaacaagggccaggttaagatcacatgcctcatgtccaaagaggtctcagaccttgcacaatgccagaagttgggcagagagaggcagggaggccagtgagggccagggagtgagtgttagaagaagctggggcccttcgcctgcttttgattgggaagatgggcttcaattagatggcgaaggagaggacaccgccagtggtccaaaaaggctgctctcttccacctggcccagaccctgtggggcagcggagcttccctgtggcatgaaccccacagggtattaaattatgaatcagctgaacctgtgcatgctcatttcaaagggaaattcagatgatccaggatgaccctggagagaccagagggggcctgaggcttcactgcagcggcctccacccacctattccctttcctggtcaccttcatggtccaggacactctctggaagttctgggtctccccaagaagaggaagaccagactctgcctcagtgaggagctgttctcatggctggggcccaggcaggcagggtattaatagaagttgctctgaatgtctgggagacgacgcgtgtgtgttgcccccaccggcggagtgtcatcgcaccagggccaatggtagtcagagcctgtgcagtcccgctccctcacccagctcctcagacatcacccacaaggggttatcactatcccagtttacagcagaagaaatgaaggcagagagattgagtaacttgcataagatcatacagctgggagtcaaaccc

SEQ ID NO: 48749 - DNA, 1100 bp, Homo sapiens
acagtgacttcgagaccaggaacttctggatcgggctcacctacaagaccgccaaggactccttccgctgggccacaggggagcaccaggccttcaccagttttgcctttgggcagcctgacaaccacgggtttggcaactgcgtggagctgcaggcttcagctgccttcaactggaacgaccagcgctgcaaaacccgaaaccgttacatctgccagtttgcccaggagcacatctcccggtggggcccagggtcctgaggcctgaccacatggctccctcgcctgccctgggagcaccggctctgcttacctgtctgcccacctgtctggaacaagggccaggttaagatcacatgcctcatgtccaaagaggtctcagaccttgcacaatgccagaagttgggcagagagaggcagggaggccagtgagggccagggagtgagtgttagaagaagctggggcccttcgcctgcttttgattgggaagatgggcttcaattagatggcgaaggagaggacaccgccagtggtccaaaaaggctgctctcttccacctggcccagaccctgtggggcagcggagcttccctgtggcatgaaccccacagggtattaaattatgaatcagctgaacctgtgcatgctcatttcaaagggaaattcagatgatccaggatgaccctggagagaccagagggggcctgaggcttcactgcagcggcctccacccacctattccctttcctggtcaccttcatggtccaggacactctctggaagttctgggtctccccaagaagaggaagaccagactctgcctcagtgaggagctgttctcatggctggggcccaggcaggcagggtattaatagaagttgctctgaatgtctgggagacgacgcgtgtgtgttgcccccaccggcggagtgtcatcgcaccagggccaatggtagtcagagcctgtgcagtcccgctccctcacccagctcctcagacatcacccacaaggggttatcactatcccagtttacagcagaagaaatgaaggcagagagattgagtaacttgcataagatcatacagctgggagtcaaaccc

SEQ ID NO: 48750 - DNA, 1176 bp, Homo sapiens
atttgcaatataccatttttatgcatgtaaagttgtattctaacatatttactttttgctcatttgattaaatttattactgtgtatcccatcattaaggtaactaattttcagtaattaaactgttggtcttctgtttagccattattctcagttctgtgcaggagtgagctgaaacaaagttgtatagcccagagagtgagaagctgcatttcatgtctcccaacagtcagaaagggattatgtactgtttaaggaaggagtttggcgaatattttgaaacccttttgggaaagcatagaatattgaaaatccaaaattaaccaaatccgtgagtgtgcaagctcaaagctagagaccttaggaatatcttaggatgtgcaaaacaggaagaaaacaagaactgagcaggcagcactaagtaagtgtcatatagcctccccacccacccttccaaccctactcctaaaagagccataatttagtcccaagtatacttttctgatcttttcctgtgacatattatggtatcttcaaatggtactgggtttcctgaggcttgtgctgctgactgccaaccccatcctagagagcactgagcgacagatactgtaaacatcctacactctcagctgtggaaagtaagaaagctgggagaaggctgtttactctttctgccttggaagtcaactaaagagaaatggattttgaatatttctatgtcttagaattgatcctatcccgtgtttgtttctgaggtcaactgtaaaaggaaaaaaggtgaattgactaagtcatccaaagaaatgtaagataatctataatatcagttatatttgaactgtttcacttagtttaaaaagaaaaaaaagattaccaaatacccaagtgacaaaagttctggttaacttgtatgaggctacattttgtgggttgctgcagtctgatctgtaaaagcaacacattacctatacgttaagctaaacatttctcctttaacctgagagcattccacactgaagtctgcttttcttgaagcaaaaattctagtgtccttggacttgctattttatcagggatcaaaggcaccttggagccccatgctttaggaattgtaatggcaaacaataaggtctgctctttaaagctagaatatagttacacatttcaggaaaa

SEQ ID NO: 48751 - DNA, 373 bp, Homo sapiens
tccagccatttggaaacaaaaacagatgctattgttcttccttagagaacgtggccagtggagacggcacactggaaatcagagtgaatgttcttgaaagagggtcacgggtcaacaaggcccagccaaaggatgcagtagaaccattttccttagaaatctttgggagtgaagtaggcttcagccactcccatccctgcccttgcggctaccactaccccattagtttagacagggtcgggcggggaggggtgtggagaagaaatgagcttgcctgtggcccccaggctccctctgtcctagctcaggtctgggtgccattctttacactcgtgtgctcgctcacgcacacatcacacaccttgctggtcac

SEQ ID NO: 48752 - DNA, 1714 bp, Homo sapiens
actcgcagacgttactgccctcttgcgtgccccggccacccccgggcggcttgtagccggtgcgcggggtggctggggctacgtgcagagctgtcgcggagccggagcagcagcggtgaaggccctcggctcggccgagaccgccgtgcccactgctcgcctcggttgccgccgctttagccgcagccgctgctgccgccgccgggggagaggcagcctattgtctttctccgcggcgaaggtgaggagctgtctcggctcggcccgcgggggagccccgggagccgcacggtggcatttttcaactccgctggagccagtgcccaggaggaacaaagggtgtgctgccagcccctggctcacccagtggcctcgtcccagaagaagccagaggtagcggccccagccccagagagtgggggtgagtctgtgtttggggagacccaccgggccctgcagggggccatggagaagctgcagcgactttatggaaggagaaggtggacctgaaggagcgggtagagaaactagagcttcaattcatccacctctcaggacagacagacaccatagaaagtacatcagccagggggcagtgtcagagacgcagcactgggagaggaggacatcgtcaggctggcccaggaccaggaggagatgaaggcttttatcctagatcaccactggattgctgacagatagaggaggtgggaccctgactatcacccctaatctgcagtggatttggctctcggcactcccaggctgggagctggatacctgccctggcagcatggctcagactgcatgacagtcacagactcgcctctgctcctgtggtccagtggccggacaccccctgggatggctcaaaggagtcaggacttggaattggggacatcagggtagctgaaggaaatccacacacccagagcatctcggagttcagactctcagacctgaagtaggcgcccccgggactgggctaggagttggacggaatggaggatggaggacagcgagaagaaaggaagagaaatgcaaagtgtgggcagccgccaagagtgaaaatagagggaagtgtcatgcaagtgctggacagaaggcggcaggtgggacgagccccacagccccctcctcaaaaacgaccacctccaggactcagtgatccctggggggcaggctctgccagccctcggccacacgtggctccggcacccatggtcccagtgccttggatggagacggccagttctggcggccagatgtggtgctctggaatccagtcccatttccttcctggccacgcctgtccagcggcctctttggctgcattcagcccctacttacctggggaccccggctggggcacaagagcaccaggggggtagggcccaaagggatcaggggaagcctctggcctggagggtatggggcacacttccccaagggcggacccagcaggaggaagcccaggagctgggtcctgccgcccaggagctgggccctgccacccaggccgggctagggacatggcagggcctgggcatcctggcgctggacttgggcgacctgggaggcacagggaggggagagatgggcggccccgccccagcgcagtgccggccacacccatgcaccgaagctcctccctgccacaccccaaggcggttgccggagcttaagccccgcccccagcagcgagaacatccca

SEQ ID NO: 48753 - DNA, 1257 bp, Homo sapiens
actcgcagacgttactgccctcttgcgtgccccggccacccccgggcggcttgtagccggtgcgcggggtggctggggctacgtgcagagctgtcgcggagccggagcagcagcggtgaaggccctcggctcggccgagaccgccgtgcccactgctcgcctcggttgccgccgctttagccgcagccgctgctgccgccgccgggggagaggcagcctattgtctttctccgcggcgaaggtgaggagctgtctcggctcggcccgcgggggagccccgggagccgcacggagatggaggaggacatctggacagtgagcaggaggcgcctcggcccatgccgaacatcccaggggacctggagagccgggaggccatggtggcatttttcaactccgctggagccagtgcccaggaggaacaaagggtgtgctgccagcccctggctcacccagtggcctcgtcccagaagaagccagaggtagcggccccagccccagagagtgggggtgagtctgtgtttggggagacccaccgggccctgcagggggccatggagaagctgcagcgactttatggaaggagaaggtggacctgaaggagcgggtagagaaactagagcttcaattcatccacctctcaggacagacagacaccatagtgagcgagaggctagggcaccgctggggggagctgccaggccatccgaggggccccagcatctgagccatgtcctcctgcaggaaagtacatcagccagggggcagtgtcagagacgcagcactgggagaggaggacatcgtcaggctggcccaggaccaggaggagatgaaggtgaacctgcaggagctgcggggcaggtgttgcagcttgtgggcgaccacaaggaggggcatggcaaattttgaccattgcccagaaccctgctgatgagcccactctaggagccccagtagcccaggagcttgggtgtgctgacgagcagggtggcttttatcctagatcaccactggattgctgacagatagaggaggtgggaccctgactatcacccctaatctgcagtggatttggctctcggcactcccaggctgggagctggatacctgccctggcagcatggctcagactgcatgacaggtacggcgtgcccaggatgatgtgcccaggcctctggccgcctgagtccagccccccacacaaccccctccaagctcccagcccctacaccataaaccatgagctctgtgccctct

SEQ ID NO: 48754 - DNA, 1231 bp, Homo sapiens
actcgcagacgttactgccctcttgcgtgccccggccacccccgggcggcttgtagccggtgcgcggggtggctggggctacgtgcagagctgtcgcggagccggagcagcagcggtgaaggccctcggctcggccgagaccgccgtgcccactgctcgcctcggttgccgccgctttagccgcagccgctgctgccgccgccgggggagaggcagcctattgtctttctccgcggcgaaggtgaggagctgtctcggctcggcccgcgggggagccccgggagccgcacggagatggaggaggacatctggacagtgagcaggaggcgcctcggcccatgccgaacatcccaggggacctggagagccgggaggccatggtggcatttttcaactccgctggagccagtgcccaggaggaacaaagggtgtgctgccagcccctggctcacccagtggcctcgtcccagaagaagccagaggtagcggccccagccccagagagtgggggtgagtctgtgtttggggagacccaccgggccctgcagggggccatggagaagctgcagcgactttatggaaggagaaggtggacctgaaggagcgggtagagaaactagagcttcaattcatccacctctcaggacagacagacaccatagaaagtacatcagccagggggcagtgtcagagacgcagcactgggagaggaggacatcgtcaggctggcccaggaccaggaggagatgaaggcttttatcctagatcaccactggattgctgacagatagaggaggtgggaccctgactatcacccctaatctgcagtggatttggctctcggcactcccaggctgggagctggatacctgccctggcagcatggctcagactgcatgacagagaacgtggccagtggagacggcacactggaaatcagagtgaatgttcttgaaagagggtcacgggtcaacaaggcccagccaaaggatgcagtagaaccattttccttagaaatctttgggagtgaagtaggcttcagccactcccatccctgcccttgcggctaccactaccccattagtttagacagggtcgggcggggaggggtgtggagaagaaatgagcttgcctgtggcccccaggctccctctgtcctagctcaggtctgggtgccattctttacactcgtgtgctcgctcacgcacacatcacacaccttgctggtcac

SEQ ID NO: 48755 - DNA, 388 bp, Homo sapiens
aacaaagggtgtgctgccagcccctggctcacccagtggcctcgtcccagaagaagccagaggtagcggccccagccccagagagtgggggtgagtctgtgtttggggagacccaccgggccctgcagggggccatggagaagctgcaggtgagtaggtcctggcatgggccaacaaggggggcggtggggcaggacaaggcaggtgactcctgacatgtgaccccattattttggctccacagcgactttatggaaggagaaggtggacctgaaggagcgggtagagaaactagagcttcaattcatccacctctcaggacagacagacaccatagtgagcgagaggctagggcaccgctggggggagctgccaggccatccgaggg

SEQ ID NO: 48756 - DNA, 1803 bp, Homo sapiens
actcgcagacgttactgccctcttgcgtgccccggccacccccgggcggcttgtagccggtgcgcggggtggctggggctacgtgcagagctgtcgcggagccggagcagcagcggtgaaggccctcggctcggccgagaccgccgtgcccactgctcgcctcggttgccgccgctttagccgcagccgctgctgccgccgccgggggagaggcagcctattgtctttctccgcggcgaaggtgaggagctgtctcggctcggcccgcgggggagccccgggagccgcacggagatggaggaggacatctggacagtgagcaggaggcgcctcggcccatgccgaacatcccaggggacctggagagccgggaggccatggtggcatttttcaactccgctggagccagtgcccaggaggaacaaagggtgtgctgccagcccctggctcacccagtggcctcgtcccagaagaagccagaggtagcggccccagccccagagagtgggggtgagtctgtgtttggggagacccaccgggccctgcagggggccatggagaagctgcagcgactttatggaaggagaaggtggacctgaaggagcgggtagagaaactagagcttcaattcatccacctctcaggacagacagacaccatagaaagtacatcagccagggggcagtgtcagagacgcagcactgggagaggaggacatcgtcaggctggcccaggaccaggaggagatgaaggcttttatcctagatcaccactggattgctgacagatagaggaggtgggaccctgactatcacccctaatctgcagtggatttggctctcggcactcccaggctgggagctggatacctgccctggcagcatggctcagactgcatgacagtcacagactcgcctctgctcctgtggtccagtggccggacaccccctgggatggctcaaaggagtcaggacttggaattggggacatcagggtagctgaaggaaatccacacacccagagcatctcggagttcagactctcagacctgaagtaggcgcccccgggactgggctaggagttggacggaatggaggatggaggacagcgagaagaaaggaagagaaatgcaaagtgtgggcagccgccaagagtgaaaatagagggaagtgtcatgcaagtgctggacagaaggcggcaggtgggacgagccccacagccccctcctcaaaaacgaccacctccaggactcagtgatccctggggggcaggctctgccagccctcggccacacgtggctccggcacccatggtcccagtgccttggatggagacggccagttctggcggccagatgtggtgctctggaatccagtcccatttccttcctggccacgcctgtccagcggcctctttggctgcattcagcccctacttacctggggaccccggctggggcacaagagcaccaggggggtagggcccaaagggatcaggggaagcctctggcctggagggtatggggcacacttccccaagggcggacccagcaggaggaagcccaggagctgggtcctgccgcccaggagctgggccctgccacccaggccgggctagggacatggcagggcctgggcatcctggcgctggacttgggcgacctgggaggcacagggaggggagagatgggcggccccgccccagcgcagtgccggccacacccatgcaccgaagctcctccctgccacaccccaaggcggttgccggagcttaagccccgcccccagcagcgagaacatccca

SEQ ID NO: 48757 - DNA, 2041 bp, Homo sapiens
actcgcagacgttactgccctcttgcgtgccccggccacccccgggcggcttgtagccggtgcgcggggtggctggggctacgtgcagagctgtcgcggagccggagcagcagcggtgaaggccctcggctcggccgagaccgccgtgcccactgctcgcctcggttgccgccgctttagccgcagccgctgctgccgccgccgggggagaggcagcctattgtctttctccgcggcgaaggtgaggagctgtctcggctcggcccgcgggggagccccgggagccgcacggagatggaggaggacatctggacagtgagcaggaggcgcctcggcccatgccgaacatcccaggggacctggagagccgggaggccatggtggcatttttcaactccgctggagccagtgcccaggaggaacaaagggtgtgctgccagcccctggctcacccagtggcctcgtcccagaagaagccagaggtagcggccccagccccagagagtgggggtgagtctgtgtttggggagacccaccgggccctgcagggggccatggagaagctgcagcgactttatggaaggagaaggtggacctgaaggagcgggtagagaaactagagcttcaattcatccacctctcaggacagacagacaccatagtgagcgagaggctagggcaccgctggggggagctgccaggccatccgaggggccccagcatctgagccatgtcctcctgcaggaaagtacatcagccagggggcagtgtcagagacgcagcactgggagaggaggacatcgtcaggctggcccaggaccaggaggagatgaaggtgaacctgcaggagctgcggggcaggtgttgcagcttgtgggcgaccacaaggaggggcatggcaaattttgaccattgcccagaaccctgctgatgagcccactctaggagccccagtagcccaggagcttgggtgtgctgacgagcagggtggcttttatcctagatcaccactggattgctgacagatagaggaggtgggaccctgactatcacccctaatctgcagtggatttggctctcggcactcccaggctgggagctggatacctgccctggcagcatggctcagactgcatgacagtcacagactcgcctctgctcctgtggtccagtggccggacaccccctgggatggctcaaaggagtcaggacttggaattggggacatcagggtagctgaaggaaatccacacacccagagcatctcggagttcagactctcagacctgaagtaggcgcccccgggactgggctaggagttggacggaatggaggatggaggacagcgagaagaaaggaagagaaatgcaaagtgtgggcagccgccaagagtgaaaatagagggaagtgtcatgcaagtgctggacagaaggcggcaggtgggacgagccccacagccccctcctcaaaaacgaccacctccaggactcagtgatccctggggggcaggctctgccagccctcggccacacgtggctccggcacccatggtcccagtgccttggatggagacggccagttctggcggccagatgtggtgctctggaatccagtcccatttccttcctggccacgcctgtccagcggcctctttggctgcattcagcccctacttacctggggaccccggctggggcacaagagcaccaggggggtagggcccaaagggatcaggggaagcctctggcctggagggtatggggcacacttccccaagggcggacccagcaggaggaagcccaggagctgggtcctgccgcccaggagctgggccctgccacccaggccgggctagggacatggcagggcctgggcatcctggcgctggacttgggcgacctgggaggcacagggaggggagagatgggcggccccgccccagcgcagtgccggccacacccatgcaccgaagctcctccctgccacaccccaaggcggttgccggagcttaagccccgcccccagcagcgagaacatccca

SEQ ID NO: 48758 - DNA, 445 bp, Homo sapiens
aaggcaggggatcacttgaggccacgaatttgggaccagcgtgggcaacacagcagaaccctgtctttacaaaaaaaaaaataaataatttttttcccctttttggtagagacagggttttactgtgttttttcggggggaagaaaaactgatgtctggaactggcagggaacctgaagagtttatgtggtttaccattgtgtctgtgccttggactctttttagcaagtaaaatctaattgagtttaattgaatgtgttcccaaataaaaggcagagattttcagattgggcagagaaagtaaaaccaacatcaaaaaattaatcttcagtcccagcttactcgggaggctaaggtgggaggatcacttgagcccagaagttcaaggttacagtgagctataattgcaccactgcactgtagcttgggtgacagagcaagaccc

SEQ ID NO: 48759 - DNA, 356 bp, Homo sapiens
aaaggatggtctttgttatatcgtcacctaaaatggcattctacaattttgatttcagacgaaattgactgtttatttggaacataatttcattctgaataacttactttgggtatgcatgcagtatttcctgatgtaaagttaaatgcctcatggaccaataaattatttgtgatgaagttttaaagtcagtatatcctctcctaaatatactcccagaaataattttcttattaataattactataatggaaatctaacaatatgaacccagaaaactgttataaaactgatttttgtaaatgttgaagtgtagttgtgtaatttttctttctacttccaattaacttgtataa

SEQ ID NO: 48760 - DNA, 356 bp, Homo sapiens
atattctttaaatttggactgaatacaacacttcacatacaaatgtgggagaagagggtaacaaatttcattaaaataatccagtcagttagtaaacaagcagataacaataacaagcccagttggtcaggggtggtagggggagagtgggctagtacccacattgttacaatatgttatctaaaatgtccaatttccagtaaattataagacatgcaaagaaacaggaaaatatggccaggtgtggaggctcacacctataatcccagcatttgggaggccaaggcgggcggatctcctggggttgggagttcacgaccagcctgaccaacatggagaaatcccgtctctactaa

SEQ ID NO: 48761 - DNA, 355 bp, Homo sapiens
  misc_feature (321)..(321): n is a, c, g, or t
atattctttaaatttggactgaatacaacacttcacatacaaatgtgggagaagagggtaacaaatttcattaaaataatccagtcagttagtaaacaagcagataacaataacaagcccagttggtcaggggtggtagggggagagtgggctagtacccacattgttacaatatgttatctaaaatgtccaatttccagtaaattataagacatgcaaagaaacaggaaaatatggccaggtgtggaggctcacacctataatcccagcatttagtagagacgggatttctccatgttggtcaggctggtcgtgaactcncaaccccaggagatccgcccgccttggcctccca

SEQ ID NO: 48762 - DNA, 314 bp, Homo sapiens
agttacctgggcgtggtggcgggcacctgtaatcccagctacttaggaggctcaagcaggagaatcgcttgaacccgggaggcggaggttgcagagagctgagagtcacgccattgcactccagcctgggcaacaagagtgaaactcagtctcaaaacaacaacaacaaaaaacattatcagtaaaggtaaatctataagggaaagatggacttgacaatataagaattaaaattttatataatgtgtctggttcatcagagattgttatcacaggtttggtgaaatcctttggaacatcaacgtgtaggtttg

SEQ ID NO: 48763 - DNA, 871 bp, Homo sapiens
tatcagctcgtaccttcccacagcaagactggcagtcggcactactcatttgcatagggtgaaccaatgggaaacctctagattgtatctaaaccccagaaaattctgtcaccaatgctcttgagccacttgctggagcttgctcccactctgtggactgtactttcctttaaaataaatctctgcttttggtggatcaagaggacaagagttcgaaaccagcctggccaacatggtgaaaccccatctctactaaaaatacaaaaactttagcctggtggcgggtgcctgtaatcccagctacttgggaggctgaggcaggagaatcgcttgaacccaggaggcggaggttgcagtgagttgagattgctccattgcactccagcctggatgacaagagcgagactccatctcaaaaaaaaaagaaaatcatatctttattttggacagccatgtcccaattaaaattgggagttctgttgctgaggaagaagggaaggatggatattgggagatgactagcagctcgtgccgctgagtagtcaagagttggcagtactgggattcagaaatatcagaagagccaaaagggtcattttatggagggaaggagtagatcagcggtgtcacatacaacttaaaggagaaggaggatgaataaagcaaaacatgagaatctcagtagagcgatgaggaaggaagccaaactgctggatagatgacctcagtagacagagcaggaatggatcacccattcgatgagtttgacagagaaaggagagaaacaggacagttgttagaagagggcaaaaggatcactcgagggatttttgcaagattgtaaacttgtgttttaagacatttcttactg

SEQ ID NO: 48764 - DNA, 594 bp, Homo sapiens
caaaatagtcaggaaagttatgaagtaacatcatataatactttatccccaacaatattaaatgtgattacaattttacagaatattcaaatcaaaatgttatataagacaaattattattcttgcttttacatctccttagaaggagaaacattcaattgttttaaaaatgttctatttatttttcagaaatgaggtgttgccttcttgcccaggctagtatgcagtggcacaatcatagctcactgcagccttgaattcttgggctcaagtgatcttcctgccccaagcctcccaagtagctgggaccacaggcacgtgccaccatgcctggctgatttttttttttttttaatgttttgtagagacaggatctcagtatgttgcgcaggctggtctttaattcctgggctcaagtgatcctcccatagatttgtctgtgttttctctaaataggttataaataccttgagggaggaatcacaaataactaaaagaaacttttgtagagactatcagagtattatttccttgtggacacagtaaatgtatgatgatgagaaatcataataaactacaacattttctccaacc

SEQ ID NO: 48765 - DNA, 453 bp, Homo sapiens
tttaagaactacctgaagaacttgttaaagcagtaggcctggggtaggaccgattaattttcattttttacagacccatagatgatgctgatgctgttggtttagaatcacacttggggaatcacttatctagacaagggcttctgatatttaatctgtacaaatccccctaatcttgttatattgaagatactgattccataggcctcaggtgggtgggagtatttgcatttcaaacaagctcaaaggtgatgcttatgctactctccgcagacccattgtgggaagcaaggatttagatgatccactattataagcccaagtcatattgcatggtttggtgatttcagaaaataataggttcaaataaggcttcgagtttatttcctgaccaaataagattgtatccttaccaacaagatcgctgtttcttgtgtacagtatgaatatata

SEQ ID NO: 48766 - DNA, 419 bp, Homo sapiens
aaggatactggagctgggctgatccaggacagcttcctggaggaggcgggatttaaactggtcaatgaggctccacgaaacccttctgggtgtgaggtacagagctcagcacgctgctggtccttaaaaaaagaaccacatgagggcaataatcacgagaggactgtggtgctatgtgaagaagaaatgaaactcatccatgataatggagacgaaaatcctagttcttaggacggcctcaaactttagaaaacctcacacggactcagggagaagagaggggctaggtgggtgtgcagagtcccccagtggcttgttttcattggaataataacatcttacatttcgatgtggtaatgtcgctgttaaaacgcacttctcattgttagaaataaaaatgactcaaagatgtgaaagct

SEQ ID NO: 48767 - DNA, 744 bp, Homo sapiens
atttttacgttcatcatatgattacatatttatttgcacattcctttttttatttgcaaattatggaagagacatgcttatcacaaaaatacagatacagaaatgtgactgaaaagggaaatcccccacaactttctcagtcccatatagagctttggtttttgcataaagcatgtatagctttaaccctatttataacgtggttttcacttcaccttgaagacctttgcaagtattaatctcatttagagattatccatagtgtaacttaccataatttatttaactgttttcctatgggtatacatttaggatttcctgttttcctatattccatataatgagctatgaaagagtgtgagaggtggggagggtggaaaaatttgtgaacgtatggaagtatttctgcaggttggattcctagatgtggaatgactgagcagggtgtgagcatttacagttaaagataaaccaggccaggcatggtggctcacacctgtaatcccagcactttgggaggctgaggcaggagaatctcttgagcccaggagttcgagaccagcctgggcaaggtagcaaaaccttgtctctacacaaaatagaaaaattagctggacatagtggcatgtgcctgtaatctcagctactcaggaggctgaagtgggaggatcgcttgagcccaggaggtagaggctgcagtgagccgagatcacatgactgcactccagcctgggtgacagagca

SEQ ID NO: 48768 - DNA, 344 bp, Homo sapiens
ttttgtagggacgaggtcttgctatgttgcccaggctggtctcaaacacctggcttcaagcgatcctcagcttcccaaactgcttggattatagacataagccactgcacccagcctgtatttacattatacggctaatacatgaatacattttcactgtaaacaaatcaatcaatagaggaacacacagagcacaatttaaaagccccccttctttcttcaccatttttgtttgtttgtttttgagacacagtcttgctttgttgcccaggctgtagtgtagtggcataaacacagcttactacagcctcgacctcttggactcaagtgatcctcccacgtag

SEQ ID NO: 48769 - DNA, 434 bp, Homo sapiens
aagaataatttttaaatacaggaacatatcataaagtaaccatcatttacatgtgatttcccttttctgtatctcctaaatttaacacaatgaatgggtgttacttttataatcagggaaagtatcctcagagttttttgcttgttttaataataagatcaaataaaatactatgattgtcagccaatcacactgtctcttccttttagtttgacaagctgaccaatgtatttcgtaggactgccatttctcacacaacagaggaacataggtggagctacagaaaatacgaaaattaggaagacttaagaggagggaaagaactgataacacaagcagcaaattgcagaagttggcagaaattggaaaaagaaacagaagcagtgagtagcaaacaagacttctgttaaggaaaccaccctgagcagtcaccc

SEQ ID NO: 48770 - DNA, 204 bp, Homo sapiens
tttatggttttgaggacatgcatttaattttaaattttacaatttagattcagcatgaattgcaataaatggatcttcagcagagttactaatagaaaaatgagctttgccatcatcagaaacgtaaattttaatgcctgtgcaattgccattaattttatctccagaaatgacatcacagtatgtgccagcaggaagaccagt

SEQ ID NO: 48771 - DNA, 454 bp, Homo sapiens
actggggtggggaataaatgtcctgatacatgaattcggcacttctcaaactttaatgtgctcacaaatcacctagggatcttgttaaaatgtagattctaattcagtgagtccagggtgggcctgagattctgaatttctagcaagctctcaagtgatgctgctactgctgtccagggaccaaacatacttaggcaatcctcttctcttttagaatggtacaatcttatttaattacagagtacaagtttcaaaaatgagacattgaaactaaataaaatattctgcaacccctaagaaggaagtcagggcacaaaccagccaagcagggcaggatgatgagttgtttttccctatttggcatccatacagggcctgcacgctgtgatgaacttcccaaacacattgcttctctcatatttatctttccactcatgccagatgacagcataga

SEQ ID NO: 48772 - DNA, 522 bp, Homo sapiens
  misc_feature (10)..(10): n is a, c, g, or t
  misc_feature (35)..(35): n is a, c, g, or t
  misc_feature (39)..(39): n is a, c, g, or t
tggatttttngtagagtcggggtttcactgtgttngccnggatggtctcaacctcctgacctcgtgatctgcctgcctctgcctcccagagtgctgggattacaggtgtgagccaccgcgcccggcctggaactgcaatttctaactcatacatcattgctataaaccttatttgtttactgtttctcttccaaggacggtcagtcatcctttaaaattcatttgaagttatgaaaagatagtttttgttacatgggcaatttacttttagtacagtaaaatgttatgtgaatttctacagaatgtttgctagaatgaattatatctaggatatgcttaacaatatattctggaggcagctttcatttgaaattaggttcatcttctgagagtattaaaaagttaatgggtttttgtgcctgaagattttgatgttgcatttggctacatttaatccactttcacccataaggtttagcatctaaaaaaattaaatcactgctaatgcaattaaaaaaaaaa

SEQ ID NO: 48773 - DNA, 548 bp, Homo sapiens
tagaaggtgtgagttcaccatgtacctggaacatggggagccagaggatctggtgagcagctctgtcagtcaccatcatataccttgtgcctggcagagtaggggaggagcaaatttttgatgaagatggtgtcagcctgagcatccttccagaacagctcttgctcgggccccagtgacctgcatgttactccatctggtagacacttttcagtcctcattttccttaaccttgcttctcacactgcactgtccttcttaatacatgtttcttggttcaagcacacatcgtttaactgacttccttcctacctcttgcgttactactgcttccctggctcctttgcaacttttccccttttctacctggcctcgcattttggagattctcagggcgtggacctctttcctcagcagatctcatccactgccttgccttgaacgatccccttcacctagaagacttgacttgctttggagctccacgttcacgtgttttgctgtctacttgacatcttctcaagaatacctcaacattatctccaatt

SEQ ID NO: 48774 - DNA, 465 bp, Homo sapiens
ggcccgtatcctaatttaggtccttggtattttactatgctagcagcgaaaggaagcaagggtatatgaaccagtggaaagagagatctgcttttacatagatttatttgtgtttctcttttaaaccatgtgatctagttatatcttggaccacccacattacttctccttcccccatgaagggaagtgagtggagggagaccatgtattctagaacatgtagccaaaccctcgcctttcatttgtttgttttaattatttgtgtgctatattattagattgtaaattcattgtggattcattgtgattttaacaaatgcttatgtttccttcagtaactgctacagtatcttgcagttgacaaaaagtggaatgaataagtgaatatttattaccatcacatgacagacagccaatggcagctcaacagcggcgcctttgcatataagaaaagtgcacatatat

SEQ ID NO: 48775 - DNA, 736 bp, Homo sapiens
gatgtcccctagagcagtcaatctaagacagagaaaggtggaaccctcaatgtattttataatctagctccagaagtcatacaccatcatttccacagtattctgttggtaatacaggcggtcatgatttaatatgtaaagaagctacacaaggctatgcataacaggagcatgggccttgggagccatttggaggctggctacctcatgtactatctttaaaatatggacaaattaaataaaagaaagtctggatgaaatattaatgtgagattggtatgaagcaaggaagtgtagttaattatttgtataatgcttggatccattctgaaaaaatgcagtatcacttctatggaaaataagcttatagatctcagtaatattcaaggatcttgttcttagttttttttgatttgtgtctattggctttgttgttagtgattcaatgagtgaaacaataaacaaaggtatgaatgaatgaataaaaaagaaatgctaggcctagaccaatgatgagtattctggggtgtctgaatcaatgattttgattaaaccctgtaactctgaggtccattataagaggagacctagttaatacctatatggtaaatgatattatagtggaagttagaattatttgggattttgttcttaggtggttgaagttcataggtgtggattgtattactagaaaagatttagtaaatgaaaaatgaaacaaatatgtaaataaagg

SEQ ID NO: 48776 - DNA, 413 bp, Homo sapiens
  misc_feature (400)..(400): n is a, c, g, or t
  misc_feature (407)..(407): n is a, c, g, or t
gatgtcccctagagcagtcaatctaagacagagaaaggtggaaccctcaatgtattttataatctagctccagaagtcatacaccatcatttccacagtattctgttggtaatacaggcggtcatgatttaatatgtaaagaagctacacaaggctatgcataacaggagcatgggccttgggagccatttggaggctggctacctcatgtactatctttaaaatatggacaaattaaataaaagaaagtctggatgaaatattaatgtgagattggtatgaagcaaggaagtgtagttaattatttgtataatgcttggatccattctgaatcagatacttttggtagctatagactagaattcaggtcttgtctagttttgttggcatgcttgtgagntcatggnacatcg

SEQ ID NO: 48777 - DNA, 660 bp, Homo sapiens
aagacagagtctttccctgtcgcccaggctggagtgcagtggtgtgatcttggatcactgcagtctctgcctcccaggttcaagtgattcttcggcctcaagtagctgagactacagcacgcaccaccaggaccggtctaatttttttttttttttagtagagacgaggtttcaccatgttggccaagctggtctcaaactcctgacctcaagtgatccacccgcctcggcctcccaaagtgctgggattacaggcatgagccaccgtgcctggcccaaaatactattttaacgtatcaacacattaatattaaaatgttttgagtatttacagtcttttaatttatattaaatctttgaaattcaatgtatatttcacattaccacacatctagatttagtttaactacatttcaagtgctcagtagccacacgtgcctagcttattggacagtgcatttccagaaaagaacaactatcacagtaaccagattcgacacattttctggggtctgagtatcttgattgacattcttaagtctgctgtttgctgcgtccgtacgagtcaggatagtatactggttagctgggacgtttggaccagtgtgcatgggttcaaatcctgcctccactgcttaacacctttgtgctgaagtttcc

SEQ ID NO: 48778 - DNA, 408 bp, Homo sapiens
aaatagctctgaaactaagaagcaattatagcaagatttcaggatacaggctaatatacaaaagttgatcatttttctatatactagcaatgagcaaatagaatttgaaattaaaaatacaataccatttacattagcaccccccaaaattaaatagttaggtacaaatctaacaaaatgtgatacaagagctatatgaaaaaatctataaaagtgtgatgaaaaacatcaaagaactaaataaatggagatcttcatatggtaagggtaagagcaaaataaaaattataaaaataaataaataaatggatattgcatgttcatggttaagaagacttaaaattgttaagatatcagttcttcaaaatttgatctatagattcaatatagtccctatcgaaataccag

SEQ ID NO: 48779 - DNA, 460 bp, Homo sapiens
acagttgtcctaacaggcagttttgttttgccctttacagacactttaatgctgaaatgttctgtgccagggactcaggtttcccattttctttctctgtttttgtttttttaggtagttatttatgtgactgtcctcctaaccaaatggaccaatctgggcataaaccattttctcattttctctgcttatagaaaggaatgctttatttcagcagtgcagataacatcttgaggtctcaggaggatgacaaattgaaacagtttctttcttgcctaacatttcttacccaagagtcaagtgacgatggtggagaacaaatctctcttctcctgacaatttgcacttattttcttaatagctctgctaaaattcagtgaatttcattttgcttagagcctacttagtccctgccaacaggcacaggaagctttcattcatcagcacagtagtcctactg

SEQ ID NO: 48780 - DNA, 418 bp, Homo sapiens
gggatccaatgggagagaagcagggagtaaaactacacagagagaagcaaatctctagctgaactttgtaacaatttgaacagagtgagaagccttctgtccagaacttggggaagggcgcgaatctggtgtgcagactccacaggcaggggaagaaccaagcccttttctttcacaggttggggtcagacagcctgcagtagattttcaagcctgtattgctctctgcctagaaacagtctggggggtgttgaggggacatggtgggagtgagaccggcccttgggtttgctgggagctgggtgaggcctgtgactgccagctttcccccacctgtctgacaacctgcatgactcagcagaggcagcgataatcctcctaggtacacaactccagtgacctgagaatctcaccccca

SEQ ID NO: 48781 - DNA, 672 bp, Homo sapiens
tgacaataactatttcactagcaagggtagacgtaagcagaatacaggtagcatattcaaactgctgtggaaaaacaacatcaaacctagacttctctccccaaactatcattccaagtcagaaaaactattcatatagggatgggctattagcaagagtatatgaataacgtactataacaagaaaaaatgaattgagaagaaagtagtggttttaagaaggaaaggagaacaaataaattagtgaaacataaggttaagtctatacatattattttctaattgcctattatgtcagactacatgtagttagaaaatacgatgaaagaaaaaaaaaaaaaaaaaaaacctgtgtgttgggcgcggcgcccgggggcccctgagagaaaagctttttaaaacccattgcgttgggggcgcgccgcggggccccggttgagtgtcaggtgtgacccggggctccatgagcgcggttctcccagaggagaaaccgcgggcccaggaacaacagagcggtgggatttctcccccccaaattaaaagaaaggcccggggggcagaaccgagggttctggaaaccaattcccggagggggcgctgcggagggacaataccgggcctcatatcaagcagggggtccccaagcggagcaccgaatattaaaattagcca

SEQ ID NO: 48782 - DNA, 606 bp, Homo sapiens
tgacaataactatttcactagcaagggtagacgtaagcagaatacaggtagcatattcaaactgctgtggaaaaacaacatcaaacctagacttctctccccaaactatcattccaagtcagaaaaactattcatatagggatgggctattagcaagagtatatgaataacgtactataacaagaaaaaatgaattgagaagaaagtagtggttttaagaaggaaaggagaacaaataaattagtgaaacataaggttaagtctatacatattattttctaattgcctattatgtcagactacatgtagttagaaaatacgatgaaagaaaaagccatattataattccaacaaaaagataaaataattaagaataactgcaacaagaaaatataagttctgcaacaataaaactatacaatgaaactaaagaggcacaaaaaaggaactttaaacagattaaaaaggcaggaccacgtttttggggttaggagggtttaaaattataaatatatcaattttcactgttaatctataaattcagtgtaatcccaataaaaatgccaacaggttttccccaatagcattgaaatgattttaaaattt

SEQ ID NO: 48783 - DNA, 559 bp, Homo sapiens
gactaaaagagtttccagaatagtggcagaatatataggtcaagcataacacattacaatcaagattcagaacatcaaagattcttttttaatcctaaaagaaaaagtttggaaaatctacaaaaagaagtgtgaatttgacaataactatttcactagcaagggtagacgtaagcagaatacaggtagcatattcaaactgctgtggaaaaacaacatcaaacctagacttctctccccaaactatcattcagagtcgagggcaaaataaatagattttctgacttggaacaagtaggaataatgtacttatagtattcatcttcatacagggatggactataagtgatttttaaaaaacttcctacttgttccaagtcagaaaaactattcatatagggatgggctattagcaagagtatatgaataacgtactataacaagaaaaaatgaattgagaagaaagtagtggttttaagaaggaaaggagaacaaataaattagtgaaacataaggttaagtctatacatattattttctaattgcctattatgtcaga

SEQ ID NO: 48784 - DNA, 772 bp, Homo sapiens
tttcaatgcagctcttagttcccctgtaataggagctgaatgatgacaatttggctttgtgtgcattgtatcttactttctaacttgaataggacctgtagagcagtgagctccacttccctctgagaatcccacgcttctggagctcctggctgtaccagctctgggcatccccagggtttatgctcaccggtcagtgctggtgtgacatgatggctgagcaccggcactgtgtccagcgcattgctaggcactagacacgtgctctttcatttattcctcaaattgctttgtgctgtaaatgctacccagaaaggctcatgttcattactcaagtcacttcaccagaaagtgacagagccagaattcaaacccaggtctgccagattccaggtcccttgcttcttctgttgttgctcattgcaagggagtcttcttcaaggttattctcaggactttgattaagatacaggctcacagctgggcatggtgtctcatgctgtaatctcagcactttgggaggccaaggtgggtggatcacttgagctcagaagttcgagaccagcctggccaacatggtgaaaccctgtctctactaaaaatacaaaaattaaccaggcatggggacgggcatctatgatcccagctactctgaaggctgaggcaggagaatcacttgactccaggaggtggaggttgcagtgagccaagatcacaccactgcactgcactccagcctgggcaacagagtgagacttcatctcaaaaaaaa

SEQ ID NO: 48785 - DNA, 416 bp, Homo sapiens
tatgccatggtttatacaatttctggcacatttacctggtctctgttacaggtttgtgaaaccaatttttttattgtaaatagtacgttaccagcttaattgctttagaacctagacagtctatgtctgtgatagtaattacattctttcatgactttgtttggtaacctgaatgttgaactagctctacagatttaggtcatgtctgatgctagccattcctaggaaaaagtggtgaggactacattatgggcctttccccctagacttaaaactgtgaagaagtcattttgggttgaggtatcccctggtaccctctcctgaacttcaatagaataacatgatgtggtgaatgaaccatattagaaaaaccagccaatcagccaagattcttgtattgactcttctgatctccc

SEQ ID NO: 48786 - DNA, 420 bp, Homo sapiens
accaaggaagacttcaagagaaattagaagaaaatattttgaacacagtggaagtgaacacacatcaaaatttatgggatgcagctaaagcagtactttcagggaaatttagatcatatttatgagaaaagaatggttttgatctagtcatcttaagaatgaaaagaacagagtatactcaaaagcaagctcaaggaaggttcaagtggaaatcaatgaaataaacacaagaaagataacagagaaacatcattgaaacaaaaagttggctctttcaaaagtttaacaaaacttgataaactttgagttagactgaccatgaaaaaaaagatacaaatttccagaatcaggcataaaagaggggacattaacatcctaaagaaattttaaatattacaaaggattttttttttttttttg

SEQ ID NO: 48787 - DNA, 328 bp, Homo sapiens
gaaagtatatccttataatggagctctagtctttgtgatcaacctactttatgaccaagtaccagattttaacctgtacagtaactaagccagttttcattggcactttctcaattttagatattttgtcacattgttcacatacagttcacagtaagttcagttctatttgtggttttgaaaatgcaaaccccatgcttttagctagcttgatacaatttacaaagaagggcgaggataagagaaggaaggaggaaagaaagtagagaagcagagaaagaggaaggaaaagatggcggaagaaaaggagagaaaaaagaagacaaag

SEQ ID NO: 48788 - DNA, 450 bp, Homo sapiens
tgaaagtcccacccagtgggggactcttgccgccttgagagaagcacagctgatgtacggaaagcaatattgtaaacataacaaataaatacaaatcaaaaccacaagagaccatgtgatgcccatggctgaaataaaaaagacagacaataacaagtgtcgacaaggagacagagcaattggaaccttcattcactgctgatggcaacataaaaggtgcagctgctttggaaaaggatctggctgctcctcaaaaagttaaacacagagctaccacatgacgtactattccactccactcctaggtgcattcccaggagaaatggaaacataggttcacacagaaacttgcagacaagtattcatagcagcaatattcgtcctagccaaaatgtagaaatagtccaagtgtgcatcagctgatgcatcgcaccaacaaacatggttcat

SEQ ID NO: 48789 - DNA, 350 bp, Homo sapiens
gagtggatcaaatttagcacatagcctgagtgaaattcttatacagtagtacttaagaaaagatgaaagcacgcttctccatgctagagtttcaacaaggtggattccaaatggggtaaattgctctgtcttgaaagcggaatcagacaagagtcatctccatttgtccaataagtatcgcagtatctggcataaaatgcatgcttaataaatgtttggggaatacattaatggttgaatgtcatgtcttatttgatagtcttaaagcatttctgaagtcaggagagtattcactgattagaacagtggctgacattatagaaaaacctgatggtatcttagaaaaaaaa

SEQ ID NO: 48790 - DNA, 397 bp, Homo sapiens
ttttatttacacctttttaataaactacaacaactctaacaactgtttcttttaaatttattttttaattcacaggaaaaatgatatgtatttacatgcacaacatgatgttttgaagtctatgtacattgtgaaatgactaacactagctaattaacatatgcattacctcaaataattactgtttttgtggtaagaacactttacatccactcttagtatttttatgactacctcatattattaactatactcaccatgttgtacagtagatctcctgaacttattccttctaactgaaattttgtttcttttggtcaacatctccccagcccaacatctaaacaccccaggccctgataaccgccattctatggaggcttctcaagaaattaga

SEQ ID NO: 48791 - DNA, 518 bp, Homo sapiens
accagggagccttccctgaccccccaggctgggttgcgggccgtcatccctcccagcatatagcacagaggtgtcattgccttctctccaggctgagctaccccatgacagagcttctgtgcagcccagccttagggccaccctaagtgctaggtccctgggatgaatgagtgcagttccacagggccctgtgaccttctccagtcctgttcccacctccttatccaggaccttggccttgagcactccaatggtttaaactgactctaggaactttctgaattgtttaaggaaaaataactataacatgtcaagtttattagtcttaacattttctcattttgtcttaataattgtgttatcatttgctgttagctttttcatggtattagaattgcattctttcatgctcacaaaagctttgttgtggctatactatttatagtgattgctttgaacatctattatgtctctaattactcgttcacattttaaggccttattaatttagttttaat

SEQ ID NO: 48792 - DNA, 293 bp, Homo sapiens
aaaaccaagagagtgtcgtaacagagccaaggaacgaggatgttcggggcagagagtgcagctaagagtgtcgaatgccacttaaaagtcaagtagaaaaagaaatggaagatatgtgttggatttattcacaagggatcattggtgacctcaccaagaatagcttcattggagtaatgaggtggaagctacatattaccgtagagggatgaagagatgatgaggtagagatggcaagtggagataactcaaaatgtttgtctgtggaagagaatatgaacaacttcaggcca

SEQ ID NO: 48793 - DNA, 292 bp, Homo sapiens
attttgtcaataaggaaatgaaggcttggagcaaagtgcttaaaatcctagttattaaatatttgcaccattaaccagactccaggtcttcctagtccagcatcatgtcacaatattagaaacgaccccaggaaagagctccaggtaggtgtcctcttctgaatactggcccctcacccgggcctctgcggtggtgctgatcacactgtgtggcatttccctgaagacaatatatgctccttgagatatttatctgattcatttttaaggggaaacaatcaatgcattaaat

SEQ ID NO: 48794 - DNA, 290 bp, Homo sapiens
ttgcagcctcattattttcatttcagcatattgagaacatcctgccattgtccccaaatgcatttctttcatatccttttaactggttgtttgttttccataagactgattcatattcaatccgattgttgaacattttgattatgtccagttttttgcagttataaacaaaacctcacctaatgaacatccttatgcttcaatctttgcccatgtccctaaaagacatatcctaagggtcaattctgggattgctaggacaaaggacatacatatttctagggcttttg

SEQ ID NO: 48795 - DNA, 413 bp, Homo sapiens
ttaaaataacaaaattcttatttacttgtttttgaaacaacatttttcaaaccagcaagtgttttgtgttctttgttttgagatttcttctgcctaaaatagcacattattgggccaaactatcttctgtatttaaatgatgtcctatcttatcaatttggcagagaggaatgggtttccacatgggccctaatatacaaatacatgaacacatacatatacatatagtacttattattttattctgattttttctttagctacatatagtagtctgtataaaattccatttataaaaacttccttttagatttatttaccatatctagagccatagagggaattaattcctttttattgaattaatgttttgatttttactttttgcttataggttcaacgtgcatatgttt

SEQ ID NO: 48796 - DNA, 792 bp, Homo sapiens
gagttagtgggtgcagcacaccaacatggcacatgtatacatatgtaacaaaactgcacgttgtgcacatgtaccctagaacttaaagtataaatatatatatacatataaaaaatggggacagacccgggctccagctggtggacaggctttgaattctgcaggttgtcgcccattgctggtcatgtcaggaaaatcacctgtggctctcctgagcacttccggacctcagtgtctaacagatgaacaaaatgatctttgtctttctcaagggtgtcggcctcctcttagatcactgagcatttggagaggagggttattaaattaatgcatgagataagaaaatgtttcaactaggaattctgcatctctggaattgtattaaaccaattaatactccccaatcaattactctgtaatttactcaagtatattaaaagtattgtggcagtgtgcaataccagatttttaaaaacagtgtgtgcctctgtgggcagagctgcctgtcgtagaagggccagggcagcatgcagcgggggtgagggcttctgtctccagggttcctgggttcaaatcacagttcctccatatcctccagcctgactttgggccagttctctatccttcgggaacctctgtttctcagccctgtggggttattgtgcggataatacagatataaaatacccagcatatagtaggtgctcatggaattatttgtgtatgtggctcattttacaaatctaaaatgtgtgttttggaaataaaaaaaagagggaagaagtaaaagtg

SEQ ID NO: 48797 - DNA, 1510 bp, Homo sapiens
ctattctcctgcctcagcctcctgagtagctgggattacaggtgcctgccaccgtgcccggctaatttatgtatttttgatagagacaggatttcaccagtttgccaggctggtctagaacccttgacatcaggtgatccgcctgcctcagcctcccaaagtgctgggattacaggcataagtcaccgcgcccggccggattcatcttttaatcacatcttttgctatataaaataacatttacaggttcaagggattaagataagaatctctttgggggagggccatcattcagaccactacacattggttccctaacctctacccaaatagatttgagctaattcagaaaagaaaatgttatttttaaagaaacagaggcaagtgaaaaaaggctcagaaacctgggttcttgtcctgcctctgccattatctaatggtgtaaccatgggtgagccatttgccctctttagtccttagtttctttatcttatagggaaggagttggataagtgatcgttaacaagccttctagacctaagactttatgaagtgattcctaagtcatcttggagtttgtgttttaagtcaataatttaaaatgtgaatcaaaacattacaaattacaacattttgggtgagggtagtcctgttcttgcctaggacttgaaggatggaagactgagctgttggctgactgtcaactccttggggtattaacacaggataactaacctgtatttgttagctgtgtgcttaaacctttctgaagaaaagattttctacaagggatgtaatagactagctggaacattttcactacatttttagtgagactatagactgtgtagcctgaattttctttccagtagtagtagttcatcaaaattaaacactgacagatttttttctacctgaaactaggtcatagagtaaaaattttcacttgcagtcttactcttcagactcactgaatgcctgttccatcctgtttcattgctaggaaggacactagataaagccatgagcttgagatggtgtacttgaaaggaccgtttcaagatcaggttttataacacactcattatttatttcttctgtggagaggagaaaccaaattggattcaagtatttttctgatagtaatctatgtttcttagaataaagcaagttcatatctgagccagagggcataattatgtcagaataaaatataattatgtcggaataaaatgccctgtactaaagaggtcaactaacaggctgggaaatcttaagttttgtttttaagacaaatccttgaactctctgtgcctcgtttctcatccctaaatctgtgcaactcacctcacagggagttgtggagggtaatatactgctaatttgttcagtgtttcacaacaataaattatgcctaagatctgataaaacatagcaaacctcatttatgtaagtagagacaagcatggataagacttacagataataaagaaaattcattaaaattttt

SEQ ID NO: 48798 - DNA, 365 bp, Homo sapiens
tagtcttgtagttactacagccgagtttgtcattcctccatcactacctccatctttgtgtggccctactaaaaataccacttctgccagcagccttctttcataatcaaatctggaatcatatttcccccttgcatgggagatacaatgagcatcctgccctttcccccaggcacatcatctccaggaacatagttaggtttccagctgtgagcagttgcctgaggacattcctcttgcacctggtaccagggcagctcacaagtgccagaagttttcattcctcaggagtagcctttaaccaatggaggaagcaaactggaagataaatacctgagtgtccttgcccctcaggctaacgaagg

SEQ ID NO: 48799 - DNA, 1466 bp, Homo sapiens
agccaccatgtccagctcctttttgaattttttgtggagatggggtctccctgtgtttcccaggctgttctctaactcctgggctcaagtgatcctcctgtcttggcctccgagaatgttggaattaaagaccaccacaccctgcctaaagctagttttaaattatagcgtgtgtgtttgtatatatatattttttagagatggggtcttgctcatttgcccaggctggagtactgtggtacaatcatagctcgctgcagcgttgaactcctgggctctagcaaatctctctcctcagtccactgagtagctgggactacaggcatgtaccaccatgcctggttatatatttttaatatttaaaaaaatgccagtgtcagaaaaataagaacaatatcttgtttttggaattagaaatgtaatacatgcacaggttaaaaatttaaatagtgcaaaagagtacatagtgaaaaatagcctccttccctccctagttacctgatccctgtctcccagagacactctttctagcttatttggggtagccactgacaaatattctttgcctatactattattcatatgtttatatttctctatgtctaacacattaacacacatatatacacatatgcatgagtgcacacatggaagcctaatgtactctgaattttcttacctaatggcttatcttgtagtttgttccacattcgcacatagaaatctactttattctttctcgtggctgtgtaaatattccattatatgtttatattattagattctttataatggatattttagtggtttatagtcttgctattacaaatgttggcacaaagttatgttttaatgtactatgtatatttatttacatatatatttacacaattatgtgatatatacttaaggagcatatagagtcttcagtaatctggttcacagttgatacattaaaaaaaaacactgtgtggggtgtggcgactcatacctgtaatcctagtactttggaaggccgagacaggaagattacttgagctcagaagtttgagtccagcctgggcaatgtagtgagactctgtttctactaaaaataaaaaaaattagctaggcttggtggtgcacctgtagtcccagctactcaggaggctgatgtgagaggattgcttgaacccaggagacctaggaggtagaggatgcagtgagccgtgatcatgccactgccctccagcaagaccctgtctccacaaaaaagaaaaaagaaactcactgtatttatataccattggttgaaaataagatacttgaaatattcattcatatctgccccggtaaaatttttctccccaatggctcacatatctagaaatagttacataaatcgcgtctttggtaacttaataagttcatatttgtaagtagcctagtagtcgctagaaagtttcatttgggtatgtaataaaatt

SEQ ID NO: 48800 - DNA, 552 bp, Homo sapiens
ttttttttttttaaagctagtggttatggaaacacctgtcacttaggcatttgctaaccaacaacaaagtacagggtctcagacagcctggccctctgcaaggacattcactccctgccagttggccgtcagaggtagagaggaccactcaggggccgcacacctggtggagcacgtgcactctcacagagggggaacaatctgcacggagggcatgggcatcaaggccatgtgtgaagctggagcaaagtgggaggtgtgactagctggagacacaactgcagaaatgatcctgaaccgggaaggactgggaaagggtggaggccgggtgtggtggctcacgcctgtaattccagcactttgggaggcccaggtgggaagactgcttaaatcccggacttcatgagaccctgtatctacaaaaaataatttttctttttttttttttgagacagtcttgctctgttgcccaggctgcagtgagctgtgacggtgccatagcccttcggcccaggtgacagagtgagacattgtcttaaattaaaaaaaaaa

SEQ ID NO: 48801 - DNA, 542 bp, Homo sapiens
ttttttttttttaaagctagtggttatggaaacacctgtcacttaggcatttgctaaccaacaacaaagtacagggtctcagacagcctggccctctgcaaggacattcactccctgccagttggccgtcagaggtagagaggaccactcaggggccgcacacctggtggagcacgtgcactctcacagagggggaacaatctgcacggagggcatgggcatcaaggccatgtgtgaagctggagcaaagtgggaggtgtgactagctggagacacaactgcagaaatgatcctgaaccgggaaggactgggaaagggtggaggccgggtgtggtggctcacgcctgtaattccagcactttgggaggcccaggtgggaagactgcttaaatcccggacttcatgagaccctgtatctacaaaaaataatttttctttttttttttttgagacagcctgggcaacagtgttaagactctgtctcaaatataaataaataaataaataaataaaaataaagcgagatgttgccctcaaaaaaa

SEQ ID NO: 48802 - DNA, 400 bp, Homo sapiens
taggaaacactatgtactcccaaccaataatagcaagtcttggttaaaaaacaattactaagtacaaaaatttgtatcatttaaaactttagacaaatgataaggaagataccttagggaagttccccccccccatgagtatttagtttaatttatatataactttaagtaatcaaaataccctaaattccaggtgaatagttttctaccttctatcattttacatcattgatattctcagaatatatgcacaccaaactaagacatttcaaagtatgtctgtgtgttttgatccagggcattaaaatgtgtgtaggaaatggaaacaggtacataaatatcactgctgaaggtaaaaatatagacatatttacagattaacacttaaccgtggtatata

SEQ ID NO: 48803 - DNA, 383 bp, Homo sapiens
gaaaatcactagcaaagcagaccccaaactgaaataatgtaaatgtccccgcctacaaataatataaaccaaatatcaaacatgcactgtcaccttaaaaaacaaagatattttaaagaaacgtgaatttagtcttgtcaaatacattatattttaatgtattcatcattggcaaatatattttcagttcctatgatgtgccaggcactgtagttacctaataagaaatggtgatgtgatagacacagttcctgccttcaaagcacttacagttgactaacataaacaaataattatatgagcaattgtaaatagttaattaatggccataaactatgtgttgcaatgggagtcaccatcatgatagctatcatggattttag

SEQ ID NO: 48804 - DNA, 474 bp, Homo sapiens
taattgctgaatgaatcaagttttttaaaggagagatgtatatattttacctaaaaaaaagtgtttgttcatatcaggcagaaatggaactttcctatgtcatacccataaaagtgccgacctgatgtctttaagattggcagcttatattgacaatccatgtatgtcagttgaaggtgtcatggtttaaaattgcttcgccagtaacttgatttcacttttatagggtggttcttttacttatttggttgctacactagtactttaaaaattgatggtcagttgttgaggaggaaataaaatatttgatggccacaccatcttaaaaatactttaaaaaaattggaggctgggctcgatggcgcatacttgtaatcccagcgctttgggggaacaaggcaggaggatggcttgaggccaggaatttgagaagagcctggcacaacttcgtgagacccctgtctctacgattaa

SEQ ID NO: 48805 - DNA, 395 bp, Homo sapiens
gcaggtgcagccagctcctataagcaggagagcggcaggtgcagcatataggccacatcctccctcccatcataacaaggcacttcagcctctgctgggttgcaggccaatccttcatggggtgtagccaattggaggcctctctagggcaccgtggggtgttgccaggttccttgggcttgataaaaatcctaattaaggaggctcttgagccgcttgttcgagctcactctcactctgtgaattgtcttcaataagtctgttttccctactcttcttctgttgttttgtcttcccttgtttcgttcttttgttacttcgtgcattttgttcaattctctgttcaacacgccaagaaccttaacaactctatcaggtaaaagtcccagctactc

SEQ ID NO: 48806 - DNA, 470 bp, Homo sapiens
tgcagcattttccagtcacatatcagggttatactgaactgcaacaaagatcaacttttaaaaattagccttcttaaaatacaaaatgatttaagtattttaaagataatttatttgccttgctcttgccttctaacattagccatttcatggagaggctaaaacttatactccaaaaaatgtggaagcacattttaatgggagtaaaattaaaaaattttgagaaagggtaaaatcttatgaatatgcatcttcttagctttatcttccctttgataggtaggcacttatgctcttccatctgctccatgtcaaatagggctcagggaagccagtcatttccttagcgagatgattactcctttgccttgaaacatttattgggcccaccatgtatggatcagtgtgtggtagtgagtcatactcccaaatcagtgattcccaagtcttggctttgggaaccagtatgc

SEQ ID NO: 48807 - DNA, 264 bp, Homo sapiens
ccctttcccacagcagcactccctgactcttgggacctggcccttcccacagtccatcactcctggctgccctccatcctcctccctgccccatgtgggggtgggggcccagggaccctgcccttctccctgcctgtgccgtctcctcagcccttctgcccatacactctgctgggggatttcttaccaacagctgcttttaatataaaagtaataaaagcctttattatagaaaagttataattacagatatacagaaaataa

SEQ ID NO: 48808 - DNA, 464 bp, Homo sapiens
tactactaaattcgcggcgctcgacgattaattgagaatcgcattacatattattgtcacgtctctttggtgtccacaaatctagagcagttcctcagtatttccttgattttcacagccttggtacttttgaagattacacatcaattattttttgggatgtccttcatgagtttctttgaggtttcctcatgattaaattcaggttatgcacctttgtcagggatatcacagagggcaggctctagtcttctcatcatctcttaccaggcagaacactacctagatttgtcctattactagtgattggcacattaaacatttgattaaggtgatatctgtcaggatccttcactgtaaagtttatcttttcccttttgtctttagtgagtatagtattgagatggaggagtgatgcctctcaggggcccgccagcccaacgccccatcccccacaagcatgg

SEQ ID NO: 48809 - DNA, 350 bp, Homo sapiens
ctctggaaggtttcaaactttcccacattttcctgtcttcttctgagtcctccaaactgttctaacctctgcctgttacccagtttcaaagttgctttcacattttggggtatcttttctgtagtgccccactctactggtactaatttactgaattagtccattttcacactgctgataaagacatacttgagactgggaagaaaaagagattttaatggaattacagttccacgtggtgggggaggcctcacaatcatggaagaaggctaggaggagcaacaggccaaaaaggcttgtgcagagaaactcccatttttaaaaccatcagatctcgtgagacttattca

SEQ ID NO: 48810 - DNA, 289 bp, Homo sapiens
aaatatagaataggacaaaagattcaagtattatttaaacattattcagtgtagatgatagtggactattatatattttatatatatagctatgctgacatcagtttgttttatttgctcttcttaaaaaaaaaaaaatttaaggccgggcatggtggctcatgcttttaattccagcactttgggaggctaaggcagaaggatcgcttgagcccaggagttcaagaccagcccaggcaacacagggagacccttgtctaaacagtaacaacaaaaattaaccagacat

SEQ ID NO: 48811 - DNA, 473 bp, Homo sapiens
aagctgtcacttcagtcagtataatgcttgccagaaaaaaataggttaggagatcttgataatagtttaatatgatctgtatttttaaaatactagaaggttacttaatataccacatttccaagtccaaacggtgatcagagaaccccaaaataaaattttggcactgaattcataggaatacaattattttaaagcattagaaggaaagagaactcatagtctgtgttactgtgctgggtgggcttaggtttggggcttgtttgtattttgttttaccaatttagattcctttccacacttgcctgctaccacaagtaaggattgaggttaaatgggttttcatcttttattgggattggtgaaccttttaggattggtaaactgctttctcttgggcaagccaaactatctctcactaattgtttcaatagtggcccctttgaccttcctcttttcctttatctcaaaca

SEQ ID NO: 48812 - DNA, 660 bp, Homo sapiens
gaagaggtcgtctaatccacgtggctcacaaagccaattatgccattatttgtttgcactttataaggatgcatttaccaagtgggttaggagacctgtgggaaattcactgaatttcttatattaatctgtcagtgtaaatcatgggggagtgatttcgactttaaagcaagtacttcttgtatgctctgtattagagagcttagagagctgtggactgatctgagtctcaaacccgaattaatcttattctctgcacacctgcactcacacacacatccacacctaaaaaaatccccattccaaatacacaaaacgtatttgaaaaatgactagaagtaataattaccatgtgtctcagaaggtttgtatgactagattcatatgccagctttattctcgtcctgtgtttggatattgtcgtctgacagggaaggaagctggtcttcagattgttgactgttagccccacacctaggtgagagaaaagcaggggctcagcgaagaccctgagggagctgagaatcagccctggtgaaagtgtgagggtctgtcttttagttaaacacagggtgaagcagttatatactttaaatgtatgttacaattctacaattgcaagaatgacaagaataatattgcaaactgtggtcactagca

SEQ ID NO: 48813 - DNA, 486 bp, Homo sapiens
agaaacctctaaaggtgaagtaaactaggcagactggcaaggaaacttaagtctcaagggatgacctggcagggagttcccagaggctttcgtagtgttcacgtatttcaacctgggcactagaggaaggcacaatctgaaatgaccaacaagcacagacaacaaaagtcctaaggaaaatgctttctctagtcaaaggacctagaagaggacagtaatgaaggatggcctttttttttttttttttttttgagatggagtcttgctctgtctcccaggctgcagtgcaatggtgcgatctcggctcactgcaacctccgaggatgacccttttgacaatacttgctctactccaggtgaacaccatcaaagaaaccacagccctcctctccccaacaggctctgcagagactggtgtggagttcggtgaaccatccctgctgtgcacgaatgtgggggcaacactccccttcctcaccagtgatt

SEQ ID NO: 48814 - DNA, 1564 bp, Homo sapiens
gccccttcccggtacaggacccccaccttcgctcctgggagccccgctgcaccccaggagttccattccagcctccccagtgcgagtgcggccgagcgctgacttttgggggctccctcccccgtctcactgggtccctctgcggctcccccgcccgctgtcccggttcagacgtggctgcaccccggaggggggcgccggccgagacctgagacgtggcgctccctctctgccggcctcggcttcagtgcttgaatttcagccacatccctaagctgccatctcagaccagaggaacagggaggggggctttctggaaagaacatcacctggaagaaatcaggacatgactgtgggccatgagtgaccttcaaaggaaagccgggtatctgtggtctttaagatgtggtaagattgtattaaaattatagaaaaaaacctcaatccagaaatcgtggcctcttgacatttacatcttaactgcattttcctaccaatgagatgcattacaatcatcctccataagtgttctctttttacccctgtttccattcttttagatccatgacatttaaaaactgaagaaatggaaagatcatctgatcaggcccatcagtctttttcctaatgctaaacattggtacaaagacgtgaagtttgatgtctcactaagattgcctagggctgctttattgctcacctacttcaaagtattgggaaaacatgattatgggtacaggtgatgctgtgttgcccccagacaggtttcttttgtcaggttcttttgatggattaggaacctacaagtggggagattttagggaaatagcccctccacttggatttcaccaaaacgtctttagggttctcttaccccaagaaacacgcattcctctttagtgtggcagcccactctattggcaaagttaagcagaccagttttactaaaaaggagccacccagaaacttagacagaaaatacttgaggcacagatgagaatgagcacaaatgtgcatagcaagtgcagtttcctggcccttaaactgaagggccaggtcagtctgctcctccaggcacagcctgggaccccatcatgtgccccactctgcagtctgagcttccactcaagtccaccagggcctgcctcacatatatatacaagacccaatgtcagagtctgcctctgcccatgtctggtcagagggttgcactttgccactgctacatgttcccagaggttggcacagcatgacctggacctcacctaacccaggcaaactctgctcatcttcgagctctctggaacccatttctcaagggagaaccacattcccccacctcacagccaagttcaaggaagcagcctggctaaagcaatgactcaaggataccagaagcagagcacgcatttaagaagatgcgctgactcgcaggagcagctgactcttcttaagaagagtttactgattcttctttcagtacgggccttttaataagatattgtattttacttcagctatgggtgcagacaattaaaggattctagaaatctgaaaaaaaatt

SEQ ID NO: 48815 - DNA, 474 bp, Homo sapiens
actaaggatgatcatttttaaacaaacaaaagtatttagttatcttttcaaagtaaaatatagctttccctaaactgttttaggtgagccatgcacacaatgtgaaagaatgaagaaaccaacaaaacacttggtgaaaatgatgaattctggggcgctgattcatgtgacttgaaaaatgccatccatttcctgattcacctcaattctgttcggaactatgaaagatcatttatgtttctgcactaattgaccaattttgtcttgtctttacttccctccctagtgcttgaatttcagccacatccctaagctgccatctcagaccagaggaacagggaggggggctttctggaaagaacatcacctggaagaaatcaggacatgactgtgggccatgagtgaccttcaaaggaaagccgggtatctgtggtctttaagatgtggtaagattgtattaaaattatagaaaaa

SEQ ID NO: 48816 - DNA, 1412 bp, Homo sapiens
gccccttcccggtacaggacccccaccttcgctcctgggagccccgctgcaccccaggagttccattccagcctccccagtgcgagtgcggccgagcgctgacttttgggggctccctcccccgtctcactgggtccctctgcggctcccccgcccgctgtcccggttcagacgtggctgcaccccggaggggggcgccggccgagacctgagacgtggcgctccctctctgccggcctcggcttcagtgcttgaatttcagccacatccctaagctgccatctcagaccagaggaacagggaggggggctttctggaaagaacatcacctggaagaaatcaggacatgactgtgggccatgagtgaccttcaaaggaaagccgggtatctgtggtctttaagatgtgatccatgacatttaaaaactgaagaaatggaaagatcatctgatcaggcccatcagtctttttcctaatgctaaacattggtacaaagacgtgaagtttgatgtctcactaagattgcctagggctgctttattgctcacctacttcaaagtattgggaaaacatgattatgggtacaggtgatgctgtgttgcccccagacaggtttcttttgtcaggttcttttgatggattaggaacctacaagtggggagattttagggaaatagcccctccacttggatttcaccaaaacgtctttagggttctcttaccccaagaaacacgcattcctctttagtgtggcagcccactctattggcaaagttaagcagaccagttttactaaaaaggagccacccagaaacttagacagaaaatacttgaggcacagatgagaatgagcacaaatgtgcatagcaagtgcagtttcctggcccttaaactgaagggccaggtcagtctgctcctccaggcacagcctgggaccccatcatgtgccccactctgcagtctgagcttccactcaagtccaccagggcctgcctcacatatatatacaagacccaatgtcagagtctgcctctgcccatgtctggtcagagggttgcactttgccactgctacatgttcccagaggttggcacagcatgacctggacctcacctaacccaggcaaactctgctcatcttcgagctctctggaacccatttctcaagggagaaccacattcccccacctcacagccaagttcaaggaagcagcctggctaaagcaatgactcaaggataccagaagcagagcacgcatttaagaagatgcgctgactcgcaggagcagctgactcttcttaagaagagtttactgattcttctttcagtacgggccttttaataagatattgtattttacttcagctatgggtgcagacaattaaaggattctagaaatctgaaaaaaaatt

SEQ ID NO: 48817 - DNA, 2464 bp, Homo sapiens
  misc_feature (1339)..(1339): n is a, c, g, or t
  misc_feature (1879)..(1879): n is a, c, g, or t
atctgcttccggcctgcgagctcggtgttccgctttttgtgggctgggtgggtttcctaatctggtttcgtctgcttggttcatctgtgtgcgatggctccggactcggatcccttccctgaagggccgctcttaaagctgctacccttagacgctagagaccggggcacccagcgctgccgcctgggcccggccgccctccacgccctgggcgcgcgcttgggctcggcagtgaagatctcgctacccgacggcggctcctgcctctgcactgcctggcctcggcgggacggagcggacggctttgtgcagctggacccgctgtgcgcgagccccggggcggcggtcggggcgtcgagatcccggaggagtctcagcctgaatcgcctcctcctagtgccctgtccgcccctgcggcgcgtcgccgtgtggccggtgttgcgagagcgggcaggcgcgcccggtgcccggaatacagccgcggtgctggaggcggcacaggagctgctgagaaaccgaccgatctccctgggccacgtggtggtcgctccgccaggcgctcctggcctggtggctgccttgcacatcgtcggcgggacgcccagtcccgatcccgctgggctggtcacccctcgtacccgcgtcagccttggcggggagcctccgtcggaagcccagccgcagcccgaggtgcccctgggaggtctttcggaggcggccgactcgctgcgggagctcctccgcctcccgctccgctacccgcgcgccctgaccgcgctgggcttagcggtgcctcgcggggtgctcctggcggggccccccggagtgggcaagacccagctggtgcaggccgtggcgcgcgaggcgggcgcggagctgctggcagtcagcgccccggcgctgcagggttcccggcctggggagaccgaggagaacgtgcggcgggtcttccagcgcgcccgggaactggccagccgcggacccagcctcctcttcctggacgagatggacgccttgtgtccccagcggggcagtcgagcacccgagagccgcgtagtggcccaggtgttgacgctgctggacggcgccagtggggaccgcgaggtcgtggttgtgggagccactaaccggccggacgctctagacccagcgctgcgtagacccgggagatttgaccgagaggtgaatgggcttggcgggtttgcccactgtcggtggaacctcggccgcttctggcgccatttggctgccccggaggcgtttgcctcttaggtttgagcatcggtgaggttggagtggggctctttgcaatgcagagaacacgttctctgccgatatntgatctgtgagtcaggacctgtatttccccagagtcaaattgtcaggacctgtgagtcaggatctgagagtcaggacctgtttccccagagtctaattgttttgggaagcgaggtgtccattacagattaattttgttgtgcaggtcctataatcagtaatgttaattcttaagagaattttggtcacctacaagcgtgttaaactcattttttggaatgagaatttaaagaaggatagcctcaagaagtaagtgtgttgaaataaaaagggagaaggtggggaagaactaaatggaagcaggcattaactcttctggatttattcattccttgtcataacaccagcatcctattccacaattgaggaggtacccacaactgctccctgagttgtcagggaggttgaatattcagagctgtcctattttaagctttggtcctaaattgacttgaattctaaagaacagtttgaaatttagtgactgatatttctattttgtgataggattcaaaagagaaatgataattacacacttttngctcagttagttcaggacttgagtggatttcttccttgcactatctagtacctgtgtccttaagggcagggacctagctatctatacctggcttctagaactttgtgtgttcttaaaaataacaaaaacttgttaaatgacatagaattttcattgtgcaactttctagccagtgttactcctctggaatattaggattttcgtatattcagaatctaaagtatacgtaaagtgcacggtactagttccaaagtggttcactaaattgtacatgtttgtcaggataaaaaacatattattattttggccgggcgcggtggctcacgcctgcaatctcaatactttgggaggctgaggtgggtggatcacctgaggtcaggagttcgagaccagcctggccaagatggtgaaaccccgtctctgctaaaaatacaaaaaataagccgggcatggtggcacatgcctgtagttcctactctggaggctgaggcaccagaatcacttgaaccaggaggtggaggttgcagtgagctgagatggtgcccgctgcactccagactgggcagcagagtgaaactgtgtctc

SEQ ID NO: 48818 - DNA, 541 bp, Homo sapiens
catttactctgtgtgagctcagcagaattgaattccaacttggatataggtgtccatggtgttctacttaccctgggttccaccttcttccttgcctggtggcctttcatgacatcataattttgatcttcctttgttggatactctgatcttgttcacagagaaacataagcctaaatatatggtggttattttttgtgttgtggcagactctaaatactgagtctactcagcgttattttgcaactagagtggaggaatcctaaagtgttaaaagggctttgaagattgagtcagcatccttatcatacagtgcagaagtctgaaattacagagattatgcagtgtatcgtggtcaaccagtaaatttgttgtccgtaaagtacggtgcagaaatctgagattacagagattatgcagtgtatcatggtcaaccagtacattttttgtcgttaacatccagagccactgacagggagggtgaaaggcacagagtgaatttttttgttccttgggcttttatcaagttttgaagggatag

SEQ ID NO: 48819 - DNA, 2906 bp, Homo sapiens
atctgcttccggcctgcgagctcggtgttccgctttttgtgggctgggtgggtttcctaatctggtttcgtctgcttggttcatctgtgtgcgatggctccggactcggatcccttccctgaagggccgctcttaaagctgctacccttagacgctagagaccggggcacccagcgctgccgcctgggcccggccgccctccacgccctgggcgcgcgcttgggctcggcagtgaagatctcgctacccgacggcggctcctgcctctgcactgcctggcctcggcgggacggagcggacggctttgtgcagctggacccgctgtgcgcgagccccggggcggcggtcggggcgtcgagatcccggaggagtctcagcctgaatcgcctcctcctagtgccctgtccgcccctgcggcgcgtcgccgtgtggccggtgttgcgagagcgggcaggcgcgcccggtgcccggaatacagccgcggtgctggaggcggcacaggagctgctgagaaaccgaccgatctccctgggccacgtggtggtcgctccgccaggcgctcctggcctggtggctgccttgcacatcgtcggcgggacgcccagtcccgatcccgctgggctggtcacccctcgtacccgcgtcagccttggcggggagcctccgtcggaagcccagccgcagcccgaggtgcccctgggaggtctttcggaggcggccgactcgctgcgggagctcctccgcctcccgctccgctacccgcgcgccctgaccgcgctgggcttagcggtgcctcgcggggtgctcctggcggggccccccggagtgggcaagacccagctggtgcaggccgtggcgcgcgaggcgggcgcggagctgctggcagtcagcgccccggcgctgcagggttcccggcctggggagaccgaggagaacgtgcggcgggtcttccagcgcgcccgggaactggccagccgcggacccagcctcctcttcctggacgagatggacgccttgtgtccccagcggggcagtcgagcacccgagagccgcgtagtggcccaggtgttgacgctgctggacggcgccagtggggaccgcgaggtcgtggttgtgggagccactaaccggccggacgctctagacccagcgctgcgtagacccgggagatttgaccgagaggtggtcattgggactcccacacttaaacaaagaaaggaaattctgcaagtgattacctcgaagatgcccatctccagtcatgttgatttgggccttcttgcagaaatgacagttggctatgttggtgccgacctgacagcactctgtagggaggctgccatgcatgccctccttcatagtgagaagaaccaggacaatcctgtgattgatgaaatagacttccttgaagcttttaaaaatattcagccctcatcgtttcgaagcgtcattggattaatggatatcaagcctgttgactgggaggagattggtggccttgaagatgtaaaactgaagttaaaacagagcattgagtggcctctgaaattcccttgggaatttgttagaatgggcctgacacaaccaaagggagttctcctctatgggccccctggatgtgctaaaaccactctggtgagggccctggccacaagctgtcactgctctttcgtttcagtgagtggagctgatctgttttcaccgtttgttggagattcagaaaaagtgttgtctcagatatttcgacaagcaagagcaagcactccagcaattttgtttttggatgaaattgattcaatcttgggagctcgctcagccagcaagacaggatgtgatgttcaagaacgagttctttctgttctcctgaatgaattagatggtgttggacttaagacaatagagagaagaggaagtaaatcaagtcaacagggtaaatacaaggagctgaaaaaatgaagagagtttcaagaagtttttaaccgaagtgtcatgattattgcagcaacaaatagacctgatgtgttagatactgctttgttacgacctggaagattagataagatcatctatatcccacctccagatcacaagggcaggctttctattttaaaagtctgtacaaaaaccatgccaatagggcctgatgtctccttagaaaacctcgcagcagaaacctgttttttttctggagctgatcttagaaacctctgcacagaagctgctttgctggctctgcaagaaaatggactagacgcaactacagtgaaacaagagcactttctaaaatcacttaagactgtaaaaccgtcgttaagttgcaaggacttggctttatatgaaaacttatttaagaaagaaggattttctaacgtggaaggtatttaaaaatcaccttaaactcttgttcagttcacattaattgaaatgtgaacttgcctgtcgtttgcaacttcacacttttagaatttgtgtttatatttcctgtaagtgaataaataaaacaaaacaaaacaaaaaaaaaaaaaaaaaaaaaaaaaaaaaaaaaaaaaaaaaaaaaaaaaaaaaaaaaaaaaagaaacaacacacaaaaacataaaacacaaacaaacaaaaaacaaaacaaaaaaaaaacacaaaaaaaaaaaacaaaaaccacacacaaataacaaaagaaacacaacaactgcttttcttactctttatactcttctcaacacagtatgacatctccatctattacattataatactcttctctaatatagttaactattccaccagccaaaaaaaacttatctcaactacttcaatcacacaaacaacacacaccaaaactctttttatcactactactctaatctcgtgtaactcaacttatcgctaatatcacatataaaaatcaatac

SEQ ID NO: 48820 - DNA, 2562 bp, Homo sapiens
atctgcttccggcctgcgagctcggtgttccgctttttgtgggctgggtgggtttcctaatctggtttcgtctgcttggttcatctgtgtgcgatggctccggactcggatcccttccctgaagggccgctcttaaagctgctacccttagacgctagagaccggggcacccagcgctgccgcctgggcccggccgccctccacgccctgggcgcgcgcttgggctcggcagtgaagatctcgctacccgacggcggctcctgcctctgcactgcctggcctcggcgggacggagcggacggctttgtgcagctggacccgctgtgcgcgagccccggggcggcggtcggggcgtcgagatcccggaggagtctcagcctgaatcgcctcctcctagtgccctgtccgcccctgcggcgcgtcgccgtgtggccggtgttgcgagagcgggcaggcgcgcccggtgcccggaatacagccgcggtgctggaggcggcacaggagctgctgagaaaccgaccgatctccctgggccacgtggtggtcgctccgccaggcgctcctggcctggtggctgccttgcacatcgtcggcgggacgcccagtcccgatcccgctgggctggtcacccctcgtacccgcgtcagccttggcggggagcctccgtcggaagcccagccgcagcccgaggtgcccctgggaggtctttcggaggcggccgactcgctgcgggagctcctccgcctcccgctccgctacccgcgcgccctgaccgcgctgggcttagcggtgcctcgcggggtgctcctggcggggccccccggagtgggcaagacccagctggtgcaggccgtggcgcgcgaggcgggcgcggagctgctggcagtcagcgccccggcgctgcagggttcccggcctggggagaccgaggagaacgtgcggcgggtcttccagcgcgcccgggaactggccagccgcggacccagcctcctcttcctggacgagatggacgccttgtgtccccagcggggcagtcgagcacccgagagccgcgtagtggcccaggtgttgacgctgctggacggcgccagtggggaccgcgaggtcgtggttgtgggagccactaaccggccggacgctctagacccagcgctgcgtagacccgggagatttgaccgagaggtggtcattgggactcccacacttaaacaaagaaaggaaattctgcaagtgattacctcgaagatgcccatctccagtcatgttgatttgggccttcttgcagaaatgacagttggctatgttggtgccgacctgacagcactctgtagggaggctgccatgcatgccctccttcatagtgagaagttccaggtttgaccataagcacctctcacttaggtggaccagtcagctgctgtcgtcccagggtggagcccactgctacttcaggaggggcctgctcaggtgtagttaccacaggtgatggctgagttcagaaacaacccaggggaagtggaaggaagaaaggcaaaaagcatgaagggacagacaactgggaagaaccaggacaatcctgtgattgatgaaatagacttccttgaagcttttaaaaatattcagccctcatcgtttcgaagcgtcattggattaatggatatcaagcctgttgactgggaggagattggtggccttgaagatgtaaaactgaagttaaaacagatatttcgacaagcaagagcaagcactccagcaattttgtttttggatgaaattgattcaatcttgggagctcgctcagccagcaagacaggatgtgatgttcaagaacgagttctttctgttctcctgaatgaattagatggtgttggacttaagacaatagagagaagaggaagtaaatcaagtcaacaggagtttcaagaagtttttaaccgaagtgtcatgattattgcagcaacaaatagacctgatgtgttagatactgctttgttacgacctggaagattagataagatcatctatatcccacctccagatcacaagggcaggctttctattttaaaagtctgtacaaaaaccatgccaatagggcctgatgtctccttagaaaacctcgcagcagaaacctgttttttttctggagctgatcttagaaacctctgcacagaagctgctttgctggctctgcaagaaaatggactagacgcaactacagtgaaacaagagcactttctaaaatcacttaagactgtaaaaccgtcgttaagttgcaaggacttggctttatatgaaaacttatttaagaaagaaggattttctaacgtggaaggtatttaaaaatcaccttaaactcttgttcagttcacattaattgaaatgtgaacttgcctgtcgtttgcaacttcacacttttagaatttgtgtttatatttcctgtaagtgaataaataaaacaaaacaaaacaaaaaaaacttgtgcctgataagctaaggctcatttatttttaaaaggcatattaaataaaatactgtaatttaggaaaaaaatgtgtgtgtgtt

SEQ ID NO: 48821 - DNA, 898 bp, Homo sapiens
catttactctgtgtgagctcagcagaattgaattccaacttggatataggtgtccatggtgttctacttaccctgggttccaccttcttccttgcctggtggcctttcatgacatcataattttgatcttcctttgttggatactctgatcttgttcacagagaaacataagcctaaatatatggtggttattttttgtgttgtggcagactctaaatactgagtctactcagcgttattttgcaactagagtggaggaatcctaaagtgttaaaagggctttgaagattgagtcagcatccttatcatacagtgcagaagtctgaaattacagagattatgcagtgtatcgtggtcaaccagtaaatttgttgtccgtaaaggcaggctttctattttaaaagtctgtacaaaaaccatgccaatagggcctgatgtctccttagaaaacctcgcagcagaaacctgttttttttctggagctgatcttagaaacctctgcacagaagctgctttgctggctctgcaagaaaatggactagacgcaactacagtgaaacaagagcactttctaaaatcacttaagactgtaaaaccgtcgttaagttgcaaggacttggctttatatgaaaacttatttaagaaagaaggattttctaacgtggaaggtatttaaaaatcaccttaaactcttgttcagttcacattaattgaaatgtgaacttgcctgtcgtttgcaacttcacacttttagaatttgtgtttatatttcctgtaagtgaataaataaaacaaaacaaaacaaaaaaaacttgtgcctgataagctaaggctcatttatttttaaaaggcatattaaataaaatactgtaatttaggaaaaaaatgtgtgtgtgtt

SEQ ID NO: 48822 - DNA, 656 bp, Homo sapiens
tgatgacttagtctttctaacccctatatatattttctcggtaatgtgaaaggaaactcaagctaaaaatattttaataaatcattgtgtcaaacataaatgttataagatttaaaatactgttttttattttgttccagggcaggctttctattttaaaagtctgtacaaaaaccatgccaatagggcctgatgtctccttagaaaacctcgcagcagaaacctgttttttttctggagctgatcttagaaacctctgcacagaagctgctttgctggctctgcaagaaaatggactagacgcaactacagtgaaacaagagcactttctaaaatcacttaagactgtaaaaccgtcgttaagttgcaaggacttggctttatatgaaaacttatttaagaaagaaggattttctaacgtggaaggtatttaaaaatcaccttaaactcttgttcagttcacattaattgaaatgtgaacttgcctgtcgtttgcaacttcacacttttagaatttgtgtttatatttcctgtaagtgaataaataaaacaaaacaaaacaaaaaaaacttgtgcctgataagctaaggctcatttatttttaaaaggcatattaaataaaatactgtaatttaggaaaaaaatgtgtgtgtgtt

SEQ ID NO: 48823 - DNA, 2577 bp, Homo sapiens
atctgcttccggcctgcgagctcggtgttccgctttttgtgggctgggtgggtttcctaatctggtttcgtctgcttggttcatctgtgtgcgatggctccggactcggatcccttccctgaagggccgctcttaaagctgctacccttagacgctagagaccggggcacccagcgctgccgcctgggcccggccgccctccacgccctgggcgcgcgcttgggctcggcagtgaagatctcgctacccgacggcggctcctgcctctgcactgcctggcctcggcgggacggagcggacggctttgtgcagctggacccgctgtgcgcgagccccggggcggcggtcggggcgtcgagatcccggaggagtctcagcctgaatcgcctcctcctagtgccctgtccgcccctgcggcgcgtcgccgtgtggccggtgttgcgagagcgggcaggcgcgcccggtgcccggaatacagccgcggtgctggaggcggcacaggagctgctgagaaaccgaccgatctccctgggccacgtggtggtcgctccgccaggcgctcctggcctggtggctgccttgcacatcgtcggcgggacgcccagtcccgatcccgctgggctggtcacccctcgtacccgcgtcagccttggcggggagcctccgtcggaagcccagccgcagcccgaggtgcccctgggaggtctttcggaggcggccgactcgctgcgggagctcctccgcctcccgctccgctacccgcgcgccctgaccgcgctgggcttagcggtgcctcgcggggtgctcctggcggggccccccggagtgggcaagacccagctggtgcaggccgtggcgcgcgaggcgggcgcggagctgctggcagtcagcgccccggcgctgcagggttcccggcctggggagaccgaggagaacgtgcggcgggtcttccagcgcgcccgggaactggccagccgcggacccagcctcctcttcctggacgagatggacgccttgtgtccccagcggggcagtcgagcacccgagagccgcgtagtggcccaggtgttgacgctgctggacggcgccagtggggaccgcgaggtcgtggttgtgggagccactaaccggccggacgctctagacccagcgctgcgtagacccgggagatttgaccgagaggtggtcattgggactcccacacttaaacaaagaaaggaaattctgcaagtgattacctcgaagatgcccatctccagtcatgttgatttgggccttcttgcagaaatgacagttggctatgttggtgccgacctgacagcactctgtagggaggctgccatgcatgccctccttcatagtgagaagaaccaggacaatcctgtgattgatgaaatagacttccttgaagcttttaaaaatattcagccctcatcgtttcgaagcgtcattggattaatggatatcaagcctgttgactgggaggagattggtggccttgaagatgtaaaactgaagttaaaacagagcattgagtggcctctgaaattcccttgggaatttgttagaatgggcctgacacaaccaaagggagttctcctctatgggccccctggatgtgctaaaaccactctggtgagggccctggccacaagctgtcactgctctttcgtttcagtgagtggagctgatctgttttcaccgtttgttggagattcagaaaaagtgttgtctcagatatttcgacaagcaagagcaagcactccagcaattttgtttttggatgaaattgattcaatcttgggagctcgctcagccagcaagacaggatgtgatgttcaagaacgagttctttctgttctcctgaatgaattagatggtgttggacttaagacaatagagagaagaggaagtaaatcaagtcaacaggagtttcaagaagtttttaaccgaagtgtcatgattattgcagcaacaaatagacctgatgtgttagatactgctttgttacgacctggaagattagataagatcatctatatcccacctccagatcacaagggcaggctttctattttaaaagtctgtacaaaaaccatgccaatagggcctgatgtctccttagaaaacctcgcagcagaaacctgttttttttctggagctgatcttagaaacctctgcacagaagctgctttgctggctctgcaagaaaatggactagacgcaactacagtgaaacaagagcactttctaaaatcacttaagactgtaaaaccgtcgttaagttgcaaggacttggctttatatgaaaacttatttaagaaagaaggattttctaacgtggaaggtatttaaaaatcaccttaaactcttgttcagttcacattaattgaaatgtgaacttgcctgtcgtttgcaacttcacacttttagaatttgtgtttatatttcctgtaagtgaataaataaaacaaaacaaaacaaaaaaaacttgtgcctgataagctaaggctcatttatttttaaaaggcatattaaataaaatactgtaatttaggaaaaaaatgtgtgtgtgtt

SEQ ID NO: 48824 - DNA, 2607 bp, Homo sapiens
atctgcttccggcctgcgagctcggtgttccgctttttgtgggctgggtgggtttcctaatctggtttcgtctgcttggttcatctgtgtgcgatggctccggactcggatcccttccctgaagggccgctcttaaagctgctacccttagacgctagagaccggggcacccagcgctgccgcctgggcccggccgccctccacgccctgggcgcgcgcttgggctcggcagtgaagatctcgctacccgacggcggctcctgcctctgcactgcctggcctcggcgggacggagcggacggctttgtgcagctggacccgctgtgcgcgagccccggggcggcggtcggggcgtcgagatcccggaggagtctcagcctgaatcgcctcctcctagtgccctgtccgcccctgcggcgcgtcgccgtgtggccggtgttgcgagagcgggcaggcgcgcccggtgcccggaatacagccgcggtgctggaggcggcacaggagctgctgagaaaccgaccgatctccctgggccacgtggtggtcgctccgccaggcgctcctggcctggtggctgccttgcacatcgtcggcgggacgcccagtcccgatcccgctgggctggtcacccctcgtacccgcgtcagccttggcggggagcctccgtcggaagcccagccgcagcccgaggtgcccctgggaggtctttcggaggcggccgactcgctgcgggagctcctccgcctcccgctccgctacccgcgcgccctgaccgcgctgggcttagcggtgcctcgcggggtgctcctggcggggccccccggagtgggcaagacccagctggtgcaggccgtggcgcgcgaggcgggcgcggagctgctggcagtcagcgccccggcgctgcagggttcccggcctggggagaccgaggagaacgtgcggcgggtcttccagcgcgcccgggaactggccagccgcggacccagcctcctcttcctggacgagatggacgccttgtgtccccagcggggcagtcgagcacccgagagccgcgtagtggcccaggtgttgacgctgctggacggcgccagtggggaccgcgaggtcgtggttgtgggagccactaaccggccggacgctctagacccagcgctgcgtagacccgggagatttgaccgagaggtggtcattgggactcccacacttaaacaaagaaaggaaattctgcaagtgattacctcgaagatgcccatctccagtcatgttgatttgggccttcttgcagaaatgacagttggctatgttggtgccgacctgacagcactctgtagggaggctgccatgcatgccctccttcatagtgagaagaaccaggacaatcctgtgattgatgaaatagacttccttgaagcttttaaaaatattcagccctcatcgtttcgaagcgtcattggattaatggatatcaagcctgttgactgggaggagattggtggccttgaagatgtaaaactgaagttaaaacagagcattgagtggcctctgaaattcccttgggaatttgttagaatgggcctgacacaaccaaagggagttctcctctatgggccccctggatgtgctaaaaccactctggtgagggccctggccacaagctgtcactgctctttcgtttcagtgagtggagctgatctgttttcaccgtttgttggagattcagaaaaagtgttgtctcagatatttcgacaagcaagagcaagcactccagcaattttgtttttggatgaaattgattcaatcttgggagctcgctcagccagcaagacaggatgtgatgttcaagaacgagttctttctgttctcctgaatgaattagatggtgttggacttaagacaatagagagaagaggaagtaaatcaagtcaacagggtaaatacaaggagctgaaaaaatgaagagagtttcaagaagtttttaaccgaagtgtcatgattattgcagcaacaaatagacctgatgtgttagatactgctttgttacgacctggaagattagataagatcatctatatcccacctccagatcacaagggcaggctttctattttaaaagtctgtacaaaaaccatgccaatagggcctgatgtctccttagaaaacctcgcagcagaaacctgttttttttctggagctgatcttagaaacctctgcacagaagctgctttgctggctctgcaagaaaatggactagacgcaactacagtgaaacaagagcactttctaaaatcacttaagactgtaaaaccgtcgttaagttgcaaggacttggctttatatgaaaacttatttaagaaagaaggattttctaacgtggaaggtatttaaaaatcaccttaaactcttgttcagttcacattaattgaaatgtgaacttgcctgtcgtttgcaacttcacacttttagaatttgtgtttatatttcctgtaagtgaataaataaaacaaaacaaaacaaaaaaaacttgtgcctgataagctaaggctcatttatttttaaaaggcatattaaataaaatactgtaatttaggaaaaaaatgtgtgtgtgtt

SEQ ID NO: 48825 - DNA, 2772 bp, Homo sapiens
atctgcttccggcctgcgagctcggtgttccgctttttgtgggctgggtgggtttcctaatctggtttcgtctgcttggttcatctgtgtgcgatggctccggactcggatcccttccctgaagggccgctcttaaagctgctacccttagacgctagagaccggggcacccagcgctgccgcctgggcccggccgccctccacgccctgggcgcgcgcttgggctcggcagtgaagatctcgctacccgacggcggctcctgcctctgcactgcctggcctcggcgggacggagcggacggctttgtgcagctggacccgctgtgcgcgagccccggggcggcggtcggggcgtcgagatcccggaggagtctcagcctgaatcgcctcctcctagtgccctgtccgcccctgcggcgcgtcgccgtgtggccggtgttgcgagagcgggcaggcgcgcccggtgcccggaatacagccgcggtgctggaggcggcacaggagctgctgagaaaccgaccgatctccctgggccacgtggtggtcgctccgccaggcgctcctggcctggtggctgccttgcacatcgtcggcgggacgcccagtcccgatcccgctgggctggtcacccctcgtacccgcgtcagccttggcggggagcctccgtcggaagcccagccgcagcccgaggtgcccctgggaggtctttcggaggcggccgactcgctgcgggagctcctccgcctcccgctccgctacccgcgcgccctgaccgcgctgggcttagcggtgcctcgcggggtgctcctggcggggccccccggagtgggcaagacccagctggtgcaggccgtggcgcgcgaggcgggcgcggagctgctggcagtcagcgccccggcgctgcagggttcccggcctggggagaccgaggagaacgtgcggcgggtcttccagcgcgcccgggaactggccagccgcggacccagcctcctcttcctggacgagatggacgccttgtgtccccagcggggcagtcgagcacccgagagccgcgtagtggcccaggtgttgacgctgctggacggcgccagtggggaccgcgaggtcgtggttgtgggagccactaaccggccggacgctctagacccagcgctgcgtagacccgggagatttgaccgagaggtggtcattgggactcccacacttaaacaaagaaaggaaattctgcaagtgattacctcgaagatgcccatctccagtcatgttgatttgggccttcttgcagaaatgacagttggctatgttggtgccgacctgacagcactctgtagggaggctgccatgcatgccctccttcatagtgagaagttccaggtttgaccataagcacctctcacttaggtggaccagtcagctgctgtcgtcccagggtggagcccactgctacttcaggaggggcctgctcaggtgtagttaccacaggtgatggctgagttcagaaacaacccaggggaagtggaaggaagaaaggcaaaaagcatgaagggacagacaactgggaagaaccaggacaatcctgtgattgatgaaatagacttccttgaagcttttaaaaatattcagccctcatcgtttcgaagcgtcattggattaatggatatcaagcctgttgactgggaggagattggtggccttgaagatgtaaaactgaagttaaaacagagcattgagtggcctctgaaattcccttgggaatttgttagaatgggcctgacacaaccaaagggagttctcctctatgggccccctggatgtgctaaaaccactctggtgagggccctggccacaagctgtcactgctctttcgtttcagtgagtggagctgatctgttttcaccgtttgttggagattcagaaaaagtgttgtctcagatatttcgacaagcaagagcaagcactccagcaattttgtttttggatgaaattgattcaatcttgggagctcgctcagccagcaagacaggatgtgatgttcaagaacgagttctttctgttctcctgaatgaattagatggtgttggacttaagacaatagagagaagaggaagtaaatcaagtcaacaggagtttcaagaagtttttaaccgaagtgtcatgattattgcagcaacaaatagacctgatgtgttagatactgctttgttacgacctggaagattagataagatcatctatatcccacctccagatcacaagggcaggctttctattttaaaagtctgtacaaaaaccatgccaatagggcctgatgtctccttagaaaacctcgcagcagaaacctgttttttttctggagctgatcttagaaacctctgcacagaagctgctttgctggctctgcaagaaaatggactagacgcaactacagtgaaacaagagcactttctaaaatcacttaagactgtaaaaccgtcgttaagttgcaaggacttggctttatatgaaaacttatttaagaaagaaggattttctaacgtggaaggtatttaaaaatcaccttaaactcttgttcagttcacattaattgaaatgtgaacttgcctgtcgtttgcaacttcacacttttagaatttgtgtttatatttcctgtaagtgaataaataaaacaaaacaaaacaaaaaaaacttgtgcctgataagctaaggctcatttatttttaaaaggcatattaaataaaatactgtaatttaggaaaaaaatgtgtgtgtgtt

SEQ ID NO: 48826 - DNA, 243 bp, Homo sapiens
gatttttaacaattaaattttcctgtattcttatttatcctgaggtgccattggtcttgttatttaacttacccattatttcttctgaaacaattgcattacagtaattgtagataaatataaccctggagtactatagatcactgaaatgttggttgctttaagcaaaaagaagtatcaaatcaagtcagtttctagattgctgttctcctgggcactgattcatcgttcagagctgtcaaa

SEQ ID NO: 48827 - DNA, 592 bp, Homo sapiens
agcgcatctctgactcccagtcctgaggcctttccagttcaccagaccacctcagccattagaagggtgtcagctggatttgtgtgcccaacgaggtgtgttgcttttatgtaaaagagaagcacataaggaagaaatcatgagtgttcaggatccctttccagtcccttaaagaggctgcttttgcagtagcgacatactacccagtgagctcagccatgcagtttttcctgcagggttagagtggatcacttccttcagttgatcaccatttgaagtagcaggggtttgagttcagaggccatgtacgaaaatgattttaaaaatacctggagcctcatttagcacatgcaagactgagactcagccaagggggctatctagagaaggacggaaccccctccctctgtactatttactctgagttcataaaaaaattagccaggcgtggtggcgcatgcctgtaatcctagctacttaggaggctgaggcaggagaattgcttgaacctgggaggcagaggttgcagtgagctgagattgtgccactgtactccagcctgggcaacagagtgagactccgtctcacaaaa

SEQ ID NO: 48828 - DNA, 578 bp, Homo sapiens
acaggcgcacacatgtgcaggcttatcactcacagtggccactgtaacccttctacaataatgacgatgctcacatgtgccttggattgacttgacttgggcgaagcactgtggaagcttgctgctgtgtgaggaaggaagaatgcaatatttcagtcctctcctgctgggtcatttctgaaggggatgcactcggatgatggcatccgactggccagcctgcttccttggacattggtactggaagagactctcaagacaagatcggtctacagagaaccttctgggtggaactccttgggaggccactttccatgctcagaccccaaccctgaatcttgcttggtggcgaatgagccctgggaagctctgagaaggaaggctctggggacagggccagaggcaatgaggaatgacaactaagccagtgacctcagcacctttgttaatgggtcctaacgaggccatgcccccgtaaacattggatatgttgtatctctctttaaagatgcttaaagcatttaaagtagtcaaatatatcacacttgcagttttcattaaatgctcaattgattcaa

SEQ ID NO: 48829 - DNA, 698 bp, Homo sapiens
tctggaagctggaagtccaaggtcaaggtgttgtcagggtgggttccttccgagggctctctccttggcttgcagacggtgtcctttttccttgtgtcctcacatgcccttctctctcttcacatgcatcccttgtgtcttttcctcctcttaaaaatagacaccagtcataatccattagagccctactttaatggcctcattttaagttaatcacctatttaaggccctatctccaaataaagtcacattctgaggtactgggggttggaacttcaacaagtgttttgagagatgagggaaacaactttgtccatgcctttatatgtggttacattggagtgtgtgtgtgcatgcatgtgtaccaattaatgtagaacatgattagaactgaaggaacattgaagaatgcctcattccaaactcccattgtagaggtgaagagatgacacccagcagtggtttggcgaccaagttgggcctgaaaccgatgcacttcccccatgcagctctccattaaggagtaaaggtgagaacataggttcagaacattctgctgaaatgaggaggacagggtagatcattaatctccattcgatgttcacagcagtacttcctaagctgttttctaaggaacgttagtcttgcaaactgttgattagtattttataagttttttctgcagtctcatgaggaag

SEQ ID NO: 48830 - DNA, 161 bp, Homo sapiens
cacccgcggtggccaggagatgcccaaaacttacacaggacactgagctggaagtgtttggtcttctccccaacagcgttggctgcaatgcaggagtagtggccagcactggacaggtttgcctggaggacctgcaggaggactccgtctggggagatgtg

SEQ ID NO: 48831 - DNA, 364 bp, Homo sapiens
gtggcttcacttatagaagaatgctgagtgccaaatagtaaatgctgagggagtgctagagttagtaaatcatcattttgcaaccctcctagcagagactggcttaggcaagaatcatcaatggatgatgaatctagggaaaatttttcacgaggagcagagcatttacttggtcttaaagtgttttcccacagattggtttataggtgcaaggggaaaaatagtaactacatagtggagaaaccagggaatgccctgactaggtgggtatatcaaaattaacatcaacaatgagggctgatggacatctgtgcctcccataaaaccctgagaaggatgcgtgattatttatgtagtagtctgg

SEQ ID NO: 48832 - DNA, 180 bp, Homo sapiens
tttttttaaaggaaagcaactttattagagaagtaaagaaacaaaaaaatggctactgcataggcagagcagccagggactaaatgttcacggctgtgtcatgtgttccacacttgtctctagagtagggctgtccgacagaattttctgtgatgatctgtatctgtgctgtctcagtta

SEQ ID NO: 48833 - DNA, 404 bp, Homo sapiens
aaccaaatagtacaatgcctactccataaagtgagatattttgactacttttctcagtaattgataaaacaaatagaatacagaaaattcaaacaacacaattaacagacaagaacaaatggagacatacagaacacttcacgtaactgaagaccatatacgtgttctttcagtgcacacagaacatttataatatttggcaatattctgagccctaaagcaaaactctacaaatttctaaagactgaaatcacaagagcacctaccagaatgcaattagccggaaattaacaagaaatacaaaaaatcctgaaaattccatgtggtagacagaataatggtcctccaaagatgtccacattctaattcccacaatctgggaatattgaacaagcttatgcagc

SEQ ID NO: 48834 - DNA, 423 bp, Homo sapiens
cacaggattaaacctttctttagaatcagcaggttggcgacacactttttgtagattctgtgagaggatattttggagcatactgaggcaaatagtgaaaatggaatatcccacaataaaaactacaaggaagctatctgtgaaactactttgtgatttgtggatgcagctcataaattaatactttcttttgattcagtaggttggaaacactttttttgtagaatctgcgaagtgacattttggaacgtgtggaggcctatagtgaaaacctgaatatcctgtgataaaaactagagagaatttatctgtgaaactgctttgtgacgtgtagattcagtccacagagttaaacctttttgtttgtttgtttcagcagtttggaaacactccttttgtatgtagaatcagcagagggacatt

SEQ ID NO: 48835 - DNA, 470 bp, Homo sapiens
tactttctgtctctatggatttgcacagtttagatgtttcatataagtggaatcatacaatatgtgctcttttgtgactgccttcttttactttaatattttcaagattcatccatgttgtagcatgtatcagaactttatccctttttatagctgaataatattctattgtattcatacaatatataagcgtttgtgtggacgtatgcattcagtttttttagatacatatctaggagtggaattgagtcatatggtacctcagtgtttaactttagaggaactgccaaatgattttccaaagtagctgcattattttacattgctaccagcagtgaatgagagtttgaatttctgtacatcttcacccaacacttgatattgtctgtctttctagacaaattttgataaatccctccttttctaaaccatagccaagtctattactgtttaacaatgaccatcttgga

SEQ ID NO: 48836 - DNA, 398 bp, Homo sapiens
gatccatgctttgaaccacacagttaccctttggtgggaaagcatagaaggcagtggtgaggttttcccaggcggtgtaaactcacacagagggacaagaacctgggaaaggaaagggtatgcttgaggagtggggctgtaactgagtatcccagcctcaaaatgcatttggaaacttttttcctttcttgttttcagccttgaaacattctttgaaatgctctggtatccctttcccaccaggcgctcccgggcacagggctcgcttatctaactgtgtgcttgctaagaaattccagaggctcattttgaaacaaactgggcagagagaccaagctgtagaatcatcccgcttaggcggagttatgaaccgttagcccaccactaccaggcaggag

SEQ ID NO: 48837 - DNA, 394 bp, Homo sapiens
tctgccgcttgctgctggcccagggccattaggacggtggttacattgtcatgagagcctatgaggaaggcaagaactgtcttcaggttagacactgagagctggaagcgggtggggcttactactgcattagcaaagaccgccacggttttaatctgccgacacaacctcacttggtggttgacagaggagcaaggccctgagattgtctggaatgttaggatattttcaatccatgtgacccgcttgtttcccctaaacacgcttctccttttcttttctctgtaagtgaatatcatttattttactgagagcaacagattacccaaagatatagctcagcagcagtatatatgaaaggactgtggtctttgggcatttttgttatctgttt

SEQ ID NO: 48838 - DNA, 331 bp, Homo sapiens
caaggttgaggtggacttggaccaaacccagagggaaagaaaaatgcagaatgccctgggaaggggcaaggttgtgccgttgtggcatcctgcacatctgcagaccctccctgtgactcctaacaagcagaagacagacgggagaggcaccaaacctgaagcctcctctcaccaggggacaccaaagcaaacgacagctcagggggctccaaagacctcattcatagcagcaaaaggaactcaggtagtcaaaatatcagtacacatgggacgtgtcagtttaaaacaggagccccggaagagtcatagtcccagcagtgacacatcaaaa

SEQ ID NO: 48839 - DNA, 2683 bp, Homo sapiens
ggtaaggtcaaacaaggcaacaatttgcctttttgtttcagtttccatattgtaaacaaatgtacttttcacggtgtatgctgtgaaaattttttgtatatttatatgttttgttcgtgattttgctgtttaaaatggccctcagccaggtgtggtggcacacgcctgtagtcccaactacttgggaggatgaggtggatggcttgaggccaggagtttgagtctgcagtatgctactttggcacctgtgaatagccattacagtccagtttgggcaatatagcaagatccatctgtaaaaataagtaaataaaatggccctcaagtgtagtgctgaagtgctctctagtgttcttaagctcaagaaggccatgatatgacttatagggaaaatacgtgttagacacatttcattcatatgagttttaatactattggcagtgagttaaacgttaatgaatcaacaatatatactaaataaggtatctttaacagaaacactcataaaacaaagtaaatgtatcgattggttgacaaaaatattaccagaggctcacagaaacttaatcgtgtatttgccctagtagtaataatttggtatttgctaattcagtatttgccacactttatagaacacaactacctcaaatacaagaattgactataaatcaaaaacttttttttttaatggtttccagtggatagaggaataaaaacagggtggaggggacaggaatggatttttgacaaatttaactttggtatcatataaatgtataattataaataaatgaataagaagtaatctctaaaaatcaaaagcacagtgaagtaaatgaacctaactatatattaaataggtaaatttctagtgggatgtatatgaaggacaaaaagaattgtaaaattttcctaaactgtaatagtaattatattatttgtaataaaagtattattctgaaagtattaatgtatattacaggatgaaacaaataagtaactgttaatgtcattggaaaccaagattttcagcaaaagaaagataaaaatattaaattgtagggttttgcataacttatttaaaactaaatttgaattggaaatatctgtagcagtttatggtatatttgcaaacagaaaatctgttacagaaaatctgttacagaaaatgttttacctaccactgttttctgaaaagacctggaaaccctgtacaacccagaatcaatgagtacccttggcatctagggtatagtctctaggtttcatttcccactgaaagaattggggttccttggaaaaacgactagttacagttcttgggaaagaaatgaatgagaagtttggaatgtcttgtcattttggaaagcaaggaggcagtctaagactactgaggtcatggtaaagaaactcaagagccaacttacggaggtttctactggtcatagattgaacagctttgagcatcggtaataactgcagtggactgtgaatcacatcaaagatgtttaaatccatgagttcataatacctaaaaagaaatttttttttagtttacttgcaacttttggagtatattaggaaatcaaatcattatttttgaaactgataaataatggaaaacagtatcaagcatttattctacttgcaagtatacttcatggcaaccaaatggtgattgaggggaagtttgtgttcttatatgtattcaagctaattaatgagcaaggacaattggaattagaatatcactgttttggaatcccagatgaaatgatggatctaggcagttgtcaccactgacagaaaaccttacaaaaagactaacccttcattgtgtgccttctacaagatactgttaattaaaaagtcaaacctagatctcatcaagtctggatctgactaccagtttatagaaaatgcagggacagagaaacatgttaagacagcaccataaggatacaatcagcaaagtgtaaatgtgagagaaactacaggacaaatgaccttcaacagataaattgcaaacacaaagctggtggggaaaccaatagattaaaatatttaagagacttttcaactaattatggcaaaaggctttatttgaatcctgattcaaacaagttaattttaaaaatctttttagaaacttcaggaaatgtgtacgctggatattgtatgacagtgcggaattattcatttaggcatgaataatggtaccgtggttgtttttgaaacctatctgttaaagatactatgatttatggattaaatgataaaatgcctggaatttgcttcagaataattcatattgagtggatgggggttcaaatgaaacaagactggctctgattttggtaaatttgaagctgactgatggaatacttgtactattctgttttttaatatagctgaaatttttataagttataaaagaaatatgcaatctaggtgtagtggcttgtgcctgaatcctggttacatagaaggatcccctgagcctagtaattcaaggctgcagtgagctgcgatcacatcactgcattcccgcctgggcaacagaagtagactccatctctaaaaagaaggaaagaaaaaaaggaagaaatatacagtaattttaaactgggagatgaaatgctaatttctagaagtccatttggttttgaagggtctcatgtca

SEQ ID NO: 48840 - DNA, 489 bp, Homo sapiens
gttgacttcacacaaggtttcaccagcggcatttatccatggtgcttaagagcactaacaaattccaggcaacatcctggcatgcagccagcccactggcattcctgtctggcacactttgcaggactggtcatgtgagaaagacagctaacagcaacaattgctgggtgatgaatagccagaaggagggcagcttgaagcatgacagggacaaggaatgcaatcaggaaaggctgacctggaacttggagcgggggtaagttaggctgtgatggatggaaggcagcagctgcatgtacagcatgctggcaggcacagtctgagaaacactgcttaatttgaatcgaatgggcagcttaagaggcagagaggcaagcagtgaccaaagccacaaaccgaaacacaaacctttcattaatctttccaaccatactcacactcttggcaacacaacttttcaatgagttgaacataactcattgttgttcc

SEQ ID NO: 48841 - DNA, 369 bp, Homo sapiens
caaccacagtttctagtgtgtttaggtacagggacatggacaaaagtctggagtgggcaaggcttacctaaagcttgcctagttctttagcttccgttggaccctctagggggctagcatggaataggaaagaggcagaggacaaacccagggatcagggctcagatgtcttccgcagtctgtgatcctgtagtcacgaagacccttgccactgtggtctccacccagcattccagatatctgccgtcaattgtattgatgcccatttaccatcttggctagtccagtagcactacatcctaccaatttcctaatagtaaagatactgtattgctaccctaacagagttagaaaatgaagtattaataa

SEQ ID NO: 48842 - DNA, 404 bp, Homo sapiens
tagtaaaagaaacgttaccaagtactaacaactgataatattgtgtgccatttctaactggggacaccaagtcaccaaaacataacttgtagaaaggacacaatgagccaatgccaaagtcagttacagaactggataaacctaaaccatgttcccatctctaggtattgtgaatttcaataattgttttgttgtttcagtgaaaggaaaaaatccatttagcaattatcattgctaatacttggcaagtttaagaaaggcttagcaagtttaagaaaatctccttggtctgcagggtatggtctgatccacatttactggtgtttttctataggaaccagctaagtgtgtctgactagttctccagacatcaatcactgagatgagaaagcacagatatttgc

SEQ ID NO: 48843 - DNA, 254 bp, Homo sapiens
gtaatcttatttacaaatagtctatatctccgagtctgttctagattattaggaaaaggctcctcaaccatggcctgaggaataaggaagtatctgtgcccttcaagccatcaaaacccacctcattctaatatctcaaaagaagatcatcacccccttccctcaggggtctgttttctttctggagccttgaatcctatttcagttgtactgcaggtccagagacatcccaccccaaaacccgaaaaggtttt

SEQ ID NO: 48844 - DNA, 1285 bp, Homo sapiens
gagagcccggcttctgcgcacccctctccagatgcgaggtgctcacccgcccctcgccctgctcaccccgacgcctcggtccccacgctctgggcagcaagacacatagcgaagcccctgacccatttcttctcagttgcgaccccctgtgtgagacccctaaagaggccaaggatcacagtaggtgtttcatcaaaatggtcactgtgtcccccaggttaggctgctggtatctcaatatccccctgcagagagaccccgcacccccgaatcccataccccaggctgcaaagcacagatctaatgccttccttctctggccggatttggagggacattgaggggcatgggtggcgccccaggctcgcagggttcgtggtccggaaaaccgagcccagggaatctccagctccgttctgttcgcagaaccttcgggggttagtcacaggccctggcccgcgcgggatctggaggcagagatttctcgacgtttggggacttacagctcgtctgggagcgactggattcccaggcctccgcacgctgaggttccggggaagagcactgtcttcaccacttctcgacctgcgccccaacccatcaaatttccagcactcgtccccctaggtctcataaaaactcctggcagacccttccgggatcacgcgtggctcaactcgggggccgtagctacgatccccgcgcagacgccggaatccggggcccggtccccgcgcggggtgcggcgctcgcggggggggggggatggggtcggtccctctcgggaacggctgctgttgtttctttagatactgaatataatttctccctcctccaccccactcgctgttcttaacaattttatttattggtttactattgtcttgtgaacgtttcttgtctcctccttgccttttttcatcccctttctctcttcatttctctctttttccttaattctgttgcaaagtttccttttcttgcttaatcaaaattctccccgcttactttgttctttgcccacagcattcgttcttcttttctccttgcctgcctgtcttctttcccgctgttcttggccgtgggcagacccggctgatgtaaggactgcagcttttccctggcatactctgcgccttcagatgtggtctgcgtctgcctgggtctcttcccacctcaatctgagatccttgcccctcacaataaattcgtttttattcattctgatgtttgtctacagaagttactcgataaagatgttttgtttcatgaatcaaaaggcttc

SEQ ID NO: 48845 - DNA, 1136 bp, Homo sapiens
aggaagagggtaacagtattgttaactggccatgaattttaatccctgttgtgtgtcgccgaatagtttacaaactctttttgcactggggttttgtttctcccactccccgcacccccgaatcccataccccaggctgcaaagcacagatctaatgccttccttctctggccggatttggagggacattgaggggcatgggtggcgccccaggctcgcagggttcgtggtccggaaaaccgagcccagggaatctccagctccgttctgttcgcagaaccttcgggggttagtcacaggccctggcccgcgcgggatctggaggcagagatttctcgacgtttggggacttacagctcgtctgggagcgactggattcccaggcctccgcacgctgaggttccggggaagagcactgtcttcaccacttctcgacctgcgccccaacccatcaaatttccagcactcgtccccctaggtctcataaaaactcctggcagacccttccgggatcacgcgtggctcaactcgggggccgtagctacgatccccgcgcagacgccggaatccggggcccggtccccgcgcggggtgcggcgctcgcggggggggggggatggggtcggtccctctcgggaacggctgctgttgtttctttagatactgaatataatttctccctcctccaccccactcgctgttcttaacaattttatttattggtttactattgtcttgtgaacgtttcttgtctcctccttgccttttttcatcccctttctctcttcatttctctctttttccttaattctgttgcaaagtttccttttcttgcttaatcaaaattctccccgcttactttgttctttgcccacagcattcgttcttcttttctccttgcctgcctgtcttctttcccgctgttcttggccgtgggcagacccggctgatgtaaggactgcagcttttccctggcatactctgcgccttcagatgtggtctgcgtctgcctgggtctcttcccacctcaatctgagatccttgcccctcacaataaattcgtttttattcattctgatgtttgtctacagaagttactcgataaagatgttttgtttcatgaatcaaaaggcttc

SEQ ID NO: 48846 - DNA, 532 bp, Homo sapiens
ccatttggggggcagagtttccaggtctgcttttaatgcgttgtcaggttgcatatgacatgcctggatgacttgaccaaaagttattctcaacactgttcgatgtaatcttgccagatacatctacatagtcattttgttcttattcatatgagtcttcttgaacaacttaggaaactgctgtatattaatgatcatacttctatgtgcattcccttttaaaacagagtcatccaaagtagaggtaaaaaaggaaagaaatggtaagacataaataaagtatttggtgcatttaaaaaggctattgcatatattagaacttttcttatagtatataatctctaaaatactgttgcatcagaatgttgcataatgatgttttgtattcattttgaagcataaattactttctactcatagttatttattggtattcctcttcagtttggggagttttctctttttttcctgtggaatttgctgtcacctttattttttataaattcaggcccacaagtggtttctacaactt

SEQ ID NO: 48847 - DNA, 885 bp, Homo sapiens
ctgtagaaaaactatatatgaaattccagaacagccaaataatctatgatgggaaagaaaatcagaatggttttatggttgcctgtgcacagtggggattaactgggaaagggtatgaagggaactttctggttgatggaagtgttaataatcttcaaagaagttagggaggtattagcattttaaaaactcatagaattgagtatattttatatgtgtacattttactgtatgaaaattttagtattaaaaaatattaaaattaccagtagtgaaacagatttaaacctcctgatatgatggcactgagaaatatgcaccatcacctctgtaacattccttccagaaatgcattgcctggatctaatcataggagacctcagacaagcccaaattgaggattctacaaaagaattgcaaaataactggcctgtagtcttcaaaaatgttaaggccatgaaaaaaaaaaaagctccagattaaagaactagagatatgacaactaaaaacaacatgtaaacctagattaaataactactgggtgaggcaaaaccattttgcaaaaattttcttttgctaaaacatcagtgggacaatttgaataagtgttgtagattagataatagtatgtataagtgttaataattactctgattatgtaaaagatatccttttaaggaaatacatatttaagggtaagtggcatcaagtcctgcaacttgcacatggttcaggagaaagaatggggaagcaaatgtgaaatattaatacaggttgagcatctgcagtctaaaactttttgagtgtggatgtcatgccacaagtagaaaattccatacctgatctcatgcagcaggtcgcagtgaaaacttttgtttcctgcac

SEQ ID NO: 48848 - DNA, 743 bp, Homo sapiens
gacttttagactccattgccactgtgttataggaaactgaggctcagagaagtgaggtaacatgtccaagtcacaccgtaatttgctgagctaggcgtcatacagatttgatggattctggaaccatggtccaatcgccccatacctgctgcccagcaatcacattccggaaaacaagggtacaaggaagcacacatttgctgccccaacccgctctgcctcatgtgatactcagctaggtgctcttgctcttctccccattatattgtaaaacaattgagaaccaagtttataatattttaatcatctttgtatccacataactcttagctcagttgggtgcttagtagctcagttgggtgcttggtagctcagttaggtgcttggtagctcagttgggtgcttggtagctcaggtgtttggtagctcagttaggtgcttggtagctcagttgggtgcttggtagctcagttgggtgcttgatagctcagttgggtgcttcattaaaatgtccttatttcaacagaaaacatcttcctagcttccttcaagcaggaattttcctgctgtcaatgttcctgttcttaattgcaaggctctttctttcagccttggcctgagtaggtttagagaatgacagggaaaagggaagagggaggaaaacttcacatcgtggactgtgcaccttcccctagagtatagacaattctgcattttgaagagattgagtgtggtttcagatc

SEQ ID NO: 48849 - DNA, 480 bp, Homo sapiens
tttaagcacaaaaggttaaaaagattacttcagttttctgttagttcagtccattctgttaactcttgttctacttgatattcatgaacctttcagctcttcatgagtcctgtatgtttctctctattccagtgtcccaatctccaaagatatcagaaacctgcctttaagagcacctgtcaaagtactatatctgattataagccatcttttgaaaaggatcaaagctagacaacaattgtctgtgaatagcaaaatgtccagggtagttacctcaaaaacactatggacaaagaaatttgtttatttctgtagcaatatggtttggctgtgtccccacccaaattttaccttgaattgtaataatcccccttgtgtcgagggtgggccaggtggagataattgaatcatgggggcaattttccctatactgttctcatagtagtaagtctcacgagatctgatggttttataaatggg

SEQ ID NO: 48850 - DNA, 409 bp, Homo sapiens
ttttgaagaccccaaaactaacccaagctttgcatgatctccccaggatgggtaagacttcttactctctagagctcttttctctgtaggcttagctactcagtgaataaataggtacataagtgcttgctagcaagcagctgaggcaacctattaaaactcatgccagtggtaaagttaagctgctttctggtaagaatttcagaattccaggacgtctcaaatttctggctggtacaccctgggcaaggtccacaggctggatgggttttggaacatgtcttgattgtactttttcctcttggtttggaaagcaacgtaccctaggtaaggagagatttctgacaacagctcagcaatcacagtttccagaaaatggctccagtggatcaactatgagttaagtaaa

SEQ ID NO: 48851 - DNA, 725 bp, Homo sapiens
gaacatacaaaatttctgagtgcagtttaaaacattgagtgtaatttgtaagtttcccttaaaataattgtttaaaatttgcttacatagaatcagatttgtaagttgaactatattcttcagagaaaaacaggaatttgaattttaacttcaatacatcgaatactaatttttaaaatcaataagacaaaacaactcttgaatcttttctgtatacagaaatccctctcaagggtacaaaaaaaatcacactgacagaaaacatattttgctgtttgtaccttgacacggcttaactggtgggcaaaatggattcctgtgttctgcctggctactatgtagttgccgtagttatcctctaccaccccccaccccatcccatgccctgcagctggtgtagatacacaggtgtagagcatgctccctatttttaatcccagttacttccgataagagcaggactttgccctttccaccccactccccacctcaagcccctgatgaaggagtttcctttaggtctgtcttctccgaattcctttaggatttaaagtccataccttgcaatttagcacttaatgatatgccctctcttcacagtctctaatactttcaacatgtgtgagtcttgccttcccaagcagactaggaattcttttcttccttattcccacatctttgttccagccagccatctaacagacattaaaaaaaacaaaaaaaca

SEQ ID NO: 48852 - DNA, 1579 bp, Homo sapiens
  misc_feature (1)..(1): n is a, c, g, or t
  misc_feature (1397)..(1397): n is a, c, g, or t
ngccagggtgccagtgagaagcacaggccaccactctgccctggtccacacaagctccggtagcccatggagccctggcctctcctcctgctctttagcctttgctcagctggcctcgtcctgggctccgaacatgagacccgtctggtggcaaagctatttaaagactacagcagcgtggtgcggccagtggaagaccaccgccaggtcgtggaggtcaccgtgggcctgcagctgatacagctcatcaatgtggatgaagtaaatcagatcgtgacaaccaatgtgcgtctgaaacagcaatgggtggattacaacctaaaatggaatccagatgactatggcggtgtgaaaaaaattcacattccttcagaaaagatctggcgcccagaccttgttctctataacaatgcagatggtgactttgctattgtcaagttcaccaaagtgctcctgcagtacactggccacatcacgtggacacctccagccatctttaaaagctactgtgagatcatcgtcacccactttccctttgatgaacagaactgcagcatgaagctgggcacctggacctacgacggctctgtcgtggccatcaacccggaaagcgaccagccagacctgagcaacttcatggagagcggggagtgggtgatcaaggagtcccggggctggaagcactccgtgacctattcctgctgccccgacaccccctacctggacatcacctaccacttcgtcatgcagcgcctgcccctctacttcatcgtcaacgtcatcatcccctgcctgctcttctccttcttaactggcctggtattctacctgcccacagactcaggtgggtgtggttgccatgactgctgctgctgacgctgatgggtctcgtgctgctattttggggaagccagaaataatcatgtgctaacaaacaggcagatcgacccgaaccatcatcattaggagggtgcatttgctgagtgggcgtgcgcagtggtgagagtcactgtgagtggagctcacagctggggcagacaccccgagcggcagggagttgaacatgaccctagagatgcacagtgtagcttaggctggttaaagtacattaaccaccaatacctatttgctgaataccaactgtgtgcccagaagtgtactgggtaaggcatgtgatcccagacacttctcatgccacttccacgatgaagtcactttctatgtactgactaatcctggtcttgcccctttacccactgctcaccacttgaaaatagattttgcatatctttttttccagatggtggcatcttcacacacaagaccctacttcccaagtggctgttctttctcacatatcagcctagacaacttacttacctcctactgagtaatcntatctgtgacataattttatcaaacaataacaatccaccagaaaggaggaaagggtacccatctgcctgccagcaagtcactattcataaacaacttatggcagacaagtttgaaaaaaagaaagatgctacagacagacctcaagcttatgacaggtagcaatttttatcaaaatgacttt

SEQ ID NO: 48853 - DNA, 491 bp, Homo sapiens
tgatgtgttcagaggatccctgagagaccgtgttgcaatggtgatggaccacatactcctcggagtcttcatgcttgtttgcatcatcggaaccctagccgtgtttgcaggtcgactcattgaattaaatcagcaaggatgagcagaaaatgagctgagcttagctctgccctggaacctaccagagcagagaagggcaggagaggaagatttgtctacttgctccactcgcacttatcaaacgtgttatattccatacttattattgatgataagatttacctttatgtaagtttatggccttgaagtgttttcatattgcttctccctttagttctgctgtctccctgaagagtgaaccctctttagtaaatgaaactaatcactaaaaaaagtgttcatttccagtgtctggaagagtttttgccaggataaccgaggttttctgttgcattgtcattgcaacacggtctctcagggtaccgagctcg

SEQ ID NO: 48854 - DNA, 1825 bp, Homo sapiens
  misc_feature (1)..(1): n is a, c, g, or t
ngccagggtgccagtgagaagcacaggccaccactctgccctggtccacacaagctccggtagcccatggagccctggcctctcctcctgctctttagcctttgctcagctggcctcgtcctgggctccgaacatgagacccgtctggtggcaaagctatttaaagactacagcagcgtggtgcggccagtggaagaccaccgccaggtcgtggaggtcaccgtgggcctgcagctgatacagctcatcaatgtggatgaagtaaatcagatcgtgacaaccaatgtgcgtctgaaacagcaatgggtggattacaacctaaaatggaatccagatgactatggcggtgtgaaaaaaattcacattccttcagaaaagatctggcgcccagaccttgttctctataacaatgcagatggtgactttgctattgtcaagttcaccaaagtgctcctgcagtacactggccacatcacgtggacacctccagccatctttaaaagctactgtgagatcatcgtcacccactttccctttgatgaacagaactgcagcatgaagctgggcacctggacctacgacggctctgtcgtggccatcaacccggaaagcgaccagccagacctgagcaacttcatggagagcggggagtgggtgatcaaggagtcccggggctggaagcactccgtgacctattcctgctgccccgacaccccctacctggacatcacctaccacttcgtcatgcagcgcctgcccctctacttcatcgtcaacgtcatcatcccctgcctgctcttctccttcttaactggcctggtattctacctgcccacagactcaggggagaagatgactctgagcatctctgtcttactgtctttgactgtgttccttctggtcatcgtggagctgatcccctccacgtccagtgctgtgcccttgattggaaaatacatgctgttcaccatggtgttcgtcattgcctccatcatcatcactgtcatcgtcatcaacacacaccaccgctcacccagcacccatgtcatgcccaactgggtgcggaaggtttttatcgacactatcccaaatatcatgtttttctccacaatgaaaagaccatccagagaaaagcaagacaaaaagatttttacagaagacattgatatctctgacatttctggaaagccagggcctccacccatgggcttccactctcccctgatcaaacaccccgaggtgaaaagtgccatcgagggcatcaagtacatcgcagagaccatgaagtcagaccaggagtctaacaatgcggcggcagagtggaagtacgttgcaatggtgatggaccacatactcctcggagtcttcatgcttgtttgcatcatcggaaccctagccgtgtttgcaggtcgactcattgaattaaatcagcaaggatgagcagaaaatgagctgagcttagctctgccctggaacctaccagagcagagaagggcaggagaggaagatttgtctacttgctccactcgcacttatcaaacgtgttatattccatacttattattgatgataagatttacctttatgtaagtttatggccttgaagtgttttcatattgcttctccctttagttctgctgtctccctgaagagtgaaccctctttagtaaatgaaactaatcactaaaaaaagtgttcatttccagtgtctggaagagtttttgccaggataaccgaggttttctgttgcattgtcattgctgttatatttatatatttacttattttgtctaaccacgagaccactagggagttgctgatgttc

SEQ ID NO: 48855 - DNA, 1738 bp, Homo sapiens
  misc_feature (1)..(1): n is a, c, g, or t
ngccagggtgccagtgagaagcacaggccaccactctgccctggtccacacaagctccggtagcccatggagccctggcctctcctcctgctctttagcctttgctcagctggcctcgtcctgggctccgaacatgagacccgtctggtggcaaagctatttaaagactacagcagcgtggtgcggccagtggaagaccaccgccaggtcgtggaggtcaccgtgggcctgcagctgatacagctcatcaatgtggatgaagtaaatcagatcgtgacaaccaatgtgcgtctgaaacagcaatgggtggattacaacctaaaatggaatccagatgactatggcggtgtgaaaaaaattcacattccttcagaaaagatctggcgcccagaccttgttctctataacaatgcagatggtgactttgctattgtcaagttcaccaaagtgctcctgcagtacactggccacatcacgtggacacctccagccatctttaaaagctactgtgagatcatcgtcacccactttccctttgatgaacagaactgcagcatgaagctgggcacctggacctacgacggctctgtcgtggccatcaacccggaaagcgaccagccagacctgagcaacttcatggagagcggggagtgggtgatcaaggagtcccggggctggaagcactccgtgacctattcctgctgccccgacaccccctacctggacatcacctaccacttcgtcatgcagcgcctgcccctctacttcatcgtcaacgtcatcatcccctgcctgctcttctccttcttaactggcctggtattctacctgcccacagactcaggggagaagatgactctgagcatctctgtcttactgtctttgactgtgttccttctggtcatcgtggagctgatcccctccacgtccagtgctgtgcccttgattggaaaatacatgctgttcaccatggtgttcgtcattgcctccatcatcatcactgtcatcgtcatcaacacacaccaccgctcacccagcacccatgtcatgcccaactgggtgcggaaggtttttatcgacactatcccaaatatcatgtttttctccacaatgaaaagaccatccagagaaaagcaagacaaaaagatttttacagaagacattgatatctctgacatttctggaaagccagggcctccacccatgggcttccactctcccctgatcaaacaccccgaggtgaaaagtgccatcgagggcatcaagtacatcgcagagaccatgaagtcagaccaggagtctaacaatgcggcggcagagtggaagtacgttgcaatggtgatggaccacatactcctcggagtcttcatgcttgtttgcatcatcggaaccctagccgtgtttgcaggtcgactcattgaattaaatcagcaaggatgagcagaaaatgagctgagcttagctctgccctggaacctaccagagcagagaagggcaggagaggaagatttgtctacttgctccactcgcacttatcaaacgtgttatattccatacttattattgatgataagatttacctttatgtaagtttatggccttgaagttgtattctttgcttaagagtcagttttgtacctactaagaaaaccccatctaccagtcctaaagagataaggcatttgatttggagagagaggaagcagtagaaatgaaataaactaaaatgcaaactgca

SEQ ID NO: 48856 - DNA, 912 bp, Homo sapiens
agaatagaatgaatagaatgagggctagagatgggagggttcctgatgagagagggtcaaaaagtgagttttagtgaaggactaggtctgaaatagttacgttattgaatttaaaaatttaacatttcaaatatgtctttctttgacaaaactttacagagacactgaagtccaggatcttttgtccagaatgtaaaatatttgtcaggaattgacaaaagaagctactgctcacaatgtactcttttaagaggagagtaagagtccctgtttctgtaaaggctgatagatgactgctggcaatacctgtactgcagtttcttcaggaacaggaaacagaagaaaacaatctagctgttttgtgggatatatttgaagtggaggggccccttctttaaccatttgatcctggtgacacattgctaaggcattttccatacctgtaggggatcctgacgcttttaagctcattggtggccccaggtcgatgactgcacatgggctccctccagtggcgaacttctcacattacagaatcatcactgttaaccatagtcatttcacaggacccgggatacagagggatctttgaaaaaatctagtatagttcttttgttttaaggacaaggaggctgaagcccagaaaaactgaatgacttaccccaaatcacattgataattcaaagacagagttttatgcttgcctcctggacaataattctcatgcatggatttcttttttatgttaggtttttatcgacactatcccaaatatcatgtttttctccacaatgaaaagaccatccagagaaaagcaagacaaaaagatttttacagaagacattgatatctctgacatttctggaaagccagggcctccacccatgggcttccactctcccctgatcaaac

SEQ ID NO: 48857 - DNA, 1789 bp, Homo sapiens
  misc_feature (1)..(1): n is a, c, g, or t
ngccagggtgccagtgagaagcacaggccaccactctgccctggtccacacaagctccggtagcccatggagccctggcctctcctcctgctctttagcctttgctcagctggcctcgtcctgggctccgaacatgagacccgtctggtggcaaagctatttaaagactacagcagcgtggtgcggccagtggaagaccaccgccaggtcgtggaggtcaccgtgggcctgcagctgatacagctcatcaatgtggatgaagtaaatcagatcgtgacaaccaatgtgcgtctgaaacagcaatgggtggattacaacctaaaatggaatccagatgactatggcggtgtgaaaaaaattcacattccttcagaaaagatctggcgcccagaccttgttctctataacaatgcagatggtgactttgctattgtcaagttcaccaaagtgctcctgcagtacactggccacatcacgtggacacctccagccatctttaaaagctactgtgagatcatcgtcacccactttccctttgatgaacagaactgcagcatgaagctgggcacctggacctacgacggctctgtcgtggccatcaacccggaaagcgaccagccagacctgagcaacttcatggagagcggggagtgggtgatcaaggagtcccggggctggaagcactccgtgacctattcctgctgccccgacaccccctacctggacatcacctaccacttcgtcatgcagcgcctgcccctctacttcatcgtcaacgtcatcatcccctgcctgctcttctccttcttaactggcctggtattctacctgcccacagactcaggggagaagatgactctgagcatctctgtcttactgtctttgactgtgttccttctggtcatcgtggagctgatcccctccacgtccagtgctgtgcccttgattggaaaatacatgctgttcaccatggtgttcgtcattgcctccatcatcatcactgtcatcgtcatcaacacacaccaccgctcacccagcacccatgtcatgcccaactgggtgcggaaggtttttatcgacactatcccaaatatcatgtttttctccacaatgaaaagaccatccagagaaaagcaagacaaaaagatttttacagaagacattgatatctctgacatttctggaaagccagggcctccacccatgggcttccactctcccctgatcaaacaccccgaggtgaaaagtgccatcgagggcatcaagtacatcgcagagaccatgaagtcagaccaggagtctaacaatgcggcggcagagtggaagtacgttgcaatggtgatggaccacatactcctcggagtcttcatgcttgtttgcatcatcggaaccctagccgtgtttgcaggtcgactcattgaattaaatcagcaaggatgagcagaaaatgagctgagcttagctctgccctggaacctaccagagcagagaagggcaggagaggaagatttgtctacttgctccactcgcacttatcaaacgtgttatattccatacttattattgatgataagatttacctttatgtaagtttatggccttgaagtgttttcatattgcttctccctttagttctgctgtctccctgaagagtgaaccctctttagtaaatgaaactaatcactaaaaaaagtgttcatttccagtgtctggaagagtttttgccaggataaccgaggttttctgttgcattgtcattgcaacacggtctctcagggtaccgagctcg

SEQ ID NO: 48858 - DNA, 1900 bp, Homo sapiens
  misc_feature (1)..(1): n is a, c, g, or t
ngccagggtgccagtgagaagcacaggccaccactctgccctggtccacacaagctccggtagcccatggagccctggcctctcctcctgctctttagcctttgctcagctggcctcgtcctgggctccgaacatgagacccgtctggtggcaaagctatttaaagactacagcagcgtggtgcggccagtggaagaccaccgccaggtcgtggaggtcaccgtgggcctgcagctgatacagctcatcaatgtggatgaagtaaatcagatcgtgacaaccaatgtgcgtctgaaacagggtgacatggtagatctgccacgccccagctgcgtgactttgggagttcctttgttttctcatctgcagaatgagcaatgggtggattacaacctaaaatggaatccagatgactatggcggtgtgaaaaaaattcacattccttcagaaaagatctggcgcccagaccttgttctctataacaatgcagatggtgactttgctattgtcaagttcaccaaagtgctcctgcagtacactggccacatcacgtggacacctccagccatctttaaaagctactgtgagatcatcgtcacccactttccctttgatgaacagaactgcagcatgaagctgggcacctggacctacgacggctctgtcgtggccatcaacccggaaagcgaccagccagacctgagcaacttcatggagagcggggagtgggtgatcaaggagtcccggggctggaagcactccgtgacctattcctgctgccccgacaccccctacctggacatcacctaccacttcgtcatgcagcgcctgcccctctacttcatcgtcaacgtcatcatcccctgcctgctcttctccttcttaactggcctggtattctacctgcccacagactcaggggagaagatgactctgagcatctctgtcttactgtctttgactgtgttccttctggtcatcgtggagctgatcccctccacgtccagtgctgtgcccttgattggaaaatacatgctgttcaccatggtgttcgtcattgcctccatcatcatcactgtcatcgtcatcaacacacaccaccgctcacccagcacccatgtcatgcccaactgggtgcggaaggtttttatcgacactatcccaaatatcatgtttttctccacaatgaaaagaccatccagagaaaagcaagacaaaaagatttttacagaagacattgatatctctgacatttctggaaagccagggcctccacccatgggcttccactctcccctgatcaaacaccccgaggtgaaaagtgccatcgagggcatcaagtacatcgcagagaccatgaagtcagaccaggagtctaacaatgcggcggcagagtggaagtacgttgcaatggtgatggaccacatactcctcggagtcttcatgcttgtttgcatcatcggaaccctagccgtgtttgcaggtcgactcattgaattaaatcagcaaggatgagcagaaaatgagctgagcttagctctgccctggaacctaccagagcagagaagggcaggagaggaagatttgtctacttgctccactcgcacttatcaaacgtgttatattccatacttattattgatgataagatttacctttatgtaagtttatggccttgaagtgttttcatattgcttctccctttagttctgctgtctccctgaagagtgaaccctctttagtaaatgaaactaatcactaaaaaaagtgttcatttccagtgtctggaagagtttttgccaggataaccgaggttttctgttgcattgtcattgctgttatatttatatatttacttattttgtctaaccacgagaccactagggagttgctgatgttc

SEQ ID NO: 48859 - DNA, 437 bp, Homo sapiens
cagatgcctcctttactcgggataccctccttcttgcctatcatcattcagttatgtattagatctttcctatcttttaaatttttctcccactaggcactgtgtcacgtgcctacagtcccagctaccccaggaggctgaggtgggaggatcatctgagccccaggagttggaggctactgggagctctgattgcaccactgtaccccagcctgggcaacagagtaagaccgtgtctaaaaaaaaaaaaaagaaaagaaaagaaaaaaagagaacgaaagaaagaaaaaagaaaaattaactattgactctgtacaggcatacttcagagatattgtgagttcacttccaggccactgcaataaagcaaatattgtaatttcccagtgcatagaaaagttatgtttacactacactatagtctactgagtgtgcaa

SEQ ID NO: 48860 - DNA, 589 bp, Homo sapiens
tacagttttgcatagacaaggtgaacatttctcaaaacaccatgtctctccaattttctaatggatccaggcatgtttgcttaaggtctggagctggatctgtcagacccctcaatggaggtgcaggctttgcaggcagcagtgcatgtggtggctctgttgctggaagtgaattttcctgtgccttgggagggggcttgggcagtgttcctggtgggagccatgctggtggtgcccttggaaatgctgcttgtattggctttgctggaagcgaagggggactcctctctggaaatgagaaggtgaccatgcaaaatcttaatgaccgcttggcatcctacctggataatgtgcgagctctggaggaggcaaatgctgaattagagagaaaaatcaagggttggtatgaaaaatacggacctggatcttgccgtggacttgatcatgactatagcagatatcacctaacaattgaggatcttaagaataagattatctcctccactactactaatgctaatgtcattctgcagattgataatgccagactggctgctgatgatttcaggctaaagtaagtgacagaaga

SEQ ID NO: 48861 - DNA, 1518 bp, Homo sapiens
  misc_feature (720)..(720): n is a, c, g, or t
  misc_feature (732)..(732): n is a, c, g, or t
  misc_feature (736)..(736): n is a, c, g, or t
  misc_feature (926)..(926): n is a, c, g, or t
  misc_feature (1036)..(1036): n is a, c, g, or t
cacggcggctacaccggcagcggaccgggctttggagaacctcgggactcaggtgctgaggtgcccagcggctccggacgtgctacggggtgcgagcgcgggggagttcggggcgcacgacaaggaagggcccccgggagctctatatggaggaaggagcccagaatggtgtgcaccaggaagaccaaaactttggtgtccacttgcgtgatcctgagcggcatgactaacatcatctgcctgctctacgtgggctgggtcaccaactacatcgccagcgtgtatgtgcgggggcaggagccggcgcccgacaagaagctggaggaagacaaaggggacactctgaagattattgagcggctggaccacctggagaatgtcatcaagcagcacattcaaggctataggagaaatttctcccttctgaatgtgtccaactaactctgttcacctgagaaatcatattccccagctctgggtatccctgaataaccacaggagaacagttccaggccctgataagtcagctattgcaagggggacctggctggaagatatgaaggaaaaatatcattcttgaactaataagttgagagatcacagccttcaggggaccagaagggaaggctgaacagagaagggcaatttcacgttcgccatgtccatatttctatcgtcatgagccatctcaccttacaggcagggaagttttgagcttanagaatgggatgngtcnagaaaaccgtggctcccccagctctgttcctggattcagtgcctgttgtttcatcctgtgtagactggagtcagggtctacacagttggaattctatggaaccaagatgctgtgtggcagatggatgtggactccaactgtgacaatccagaaggccttggggacttgtttcatgaacagctccctgtangatctctgttggggtgggggattctaggggcatctccgcagttttcttctgaaaacaaaacgaatacaagttgggcaggtgcaacaactgtgcatgcagtcccctcccanggctggctagcagtattgttgggtaccgtaagcacttagcattgttaagtgagcataagtaacaagatgcaacagcctctggccaagttttgaagattttgttttaaagtatgcttttagatgttgacattcatgattattaaaaggaacaaaactcaatttggggtctcaagagccacaattctagacttctaggatgtcaggagccatgctcttaagcttctcaccctgctgttttaatgagattaatgattattttccactgagcacctacctgtgatgttcataaaaaagtgaaataaatgactcacatggagatttggaaggatatcactgtggaaagtagatgttaacagcctctagaaatatgataattatcagctatttgagatgcagtcactgtaatgtgataacaagatgtgttgtgcaggtagaaagcatggagagaaatggcacaaagtagagttataagaaaaaagaaa

SEQ ID NO: 48862 - DNA, 531 bp, Homo sapiens
aggagatgagaagttgagctaatgacttccagccttttccagttaatattgtccaggtaacccctgccttttttggctggctgaaatttgattttgattgagggttacagtttcaagtcatttagcacaaataagtcaaggcttttgtctttaaggccttgttatccaccaaatgaacactgtttgagtacgtactgtatgcagaccagttgctgtgagataatctatactactgttcctgtctcagtaaaattagatgggcaagtgttccaacttattaaataagtcatataggtaattattgtccaacacatgtttaagtaaagtatatgataattgatcatgtgtatgtggaaaagctgtacctgtttttgtttatttgttttaagatggagtctcgctctgtcacccaagctggagtgcagtggctcactgtaacctctgccttccaggttcaagcgattctcgtgtctcagccttctgagtagctgggattacaggcgcccactaccacgccgagcaattttgttt

SEQ ID NO: 48863 - DNA, 304 bp, Homo sapiens
ggcagaggttgcagtgagccgagatcatgccattgcactccagcctgggcgacacagtgagactccatctcaaaaaaaaaaaaattaaattaaattaaaagtaagagctaaaactataaaactcttagaggaaaacagagagataaatctttgtaaccttggatttggcaagggattcttagatatgaaaccaaaaggataagcaactaaatgtaatcaattggacttcatcaaaacaaaaacttttgtagttcaaaggacattagcaagaaagtgaaaagacaactcacagaatgggagataa

SEQ ID NO: 48864 - DNA, 426 bp, Homo sapiens
tcttggagaggggacactgaggcagaggctcagctaggaagcaagaggtgacaggaacaaacaggaggcaccactgctgctgtttccaaggacagtgtgctgcccatgaccccccgagcctggcccacgtgacccacatcacatcctcaccatcttctaggagaaatgagaggattttaaaaccagccttagctgagtacagtggctcatgcctgtaatcccagcactttagaagggagggcaggaggactggttgaggctaggagtttgagaccagcctgagcaacatagcaagacacccatctctaaaactaaacaaataaaagaaaataaaaattaaaaccagcctcttcaaagacacaattataggcactctgcctatggagtagccattctttatgcctttactttcttaataaacttgct

SEQ ID NO: 48865 - DNA, 216 bp, Homo sapiens
tgagatacagtctcactctgtcacccagtctgcaatgcagtggtacaatctcggctccgcctcctgggttcaagcaagtctcatgtctcagcctcctgagtagctggtattacaagtgtgcgccatcacatccggctaatttttatatttttagtagagatggggttttgccatgttggccaggctagtctctaactgctggcctcaagtgatctg

SEQ ID NO: 48866 - DNA, 400 bp, Homo sapiens
agaaacataagactgagggtgaagtgagatcccctctgaaaaagcaccaggtgtcttgtgggggcctgatgctgagggatgggttgtagctcatgccctgtagaagagaacactgttcaaagccaaccagtctggattcaagaggggtcctgggagcttcagtctgtccgtgaaagaagcacttccctgaggcttccctgtgttccaatgcccttcatatcctaggcctctgaacagggtgctgtcagtcgagtgggattcatcatcctcaagtttttgccggagtggaggccaggctgtgtgctgggctgatctcctcctgttgcatctgtgagctgctgttgtgaggacagtggcttgagagagctgaacagaaagacatgccccctccttccaagac

SEQ ID NO: 48867 - DNA, 336 bp, Homo sapiens
gggaatacactcagacttagggtttctcaaatttacctctatgtaactgactctagttttcatttccaaaaatctcttgatttcattacctacaacaatatctaaatccagcagacaaatgcaggcaagctagtaacatgtccccagcatcttctgtttcccatgcttcgctaaccatgattaacttggatatttaaaaggattacagagtaatcattatagaataaatttactaacaaattaactaacttataaatttactaatttgttaggatagttatagaataaactatatttattcagccagaatgtaatctcaaagaagacaaaactttt

SEQ ID NO: 48868 - DNA, 771 bp, Homo sapiens
gggactacatgtgcattccaccatgcctggctagtttatttttttcacagacgggatctcgctatgttgcccaacctggcctcaaactcctgggctcaagtgatcctctctcttggcctccagggtcactggggttacaggcacaagccactgcacctggctgtagttcttgagtcaagtatgacatatgctggtgaatagaaacaggtaaattggttctaaaactcaatctctggccagagctaaccagtgggcccacagggtggccaggtcctgtggccctggttgggacagaaggataaagcatcttcctggagtacggggaagggctcaaacctggcccatgttgggtcagattttggcctgcacagctggtgcccaggtaagctgcatgccaggagggcactggtacttctcccctcctgctctgcatcccccagcgctgctgccgcggtgctagtgacacatcactgcccactggaaagtttcatttcatgtcttggccatagcagctctagtgctttttcttcacctgcctagggtccattgctgatgacttttacacaggacagcaagcaggtggacatcagcttaggctcacggaggtcttttagagacctctggttcctctttgtagaatgagggatatactgggtcagcgagtctctcacttcattcgcctgagttccaccttggcaattttgtaatggatcatgtactttttatttatcttgaaatgacccaatttatataaaaatgttctgctttcaa

SEQ ID NO: 48869 - DNA, 724 bp, Homo sapiens
cggttttccaggtgctttgctttaataatgatatttcactgaattttcaaaacgatggttccctgtggtagtgggaattatgctatgtgttatatgaaacaaagtaagtttgatttttaaaggcatgtattctggcctgttggttgatagagttcattttgatttcttcttctaggggagaagttttatgaacacttaatggttttagagttctatttgtagaaaataaagataaaatccagatttctttcaggattattttcattttgggaagaaccaaaacattggattcttaatatctatagcataattaactttgcccaaatcttccattaaagaataattatgtatacaagagaacccacatgtaatatttttgttcctaaatttgtttagagtgctggttctcaaactttagcatgttatcagaatcacttggaagaagacttcttcaacacattgctgagtcccattcccagaggttcagaaaattagatgttgacattttcaaagtgaacttaagagaagtaagtggtctgcatttataggaaccatgtttttggcatttgaggtgatgccttaattgatgaaaacattgtgcaaagtataggagtgtttataaattagggaaccatatcaattaaactcttatctttttgcattctaaaatcatctatcttgcattattagcacttaggattggatttcagatatgtttaaaaaa

SEQ ID NO: 48870 - DNA, 428 bp, Homo sapiens
gcaaatgagtaaatgggtttatattgtagaagccaaggttttcactgaaaaaggatgaagatacaaatatggaatagagggaggcaagaaagaacctgcagggatgaatagggatatcactctgaactggtgatttccaatatatgtgtgtttgtggcaaattgatatacgcatgtgtgtatttatgcacatatatgtgcacatgttaaatgcatgtatttcattgttccatctactggaaaggttgagaatcaaagatactcctctaataagagcatacctaagcacctgtatctgagtttctaatgtcactgcccctctaaactgaaccatactcctggaatggctaatttcaggactggtgcaagatgatcctgaaacatcttatcagacaagatagtaaagaactgctgttaaaaaaaaaagaa

SEQ ID NO: 48871 - DNA, 425 bp, Homo sapiens
tataataggtgtccttttactttcaaaaattgtagcatttttaaactaattttcttaagaatgtgatacagaaagaaaactgaaaaacaacatatttatattttatctgattttataagatttttttttcagtcaactggtgaaattggtaaatcctgccaataagtctttataccaaattacgttttaaaattagtttcataaaaggaacaaaagcatttccatgctagacaagatgtcacttatcgtcaatttaactcgaggcatttgaaataaaacaactgtatttttacattgaaaattatttgttacaggaacttgatagcataatccacaatgtgatgtgaggtacttgtcaaaaattttaaagtttataacacataagtaaacatttgagaggataccagtttgatttgtaaatactc

SEQ ID NO: 48872 - DNA, 324 bp, Homo sapiens
gcagccagggagcagggcatcctgcgagaagagcatcccgctaaggagtctgaacgccatcctgtaggcgggggagtcatcaaggcagggcagaggcaggaccagatggccgtttgaggtgctgagcaaagctcccggtttgcgcggagaggtgagatcgaggccccttgggaggccgaggcttaaccagggctcaagcagaggggagggaaggctggatttcagaggtagggaggataaggaccgtgggtgcacgacggggagggagagccaagtcaaggttaatgccggtgctcgggcggatggtgaaagcagcagatggcc

SEQ ID NO: 48873 - DNA, 408 bp, Homo sapiens
gtaacaggaggaggaggctgtggcagggagtggttccggtgagtcagacttctggacccaggttcgattgcatgccataagacccaccaatgtgtgagcttgagtaacgttccctgagcccttctgcctcagtatactcatctgtaaaatgggtatgttaatagtatccacctcctcccagtgtcgtgaggatgaaatgaactgatcatcgatgtcagagccgtcgaagcatgatggaaggctcacagaaacgtgcactgaatgccctgtgctattatcgccgtgttgacgtgtgattccatccaggcttttgtcctcttccaccatagtcacgctgcatagatcgttttttccctggcttttgccagtcaacaccaccgggagcaccttccagatgacagcatgctt

SEQ ID NO: 48874 - DNA, 472 bp, Homo sapiens
tatatgaactccgcataacacctatggcaaaacatttcagcactcaggtaaaattcattttttgccacaaaattacttaaaaacaggccagaactttatatagctcttgttaaaggttaagtagctgggataataatgaaacaaaaagatgcagcaggactccatttcaaagagagagagtctgtgtgcccaacttcagagtaagaaaccactaggtaatagtttatatagttacttatatgtaatgtggctttattttttaaataaagatttgcatataattgtttatatctgtgaatttatatttaatattaaacacagttttgtaagcatataagatggaaaatgaatgaaatgctcaatcaatgagctgtatgccatgaggattcaaaacagcactttggtgttgccaaaattccggtggtggacttgtgaaggaattccctttggactaggtccactgtagattgta

SEQ ID NO: 48875 - DNA, 353 bp, Homo sapiens
tttccaatgcaataagtagaaggtgtcaaacttggtgaagcttgtcacgccgtatcacattagctcagcactgtcccaagtagatgacacttttaaaatgactttctgcttaaagaatgtgtgtgaaaaagctgcagcattcagcattgtcagaatgttaacttggataaaatcagtcaccacaatgttttgtgcaatggtcctagtaatgtcagaaatacagaaaagctagaaatacaagagttaaagttgctgcctctggctctaggaggaaatgagatagaagacagttaactactctgtttctcttcccccaatcgtgggcatccacaattactttttgatacattctg

SEQ ID NO: 48876 - DNA, 642 bp, Homo sapiens
atggatttttcatggtaaaaagaaggtttgccattaaaatttttgttggttggtttaagttaaagtaggataaatggttccactttggaaaacttgctttaaagcattacaatgaacaattttttctcattctcttattcctttatcactttttaaatgtaaagaaaattgtatttatttatttttttaaataaacaccaccttgcagaatttaataggcaaacatgttacatatgactaagtaagggtcttcaagatgaagtaaagaaaatgtaaatgttctattaccttatgcagagacaaaaaaaaaaaggagtggtgtcatttagctagcaaacaaacaaaatacagttaattggtgatatgtcctttcttttctcactatgccctcttgcctccaaaaatgacaacaaagaatcacaatttttctgataaataaatgctaaaccaagcgtttcaaactattgcattgccattcttttggactttagttattagaatgatgattgttatagggcaaatgagaaatccatgtgcatcagcttctagttgttaaaaaaaccagataaattaacttctactgtatactgtgggcagaggatcctagagctgatcctacaacatcagcttctagttgttaaa

SEQ ID NO: 48877 - DNA, 284 bp, Homo sapiens
acctctctgaggtttagtatgctcatatgtaaaaagcaaataatatctttccaaagtaatcatcctcaaatgcaagtctcactgtgtctttcccttgcttaaaaccagacacctggcctcttcctacctagtctaacctcattctcatcacttagtcctcctcttgctgcctctcatgcaagaacacaccagcaatattggatagcatgctgtttcacacctctgctcctttgcacatgctgttccagcccccaagaggccttgcctccttccctccttccctc

SEQ ID NO: 48878 - DNA, 372 bp, Homo sapiens
acaggctgggctgtccccacctctcagggaagtgcatctaagtcaggttttcccctctggcacagccctgcctccacagcccaatttccaccatgccacaggcaacccgcatttttatttatttaatttatttatttattgagacagagtcttgttctgttacccaggctggagtgcaatggcccgatgtcggctcatcccaacctccacctcctgggttcaagcgattcttctgcctcaggagagtagggagtagctgggattacaggcatgcaccaccactcccggataattttatatttttagtagagacgggttttctccatgttggtcaggctagtcttgaactccagacctcaggtgatctgcccg

SEQ ID NO: 48879 - DNA, 644 bp, Homo sapiens
aatgagccagtgtcgagaaagtcagaaatagaaatcaataaagctaaatttcaccaagaagaggcagctttgcagtggaatgatagagaacattgaggccaatggatgccaaactcaataatgcacatccttaaactctcacggattagggaaagcagaaaagaaaaccagtgtcttgggaagagtcagaagggatcagagcttgagaatacaccttgctcagtgggaagaggaaggatgggccaagcatcagaggctcagcttcttacggccgggacagcaatagcgtgatgcacaaacctcctgggagccagcgttaaacatcttcataaatcatatgtttgcagctgtgtgaccaaaatagacgtccacccagcctgtttgtcctggccttgtggaatgtggcgtgaccgtaggtcctcaaagacatctgtgattcctgcccctgcttccctcagtgccgttcatcaatcatctgtccaagcctaactctcccctctgattgccagtgacatggtcctactgattgattgattgattgatgattgactgattgattgattttcatatgagagagtttgaagcatattgtgtggagagccttttttatgccagttattcattgaaaaactcgattttcccct

SEQ ID NO: 48880 - DNA, 315 bp, Homo sapiens
gttgggggaagagggatagcataaaacgaacaaaaaagcagaaataagtaagggcaacattttgctggcatgctaatggtaacacaacaaactagctcatggagatggcatattttatcccatggcagccaatgtattagacagtgatggaccataagggagagaaagtgaggagtctgaaactctctcatgacacttggaacaagcactctgtggccctagcagtcctgttcactggtggctgcattggaaaaatccctttggtctgcttttattacatgattttgtgggcattcctattcagtaatctttttg

SEQ ID NO: 48881 - DNA, 1450 bp, Homo sapiens
gtcatcgtcgcacagtcaggccctgccctgggagaagccctgccacacgtcgtgcccacgctgagggcctgtctgcagccctcccaagacccgcagatgcgcctgaagctgttctccatcctgtccaccgcgctgctcagagccacggacaccatcaactcccaggggcagtttcccagctacctcgagacggtgacaaaggacatcctggcccccaatctgcagtggcatgcggggaggacagccgcggccatccgcacggctgccgtgtcctgcctctgggcgctcaccagcagcgaggtcctgtcggcagagcagatacgggacgtgcaggaaacactgatgccccaggtcctgaccaccctggaggaggattcgaagatgacgcgactgatctcatgccgtattatcaacacgttcttaaaaacctcgggcggcatgacggatccagagaaactcatcaagatttatcctgaactcttaaaacgcctagatgacgtgtccaacgatgtgaggatggcagccgcctccaccttggtcacctggctgcagtgtgtcaagggtgccaacgcaaaatcctactatcagagcagtgtccagtacctgtaccgagagttgctggttcaccttgacgatccagagagggccatccaggatgcaattttagaggtcctcaaagagggcagcgggctgttcccagatctcctggtgagggagacggaggccgtcatccacaagcaccgctcggccacctactgcgagcagctcctgcagcatgtgcaggccgtgccagccacacagtgaccacgctggtttcagccacggcacacccttgtccccacctgagccagagtttgtggcctttaaatctcataaacaaggcacctctgtgccagcagtgagactgtgacagcaagaaataacgaatatttctgttctggacaatgattaaatcttatgagaaatatatgtaggttatattaattcttgtccatttttgctaagcctgtgaaatactttggctctgatacaacttaacttgaataatatcttatcctgagtcttcctccaaggcagtacatattcctgccaggactgtagtaatcctttgggaactacatgtgagtaagcacttgtatgtaagccattatactgctgtaactaatgcatacaaacaattcttctctttacatttatagtctaaaaggggatatgcagtgggaaggaaaattcctgagagattccagcatagctttgtcaattccgactgagccatactgttttccacaagggctcaacacatagtcagtattccgtgctttcagtgtgtgttcagattctcctcttactggttttcttagactgtattgttctataagcaaatgcccatgtgtgatttttaagatgtgctggggaaaaataaatcaataccacaaccaccaaaaaaaaa

SEQ ID NO: 48882 - DNA, 7731 bp, Homo sapiens
ggctgccgggatgcgccgcagcgaatggtcgcgccgggcgccgctctgagtgacctttcacccgcgcccagcggttccgggcggcagcacaaggcggtagccatggcggaggcggcggctgcagcgggtgggactggcttgggcgcgggcgcgagctacgggtctgcagcggaccgggaccgggacccggacccggaccgcgccgggcggaggctgcgggttctctctggccatctgctgggccggccccgggaggctctgagtaccaatgagtgcaaagcgcggagagccgcgtcggcggccacggcagcgcccacggccactcccgccgcgcaggagtcgggcaccatcccaaagaagcggcaagaagttatgaaatggaatggatggggatataatgattctaaattcatcttcaataagaagggccaaattgaattgactgggaaaaggtaccctcttagtggcatgggtttaccaacatttaaagaatggatccaaaatacccttggagtaaatgtggagcataaaactacctctaaagcatccttaaatcctagtgatacacctccttctgttgtaaatgaagattttcttcatgaccttaaagaaactaatatttcatattcacaagaggcagatgatcgagtatttagagctcatggtcattgtcttcatgagatatttttgctcagggaaggaatgtttgagcgaattcctgatatagttttatggccaacatgccatgatgatgtagttaagattgtgaatctagcttgcaaatataatctttgtatcataccaattggtggaggaacaagtgtttcatatggcctgatgtgtcctgcagatgagacaagaacaattatttctttggacacttcacaaatgaatcgaattctctgggttgatgagaacaatttgacagctcatgtagaggctggcataacaggacaagagttggaaagacagcttaaagaaagtggttattgtacaggtcatgaaccagattccctggagttcagtactgtaggaggatgggtatctactcgcgcatcaggcatgaagaagaatatctatggcaatatcgaggacctggtggttcatataaaaatggtaacacctagaggtataatagaaaaaagctgtcaaggacctcgtatgtcaacaggccctgatatccatcacttcatcatgggatctgaaggaactcttggtgtaataacagaagctacaataaaaatcagaccagtccctgaataccaaaagtatggctcagtagctttccctaattttgaacaaggagtagcctgtttaagagaaattgcaaaacagagatgtgctccggcatctattcgcctcatggacaacaagcagtttcagtttggtcatgctcttaaacctcaggtttcctctatttttacatcatttttggacggattaaaaaagttttatattacaaagtttaaaggatttgacccaaatcagctaagtgtagccacattactgtttgagggggatcgtgagaaggttcttcaacatgaaaaacaagtgtatgatattgctgcaaaatttggtgggttggcagctggagaagataatggacagagaggttatttgctgacctatgttattgcatacattcgagacttggctttggaatactatgtattaggagaatcttttgagacttctgctccttgggacagggtggtagatctctgtagaaatgtaaaagaaagaataacaagggaatgcaaagagaagggtgttcagtttgctcctttttctacatgcagggtgacgcagacttacgatgcaggtgcttgtatctacttctattttgcctttaactacaggggaattagtgacccactgaccgtatttgaacaaactgaggcagctgctagagaagaaatccttgctaatggagggagcctgtcacatcaccatggagtgggcaagttacggaagcaatggctaaaggaaagtatctctgatgtcggctttgggatgctgaagtctgtcaaggaatatgtggaccccaataacatctttggaaacagaaaccttttataaatccattagtaccattacaaaaaaatgtcaattttttttttaagttttcaactgtggttatactagtaatcaaatatatcatggactatattttggatacatttgtttctttggtttaaaataagtttgttttcattctgtagtttgttttgtttctacatctatggattgacagatagtattcctaaatctctctcattgtaggtacatcattttacattcagcggttgtcatttcaaattttagtcaggcagcacaaagctgtcaattattccagaggaagctgctgccagctgttttgtattgttgcttcctcttggggaacaaagacagatttggtatcattgattgctcagctagcctctttttaaaagaacgtttctgggaatcagatgtctagggaaggattccactgaggagtgatacacgtgtacattgtttaagagcatagtctagtgtgagtaggccattaaggggaaggatattcatgaaagaatttaggcaacctgttatttagaaagccttcacgtctgtaaggtgcttggcctacttttttttttaaattagtatacatgcataaaaccttgtatcatcaatatacaaattattctgttaggggacatgtttttgttctccatgtttctgtttctattgtggtatgagttgtatttgtatcactgagataacctattgttatattctaattcattgataatatgttttgtaagaaaagctgacatccttcattgcaagtgaagaacaggtttaccatgaaatgaatgcctttattcaacttagagtcctaatgtttctgatttcacattcttgttgctgaaatgcagaagaaacagctacagcaagagcagaaggaaaactcttagacttaatgtctccaattgcaagaattgtttcactaaagaaacagtcatcattcaactactgaatttgaaagcctcagcagtttcaatgacaaaaatcatttttgattttttaaaattaatcccaatggcatgataaattttcatataaaaagtaaagtttcaatttagtttttaataatggtttaatgccttttttgaataactggtttaacctaattttttttaaatgtaatgtattaatgcatataccataatcaaaagtttgaaatatcctgtttcttaaataatgagaacattaatcacatttagcaagcatttgtacattcaaacctggatattaaagtgaaatgattactttgaatcactgtctgccaaggttcatgattcacattttgagatggattcttttcttaatgcaatacctaacttttgataattttttaaaactaatatttgatcagataatgtaagtcaaaatgcagacgatcctttaaaaggatgcattgtctgtgtatgtagcaacagctccaaagtatttttgggcagtttgataccttttatatctgaagtagccttaaccagaaaaatggtaatttaaaattgacaaaatgatatttttaagacttcaaaatgataaataatttttaactattaaaattggcctcaaactaataaatctgtaattaaattagaattaaatatcagtttaacaacaaaatgaaatatttattttttagaagctgcctctcttcattggtcatttatttttaattataaaatttccaacagatctttgctttaagcccttgatatttgacctagttggacacttgatgaggaagttgcctctagaattataaaaatctcagctttataaaatgcatctgttcacgaaggtaatttctttaattggtgatcaaaatataaaattaaagaaggtactaatgtctcactggaagtatatatatatatatatatatatgtatgcgtgtgtgtgtgtgtatatatatatatatatgtatatgtttctgagtaatttttaaaaaataaaacaggttaataagaagatccattcctttgcatgtgattgttataacattctttcccagggagttcaatttcagcaacctcagaaatccatacttgatattaggaaactgtaaatgtaacacctgaaattattatgttcactattctacatgaaccttatggaaattcatgatttatgtctttgtttttctttttccaagtatatgcaggactccccaaccttgattttataatggtgactgcattttgtaggtggaatcatttctaccgaaatcattttgaaacacaagaatattgatcagtactgtttcactctgatttagtaaatcagaaagcctccccctacccccagcccccactttcacataccttctgggaggtgcctcagtatagacttggtatctgtgaaggactgagttcatgaatatgcacagaagcacttaaaccatgcctcttatttctataatatctgaaaatggcttcataaaagttaagtcaggagaacactgtttacatgacacttcttaactcatttttaatgtttatttttaatttcaaaaacttgttgcctatttggttttcagtactgcataacactgactttcttaaattagtcatagttgcaataatttacttaaatttggtaatgtcacatttgggttggggtttcagtgggaatagtaacttgccgctagtgagaaatggcattgaatactaaagactcaatatgaacaggctttatagacccttagagaaactgttgccttaatgtttggtgcaatttctagtagtgcataagtgaatttagtcttatgataagtaactttgagctgtttttagcttagtaagaattgtggaaaccacatgtttattgtgcccatcattttacacaaagaaaagaggattatattatttcttctaaggaagtaggagttttcttcctaaaagtgcttacatattgtagtactattacttaaaagttatttatgaagttgggagccttctagtttgcctgtgttgatgtattttgaaaacaaaattgcaataaaggatgagcttccatcggtgtgtatggtataccagatacagatggttgcaaggaaaccttttcccccactagaatagtctattagtaactgctaagtcctagcttgcatttttgaaaatgcctttctgcatgttagcacccagactttcctttgtcatattcctttatagctacaacttaactgtagcttatcagagaagctctgtagtcctacactgaagtgtgttcccttggctgttcatatggggctgggtttggttgaacttccattctgtataaatgctagaacacagttactacagattgattcacaaactgcatgtgctggtgcttgaggcagccaaaatggaatgctgtggaaagcatatctatatcttaaaaaacactcagacaggagttaaggacagctttaataatttttttgtttaccacttaatctttatcaactttgattttagttagggcttagctcatggttgaagaaaagtggaaaataacaagtgcccatttaggtttgaagaatccagaatgttttacctttgactttatgagttatagaagcttggctttgctctaggtttcatgttcccaaatgagccatctgtcagtatattcacttaattcttactaatttcagtttcctgtaaaggaaacaacttacatattgatgcttaaatccagaaagtgtaaaaggttttcttaaactgttaaaatatagtgtctgatataaaggatgtaagttactcagctttctgctccctaagccaaacagtgtttgtcttcagtgtgaaatttaactgtaaaaactacttgtaatgtcaagagattatagatcatattattaataaaatggacctgggtctaatatttttttttcttcaaaagggagtgtgaagctgtttattcttttatttgcatatgagtttttcttttagttttagtttttcatgttcatatttccactgatttgaaaacacaaaatttatttttataattttgttgcttgtagcataatcaagtgcaaaatcaagtgcaacctacttgtgactaaatctctttggatttatagctgaggatattgttagctaggttttgtcaatccctaatcattttttaaaatcaatgctgtattcccaggaggctttgagactcctatgaacctgaagcactcccttttgaaccttggaagatcctcaaagagtgagcactcttgtgctcttctaatcataattaattccttaacaaatcagagtaaggaccactgacatatagaacactcaagccaaagaaccatcacagaatttagtaactttagttctgtgaacatgaaaagatttcttttttggtttccaaaggagattatttatttttccacaaggaaaaacatcttgcagagactctgaattccaaatctgagtgagaaagaaaaggaaaaaaatctgtttcatggtggatttctaagcaacatatatacatgtttttaagacaaccttttgttggcagtgtttttcctgaacaccatatgcaccctaggaaacatgtttttcctttaatcttgttcacatatcagaaaaggacatgaaatgctcatactggcatacaagtttctataagtagttattttttgagctacttatactatatccccaaaagctcacagtgccttgttgggattttttttttccatgaactagccattattttaaatgagtgggagagggtaagtctttagacagaggtcattcagcagttcaagactattcctcttcaagaacatgtcaggaattaagcagttatatgtggaaacactggtaattctttccacagtgttgttttggataatctgttctagtatatttaactaattgtatggtggacctgtactctgatacacatcgaatcagtcaatgggatttgtatgtgcttttccttcctacattttcattcctactgccccaacctagtagccctaagttgtggcttggtgggtttggcactgagcctcaagacactcactacattctttctggatgtttgctcacaggctccctgaggagcagaacctgtggagctggggagtgcgggtggtttctattcctaatattgtgtgtcagtcctttttcgtgtgatggtgccttcagaataacgaatatttctgttctggacaatgattaaatcttatgagaaatatatgtaggttatattaattcttgtccatttttgctaagcctgtgaaatactttggctctgatacaacttaacttgaataatatcttatcctgagtcttcctccaaggcagtacatattcctgccaggactgtagtaatcctttgggaactacatgtgagtaagcacttgtatgtaagccattatactgctgtaactaatgcatacaaacaattcttctctttacatttatagtctaaaaggggatatgcagtgggaaggaaaattcctgagagattccagcatagctttgtcaattccgactgagccatactgttttccacaagggctcaacacatagtcagtattccgtgctttcagtgtgtgttcagattctcctcttactggttttcttagactgtattgttctataagcaaatgcccatgtgtgatttttaagatgtgctggggaaaaataaatcaataccacaaccaccaaaaaaaaa

SEQ ID NO: 48883 - DNA, 5927 bp, Homo sapiens
ggctgccgggatgcgccgcagcgaatggtcgcgccgggcgccgctctgagtgacctttcacccgcgcccagcggttccgggcggcagcacaaggcggtagccatggcggaggcggcggctgcagcgggtgggactggcttgggcgcgggcgcgagctacgggtctgcagcggaccgggaccgggacccggacccggaccgcgccgggcggaggctgcgggttctctctggccatctgctgggccggccccgggaggctctgagtaccaatgagtgcaaagcgcggagagccgcgtcggcggccacggcagcgcccacggccactcccgccgcgcaggagtcgggcaccatcccaaagaagcggcaagaagttatgaaatggaatggatggggatataatgattctaaattcatcttcaataagaagggccaaattgaattgactgggaaaaggtaccctcttagtggcatgggtttaccaacatttaaagaatggatccaaaatacccttggagtaaatgtggagcataaaactacctctaaagcatccttaaatcctagtgatacacctccttctgttgtaaatgaagattttcttcatgaccttaaagaaactaatatttcatattcacaagaggcagatgatcgagtatttagagctcatggtcattgtcttcatgagatatttttgctcagggaaggaatgtttgagcgaattcctgatatagttttatggccaacatgccatgatgatgtagttaagattgtgaatctagcttgcaaatataatctttgtatcataccaattggtggaggaacaagtgtttcatatggcctgatgtgtcctgcagatgagacaagaacaattatttctttggacacttcacaaatgaatcgaattctctgggttgatgagaacaatttgacagctcatgtagaggctggcataacaggacaagagttggaaagacagcttaaagaaagtggttattgtacaggtcatgaaccagattccctggagttcagtactgtaggaggatgggtatctactcgcgcatcaggcatgaagaagaatatctatggcaatatcgaggacctggtggttcatataaaaatggtaacacctagaggtataatagaaaaaagctgtcaaggacctcgtatgtcaacaggccctgatatccatcacttcatcatgggatctgaaggaactcttggtgtaataacagaagctacaataaaaatcagaccagtccctgaataccaaaagtatggctcagtagctttccctaattttgaacaaggagtagcctgtttaagagaaattgcaaaacagagatgtgctccggcatctattcgcctcatggacaacaagcagtttcagtttggtcatgctcttaaacctcaggtttcctctatttttacatcatttttggacggattaaaaaagttttatattacaaagtttaaaggatttgacccaaatcagctaagtgtagccacattactgtttgagggggatcgtgagaaggttcttcaacatgaaaaacaagtgtatgatattgctgcaaaatttggtgggttggcagctggagaagataatggacagagaggttatttgctgacctatgttattgcatacattcgagacttggctttggaatactatgtattaggagaatcttttgagacttctgctccttgggacagggtggtagatctctgtagaaatgtaaaagaaagaataacaagggaatgcaaagagaagggtgttcagtttgctcctttttctacatgcagggtgacgcagacttacgatgcaggtgcttgtatctacttctattttgcctttaactacaggggaattagtgacccactgaccgtatttgaacaaactgaggcagctgctagagaagaaatccttgctaatggagggagcctgtcacatcaccatggagtgggcaagttacggaagcaatggctaaaggaaagtatctctgatgtcggctttgggatgctgaagtctgtcaaggaatatgtggaccccaataacatctttggaaacagaaaccttttataaatccattagtaccattacaaaaaaatgtcaattttttttttaagttttcaactgtggttatactagtaatcaaatatatcatggactatattttggatacatttgtttctttggtttaaaataagtttgttttcattctgtagtttgttttgtttctacatctatggattgacagatagtattcctaaatctctctcattgtaggtacatcattttacattcagcggttgtcatttcaaattttagtcaggcagcacaaagctgtcaattattccagaggaagctgctgccagctgttttgtattgttgcttcctcttggggaacaaagacagatttggtatcattgattgctcagctagcctctttttaaaagaacgtttctgggaatcagatgtctagggaaggattccactgaggagtgatacacgtgtacattgtttaagagcatagtctagtgtgagtaggccattaaggggaaggatattcatgaaagaatttaggcaacctgttatttagaaagccttcacgtctgtaaggtgcttggcctacttttttttttaaattagtatacatgcataaaaccttgtatcatcaatatacaaattattctgttaggggacatgtttttgttctccatgtttctgtttctattgtggtatgagttgtatttgtatcactgagataacctattgttatattctaattcattgataatatgttttgtaagaaaagctgacatccttcattgcaagtgaagaacaggtttaccatgaaatgaatgcctttattcaacttagagtcctaatgtttctgatttcacattcttgttgctgaaatgcagaagaaacagctacagcaagagcagaaggaaaactcttagacttaatgtctccaattgcaagaattgtttcactaaagaaacagtcatcattcaactactgaatttgaaagcctcagcagtttcaatgacaaaaatcatttttgattttttaaaattaatcccaatggcatgataaattttcatataaaaagtaaagtttcaatttagtttttaataatggtttaatgccttttttgaataactggtttaacctaattttttttaaatgtaatgtattaatgcatataccataatcaaaagtttgaaatatcctgtttcttaaataatgagaacattaatcacatttagcaagcatttgtacattcaaacctggatattaaagtgaaatgattactttgaatcactgtctgccaaggttcatgattcacattttgagatggattcttttcttaatgcaatacctaacttttgataattttttaaaactaatatttgatcagataatgtaagtcaaaatgcagacgatcctttaaaaggatgcattgtctgtgtatgtagcaacagctccaaagtatttttgggcagtttgataccttttatatctgaagtagccttaaccagaaaaatggtaatttaaaattgacaaaatgatatttttaagacttcaaaatgataaataatttttaactattaaaattggcctcaaactaataaatctgtaattaaattagaattaaatatcagtttaacaacaaaatgaaatatttattttttagaagctgcctctcttcattggtcatttatttttaattataaaatttccaacagatctttgctttaagcccttgatatttgacctagttggacacttgatgaggaagttgcctctagaattataaaaatctcagctttataaaatgcatctgttcacgaaggtaatttctttaattggtgatcaaaatataaaattaaagaaggtactaatgtctcactggaagtatatatatatatatatatatatgtatgcgtgtgtgtgtgtgtatatatatatatatatgtatatgtttctgagtaatttttaaaaaataaaacaggttaataagaagatccattcctttgcatgtgattgttataacattctttcccagggagttcaatttcagcaacctcagaaatccatacttgatattaggaaactgtaaatgtaacacctgaaattattatgttcactattctacatgaaccttatggaaattcatgatttatgtctttgtttttctttttccaagtatatgcaggactccccaaccttgattttataatggtgactgcattttgtaggtggaatcatttctaccgaaatcattttgaaacacaagaatattgatcagtactgtttcactctgatttagtaaatcagaaagcctccccctacccccagcccccactttcacataccttctgggaggtgcctcagtatagacttggtatctgtgaaggactgagttcatgaatatgcacagaagcacttaaaccatgcctcttatttctataatatctgaaaatggcttcataaaagttaagtcaggagaacactgtttacatgacacttcttaactcatttttaatgtttatttttaatttcaaaaacttgttgcctatttggttttcagtactgcataacactgactttcttaaattagtcatagttgcaataatttacttaaatttggtaatgtcacatttgggttggggtttcagtgggaatagtaacttgccgctagtgagaaatggcattgaatactaaagactcaatatgaacaggctttatagacccttagagaaactgttgccttaatgtttggtgcaatttctagtagtgcataagtgaatttagtcttatgataagtaactttgagctgtttttagcttagtaagaattgtggaaaccacatgtttattgtgcccatcattttacacaaagaaaagaggattatattatttcttctaaggaagtaggagttttcttcctaaaagtgcttacatattgtagtactattacttaaaagttatttatgaagttgggagccttctagtttgcctgtgttgatgtattttgaaaacaaaattgcaataaaggatgagcttccatcggtgtgtatggtataccagatacagatggttgcaaggaaaccttttcccccactagaatagtctattagtaactgctaagtcctagcttgcatttttgaaaatgcctttctgcatgttagcacccagactttcctttgtcatattcctttatagctacaacttaactgtagcttatcagagaagctctgtagtcctacactgaagtgtgttcccttggctgttcatatggggctgggtttggttgaacttccattctgtataaatgctagaacacagttactacagattgattcacaaactgcatgtgctggtgcttgaggcagccaaaatggaatgctgtggaaagcatatctatatcttaaaaaacactcagacaggagttaaggacagctttaataatttttttgtttaccacttaatctttatcaactttgattttagttagggcttagctcatggttgaagaaaagtggaaaataacaagtgcccatttaggtttgaagaatccagaatgttttacctttgactttatgagttatagaagcttggctttgctctaggtttcatgttcccaaatgagccatctgtcagtatattcacttaattcttactaatttcagtttcctgtaaaggaaacaacttacatattgatgcttaaatccagaaagtgtaaaaggttttcttaaactgttaaaatatagtgtctgatataaaggatgtaagttactcagctttctgctccctaagccaaacagtgtttgtcttcagtgtgaaatttaactgtaaaaactacttgtaatgtcaagagattatagatcatattattaataaaatggacctgggtctaatatt

SEQ ID NO: 48884 - DNA, 7204 bp, Homo sapiens
ggctgccgggatgcgccgcagcgaatggtcgcgccgggcgccgctctgagtgacctttcacccgcgcccagcggttccgggcggcagcacaaggcggtagccatggcggaggcggcggctgcagcgggtgggactggcttgggcgcgggcgcgagctacgggtctgcagcggaccgggaccgggacccggacccggaccgcgccgggcggaggctgcgggttctctctggccatctgctgggccggccccgggaggctctgagtaccaatgagtgcaaagcgcggagagccgcgtcggcggccacggcagcgcccacggccactcccgccgcgcaggagtcgggcaccatcccaaagaagcggcaagaagttatgaaatggaatggatggggatataatgattctaaattcatcttcaataagaagggccaaattgaattgactgggaaaaggtaccctcttagtggcatgggtttaccaacatttaaagaatggatccaaaatacccttggagtaaatgtggagcataaaactacctctaaagcatccttaaatcctagtgatacacctccttctgttgtaaatgaagattttcttcatgaccttaaagaaactaatatttcatattcacaagaggcagatgatcgagtatttagagctcatggtcattgtcttcatgagatatttttgctcagggaaggaatgtttgagcgaattcctgatatagttttatggccaacatgccatgatgatgtagttaagattgtgaatctagcttgcaaatataatctttgtatcataccaattggtggaggaacaagtgtttcatatggcctgatgtgtcctgcagatgagacaagaacaattatttctttggacacttcacaaatgaatcgaattctctgggttgatgagaacaatttgacagctcatgtagaggctggcataacaggacaagagttggaaagacagcttaaagaaagtggttattgtacaggtcatgaaccagattccctggagttcagtactgtaggaggatgggtatctactcgcgcatcaggcatgaagaagaatatctatggcaatatcgaggacctggtggttcatataaaaatggtaacacctagaggtataatagaaaaaagctgtcaaggacctcgtatgtcaacaggccctgatatccatcacttcatcatgggatctgaaggaactcttggtgtaataacagaagctacaataaaaatcagaccagtccctgaataccaaaagtatggctcagtagctttccctaattttgaacaaggagtagcctgtttaagagaaattgcaaaacagagatgtgctccggcatctattcgcctcatggacaacaagcagtttcagtttggtcatgctcttaaacctcaggtttcctctatttttacatcatttttggacggattaaaaaagttttatattacaaagtttaaaggatttgacccaaatcagctaagtgtagccacattactgtttgagggggatcgtgagaaggttcttcaacatgaaaaacaagtgtatgatattgctgcaaaatttggtgggttggcagctggagaagataatggacagagaggttatttgctgacctatgttattgcatacattcgagacttggctttggaatactatgtattaggagaatcttttgagacttctgctccttgggacagggtggtagatctctgtagaaatgtaaaagaaagaataacaagggaatgcaaagagaagggtgttcagtttgctcctttttctacatgcagggtgacgcagacttacgatgcaggtgcttgtatctacttctattttgcctttaactacaggggaattagtgacccactgaccgtatttgaacaaactgaggcagctgctagagaagaaatccttgctaatggagggagcctgtcacatcaccatggagtgggcaagttacggaagcaatggctaaaggaaagtatctctgatgtcggctttgggatgctgaagtctgtcaaggaatatgtggaccccaataacatctttggaaacagaaaccttttataaatccattagtaccattacaaaaaaatgtcaattttttttttaagttttcaactgtggttatactagtaatcaaatatatcatggactatattttggatacatttgtttctttggtttaaaataagtttgttttcattctgtagtttgttttgtttctacatctatggattgacagatagtattcctaaatctctctcattgtaggtacatcattttacattcagcggttgtcatttcaaattttagtcaggcagcacaaagctgtcaattattccagaggaagctgctgccagctgttttgtattgttgcttcctcttggggaacaaagacagatttggtatcattgattgctcagctagcctctttttaaaagaacgtttctgggaatcagatgtctagggaaggattccactgaggagtgatacacgtgtacattgtttaagagcatagtctagtgtgagtaggccattaaggggaaggatattcatgaaagaatttaggcaacctgttatttagaaagccttcacgtctgtaaggtgcttggcctacttttttttttaaattagtatacatgcataaaaccttgtatcatcaatatacaaattattctgttaggggacatgtttttgttctccatgtttctgtttctattgtggtatgagttgtatttgtatcactgagataacctattgttatattctaattcattgataatatgttttgtaagaaaagctgacatccttcattgcaagtgaagaacaggtttaccatgaaatgaatgcctttattcaacttagagtcctaatgtttctgatttcacattcttgttgctgaaatgcagaagaaacagctacagcaagagcagaaggaaaactcttagacttaatgtctccaattgcaagaattgtttcactaaagaaacagtcatcattcaactactgaatttgaaagcctcagcagtttcaatgacaaaaatcatttttgattttttaaaattaatcccaatggcatgataaattttcatataaaaagtaaagtttcaatttagtttttaataatggtttaatgccttttttgaataactggtttaacctaattttttttaaatgtaatgtattaatgcatataccataatcaaaagtttgaaatatcctgtttcttaaataatgagaacattaatcacatttagcaagcatttgtacattcaaacctggatattaaagtgaaatgattactttgaatcactgtctgccaaggttcatgattcacattttgagatggattcttttcttaatgcaatacctaacttttgataattttttaaaactaatatttgatcagataatgtaagtcaaaatgcagacgatcctttaaaaggatgcattgtctgtgtatgtagcaacagctccaaagtatttttgggcagtttgataccttttatatctgaagtagccttaaccagaaaaatggtaatttaaaattgacaaaatgatatttttaagacttcaaaatgataaataatttttaactattaaaattggcctcaaactaataaatctgtaattaaattagaattaaatatcagtttaacaacaaaatgaaatatttattttttagaagctgcctctcttcattggtcatttatttttaattataaaatttccaacagatctttgctttaagcccttgatatttgacctagttggacacttgatgaggaagttgcctctagaattataaaaatctcagctttataaaatgcatctgttcacgaaggtaatttctttaattggtgatcaaaatataaaattaaagaaggtactaatgtctcactggaagtatatatatatatatatatatatgtatgcgtgtgtgtgtgtgtatatatatatatatatgtatatgtttctgagtaatttttaaaaaataaaacaggttaataagaagatccattcctttgcatgtgattgttataacattctttcccagggagttcaatttcagcaacctcagaaatccatacttgatattaggaaactgtaaatgtaacacctgaaattattatgttcactattctacatgaaccttatggaaattcatgatttatgtctttgtttttctttttccaagtatatgcaggactccccaaccttgattttataatggtgactgcattttgtaggtggaatcatttctaccgaaatcattttgaaacacaagaatattgatcagtactgtttcactctgatttagtaaatcagaaagcctccccctacccccagcccccactttcacataccttctgggaggtgcctcagtatagacttggtatctgtgaaggactgagttcatgaatatgcacagaagcacttaaaccatgcctcttatttctataatatctgaaaatggcttcataaaagttaagtcaggagaacactgtttacatgacacttcttaactcatttttaatgtttatttttaatttcaaaaacttgttgcctatttggttttcagtactgcataacactgactttcttaaattagtcatagttgcaataatttacttaaatttggtaatgtcacatttgggttggggtttcagtgggaatagtaacttgccgctagtgagaaatggcattgaatactaaagactcaatatgaacaggctttatagacccttagagaaactgttgccttaatgtttggtgcaatttctagtagtgcataagtgaatttagtcttatgataagtaactttgagctgtttttagcttagtaagaattgtggaaaccacatgtttattgtgcccatcattttacacaaagaaaagaggattatattatttcttctaaggaagtaggagttttcttcctaaaagtgcttacatattgtagtactattacttaaaagttatttatgaagttgggagccttctagtttgcctgtgttgatgtattttgaaaacaaaattgcaataaaggatgagcttccatcggtgtgtatggtataccagatacagatggttgcaaggaaaccttttcccccactagaatagtctattagtaactgctaagtcctagcttgcatttttgaaaatgcctttctgcatgttagcacccagactttcctttgtcatattcctttatagctacaacttaactgtagcttatcagagaagctctgtagtcctacactgaagtgtgttcccttggctgttcatatggggctgggtttggttgaacttccattctgtataaatgctagaacacagttactacagattgattcacaaactgcatgtgctggtgcttgaggcagccaaaatggaatgctgtggaaagcatatctatatcttaaaaaacactcagacaggagttaaggacagctttaataatttttttgtttaccacttaatctttatcaactttgattttagttagggcttagctcatggttgaagaaaagtggaaaataacaagtgcccatttaggtttgaagaatccagaatgttttacctttgactttatgagttatagaagcttggctttgctctaggtttcatgttcccaaatgagccatctgtcagtatattcacttaattcttactaatttcagtttcctgtaaaggaaacaacttacatattgatgcttaaatccagaaagtgtaaaaggttttcttaaactgttaaaatatagtgtctgatataaaggatgtaagttactcagctttctgctccctaagccaaacagtgtttgtcttcagtgtgaaatttaactgtaaaaactacttgtaatgtcaagagattatagatcatattattaataaaatggacctgggtctaatatttttttttcttcaaaagggagtgtgaagctgtttattcttttatttgcatatgagtttttcttttagttttagtttttcatgttcatatttccactgatttgaaaacacaaaatttatttttataattttgttgcttgtagcataatcaagtgcaaaatcaagtgcaacctacttgtgactaaatctctttggatttatagctgaggatattgttagctaggttttgtcaatccctaatcattttttaaaatcaatgctgtattcccaggaggctttgagactcctatgaacctgaagcactcccttttgaaccttggaagatcctcaaagagtgagcactcttgtgctcttctaatcataattaattccttaacaaatcagagtaaggaccactgacatatagaacactcaagccaaagaaccatcacagaatttagtaactttagttctgtgaacatgaaaagatttcttttttggtttccaaaggagattatttatttttccacaaggaaaaacatcttgcagagactctgaattccaaatctgagtgagaaagaaaaggaaaaaaatctgtttcatggtggatttctaagcaacatatatacatgtttttaagacaaccttttgttggcagtgtttttcctgaacaccatatgcaccctaggaaacatgtttttcctttaatcttgttcacatatcagaaaaggacatgaaatgctcatactggcatacaagtttctataagtagttattttttgagctacttatactatatccccaaaagctcacagtgccttgttgggattttttttttccatgaactagccattattttaaatgagtgggagagggtaagtctttagacagaggtcattcagcagttcaagactattcctcttcaagaacatgtcaggaattaagcagttatatgtggaaacactggtaattctttccacagtgttgttttggataatctgttctagtatatttaactaattgtatggtggacctgtactctgatacacatcgaatcagtcaatgggatttgtatgtgcttttccttcctacattttcattcctactgccccaacctagtagcccatactgttttccacaagggctcaacacatagtcagtattccgtgctttcagtgtgtgttcagattctcctcttactggttttcttagactgtattgttctataagcaaatgcccatgtgtgatttttaagatgtgctggggaaaaataaatcaataccacaaccaccaaaaaaaaa

SEQ ID NO: 48885 - DNA, 5542 bp, Homo sapiens
ggctgccgggatgcgccgcagcgaatggtcgcgccgggcgccgctctgagtgacctttcacccgcgcccagcggttccgggcggcagcacaaggcggtagccatggcggaggcggcggctgcagcgggtgggactggcttgggcgcgggcgcgagctacgggtctgcagcggaccgggaccgggacccggacccggaccgcgccgggcggaggctgcgggttctctctggccatctgctgggccggccccgggaggctctgagtaccaatgagtgcaaagcgcggagagccgcgtcggcggccacggcagcgcccacggccactcccgccgcgcaggagtcgggcaccatcccaaagaagcggcaagaagttatgaaatggaatggatggggatataatgattctaaattcatcttcaataagaagggccaaattgaattgactgggaaaaggtaccctcttagtggcatgggtttaccaacatttaaagaatggatccaaaatacccttggagtaaatgtggagcataaaactacctctaaagcatccttaaatcctagtgatacacctccttctgttgtaaatgaagattttcttcatgaccttaaagaaactaatatttcatattcacaagaggcagatgatcgagtatttagagctcatggtcattgtcttcatgagatatttttgctcagggaaggaatgtttgagcgaattcctgatatagttttatggccaacatgccatgatgatgtagttaagattgtgaatctagcttgcaaatataatctttgtatcataccaattggtggaggaacaagtgtttcatatggcctgatgtgtcctgcagatgagacaagaacaattatttctttggacacttcacaaatgaatcgaattctctgggttgatgagaacaatttgacagctcatgtagaggctggcataacaggacaagagttggaaagacagcttaaagaaagtggttattgtacaggtcatgaaccagattccctggagttcagtactgtaggaggatgggtatctactcgcgcatcaggcatgaagaagaatatctatggcaatatcgaggacctggtggttcatataaaaatggtaacacctagaggtataatagaaaaaagctgtcaaggacctcgtatgtcaacaggccctgatatccatcacttcatcatgggatctgaaggaactcttggtgtaataacagaagctacaataaaaatcagaccagtccctgaataccaaaagtatggctcagtagctttccctaattttgaacaaggagtagcctgtttaagagaaattgcaaaacagagatgtgctccggcatctattcgcctcatggacaacaagcagtttcagtttggtcatgctcttaaacctcaggtttcctctatttttacatcatttttggacggattaaaaaagttttatattacaaagtttaaaggatttgacccaaatcagctaagtgtagccacattactgtttgagggggatcgtgagaaggttcttcaacatgaaaaacaagtgtatgatattgctgcaaaatttggtgggttggcagctggagaagataatggacagagaggttatttgctgacctatgttattgcatacattcgagacttggctttggaatactatgtattaggagaatcttttgagacttctgctccttgggacagggtggtagatctctgtagaaatgtaaaagaaagaataacaagggaatgcaaagagaagggtgttcagtttgctcctttttctacatgcagggtgacgcagacttacgatgcaggtgcttgtatctacttctattttgcctttaactacaggggaattagtgacccactgaccgtatttgaacaaactgaggcagctgctagagaagaaatccttgctaatggagggagcctgtcacatcaccatggagtgggcaagttacggaagcaatggctaaaggaaagtatctctgatgtcggctttgggatgctgaagtctgtcaaggaatatgtggaccccaataacatctttggaaacagaaaccttttataaatccattagtaccattacaaaaaaatgtcaattttttttttaagttttcaactgtggttatactagtaatcaaatatatcatggactatattttggatacatttgtttctttggtttaaaataagtttgttttcattctgtagtttgttttgtttctacatctatggattgacagatagtattcctaaatctctctcattgtaggtacatcattttacattcagcggttgtcatttcaaattttagtcaggcagcacaaagctgtcaattattccagaggaagctgctgccagctgttttgtattgttgcttcctcttggggaacaaagacagatttggtatcattgattgctcagctagcctctttttaaaagaacgtttctgggaatcagatgtctagggaaggattccactgaggagtgatacacgtgtacattgtttaagagcatagtctagtgtgagtaggccattaaggggaaggatattcatgaaagaatttaggcaacctgttatttagaaagccttcacgtctgtaaggtgcttggcctacttttttttttaaattagtatacatgcataaaaccttgtatcatcaatatacaaattattctgttaggggacatgtttttgttctccatgtttctgtttctattgtggtatgagttgtatttgtatcactgagataacctattgttatattctaattcattgataatatgttttgtaagaaaagctgacatccttcattgcaagtgaagaacaggtttaccatgaaatgaatgcctttattcaacttagagtcctaatgtttctgatttcacattcttgttgctgaaatgcagaagaaacagctacagcaagagcagaaggaaaactcttagacttaatgtctccaattgcaagaattgtttcactaaagaaacagtcatcattcaactactgaatttgaaagcctcagcagtttcaatgacaaaaatcatttttgattttttaaaattaatcccaatggcatgataaattttcatataaaaagtaaagtttcaatttagtttttaataatggtttaatgccttttttgaataactggtttaacctaattttttttaaatgtaatgtattaatgcatataccataatcaaaagtttgaaatatcctgtttcttaaataatgagaacattaatcacatttagcaagcatttgtacattcaaacctggatattaaagtgaaatgattactttgaatcactgtctgccaaggttcatgattcacattttgagatggattcttttcttaatgcaatacctaacttttgataattttttaaaactaatatttgatcagataatgtaagtcaaaatgcagacgatcctttaaaaggatgcattgtctgtgtatgtagcaacagctccaaagtatttttgggcagtttgataccttttatatctgaagtagccttaaccagaaaaatggtaatttaaaattgacaaaatgatatttttaagacttcaaaatgataaataatttttaactattaaaattggcctcaaactaataaatctgtaattaaattagaattaaatatcagtttaacaacaaaatgaaatatttattttttagaagctgcctctcttcattggtcatttatttttaattataaaatttccaacagatctttgctttaagcccttgatatttgacctagttggacacttgatgaggaagttgcctctagaattataaaaatctcagctttataaaatgcatctgttcacgaaggtaatttctttaattggtgatcaaaatataaaattaaagaaggtactaatgtctcactggaagtatatatatatatatatatatatgtatgcgtgtgtgtgtgtgtatatatatatatatatgtatatgtttctgagtaatttttaaaaaataaaacaggttaataagaagatccattcctttgcatgtgattgttataacattctttcccagggagttcaatttcagcaacctcagaaatccatacttgatattaggaaactgtaaatgtaacacctgaaattattatgttcactattctacatgaaccttatggaaattcatgatttatgtctttgtttttctttttccaagtatatgcaggactccccaaccttgattttataatggtgactgcattttgtaggtggaatcatttctaccgaaatcattttgaaacacaagaatattgatcagtactgtttcactctgatttagtaaatcagaaagcctccccctacccccagcccccactttcacataccttctgggaggtgcctcagtatagacttggtatctgtgaaggactgagttcatgaatatgcacagaagcacttaaaccatgcctcttatttctataatatctgaaaatggcttcataaaagttaagtcaggagaacactgtttacatgacacttcttaactcatttttaatgtttatttttaatttcaaaaacttgttgcctatttggttttcagtactgcataacactgactttcttaaattagtcatagttgcaataatttacttaaatttggtaatgtcacatttgggttggggtttcagtgggaatagtaacttgccgctagtgagaaatggcattgaatactaaagactcaatatgaacaggctttatagacccttagagaaactgttgccttaatgtttggtgcaatttctagtagtgcataagtgaatttagtcttatgataagtaactttgagctgtttttagcttagtaagaattgtggaaaccacatgtttattgtgcccatcattttacacaaagaaaagaggattatattatttcttctaaggaagtaggagttttcttcctaaaagtgcttacatattgtagtactattacttaaaagttatttatgaagttgggagccttctagtttgcctgtgttgatgtattttgaaaacaaaattgcaataaaggatgagcttccatcggtgtgtatggtataccagatacagatggttgcaaggaaaccttttcccccactagaatagtctattactcatggttgaagaaaagtggaaaataacaagtgcccatttaggtttgaagaatccagaatgttttacctttgactttatgagttatagaagcttggctttgctctaggtttcatgttcccaaatgagccatctgtcagtatattcacttaattcttactaatttcagtttcctgtaaaggaaacaacttacatattgatgcttaaatccagaaagtgtaaaaggttttcttaaactgttaaaatatagtgtctgatataaaggatgtaagttactcagctttctgctccctaagccaaacagtgtttgtcttcagtgtgaaatttaactgtaaaaactacttgtaatgtcaagagattatagatcatattattaataaaatggacctgggtctaatatt

SEQ ID NO: 48886 - DNA, 7692 bp, Homo sapiens
ggctgccgggatgcgccgcagcgaatggtcgcgccgggcgccgctctgagtgacctttcacccgcgcccagcggttccgggcggcagcacaaggcggtagccatggcggaggcggcggctgcagcgggtgggactggcttgggcgcgggcgcgagctacgggtctgcagcggaccgggaccgggacccggacccggaccgcgccgggcggaggctgcgggttctctctggccatctgctgggccggccccgggaggctctgagtaccaatgagtgcaaagcgcggagagccgcgtcggcggccacggcagcgcccacggccactcccgccgcgcaggagtcgggcaccatcccaaagaagcggcaagaagttatgaaatggaatggatggggatataatgattctaaattcatcttcaataagaagggccaaattgaattgactgggaaaaggtaccctcttagtggcatgggtttaccaacatttaaagaatggatccaaaatacccttggagtaaatgtggagcataaaactacctctaaaaatgaagattttcttcatgaccttaaagaaactaatatttcatattcacaagaggcagatgatcgagtatttagagctcatggtcattgtcttcatgagatatttttgctcagggaaggaatgtttgagcgaattcctgatatagttttatggccaacatgccatgatgatgtagttaagattgtgaatctagcttgcaaatataatctttgtatcataccaattggtggaggaacaagtgtttcatatggcctgatgtgtcctgcagatgagacaagaacaattatttctttggacacttcacaaatgaatcgaattctctgggttgatgagaacaatttgacagctcatgtagaggctggcataacaggacaagagttggaaagacagcttaaagaaagtggttattgtacaggtcatgaaccagattccctggagttcagtactgtaggaggatgggtatctactcgcgcatcaggcatgaagaagaatatctatggcaatatcgaggacctggtggttcatataaaaatggtaacacctagaggtataatagaaaaaagctgtcaaggacctcgtatgtcaacaggccctgatatccatcacttcatcatgggatctgaaggaactcttggtgtaataacagaagctacaataaaaatcagaccagtccctgaataccaaaagtatggctcagtagctttccctaattttgaacaaggagtagcctgtttaagagaaattgcaaaacagagatgtgctccggcatctattcgcctcatggacaacaagcagtttcagtttggtcatgctcttaaacctcaggtttcctctatttttacatcatttttggacggattaaaaaagttttatattacaaagtttaaaggatttgacccaaatcagctaagtgtagccacattactgtttgagggggatcgtgagaaggttcttcaacatgaaaaacaagtgtatgatattgctgcaaaatttggtgggttggcagctggagaagataatggacagagaggttatttgctgacctatgttattgcatacattcgagacttggctttggaatactatgtattaggagaatcttttgagacttctgctccttgggacagggtggtagatctctgtagaaatgtaaaagaaagaataacaagggaatgcaaagagaagggtgttcagtttgctcctttttctacatgcagggtgacgcagacttacgatgcaggtgcttgtatctacttctattttgcctttaactacaggggaattagtgacccactgaccgtatttgaacaaactgaggcagctgctagagaagaaatccttgctaatggagggagcctgtcacatcaccatggagtgggcaagttacggaagcaatggctaaaggaaagtatctctgatgtcggctttgggatgctgaagtctgtcaaggaatatgtggaccccaataacatctttggaaacagaaaccttttataaatccattagtaccattacaaaaaaatgtcaattttttttttaagttttcaactgtggttatactagtaatcaaatatatcatggactatattttggatacatttgtttctttggtttaaaataagtttgttttcattctgtagtttgttttgtttctacatctatggattgacagatagtattcctaaatctctctcattgtaggtacatcattttacattcagcggttgtcatttcaaattttagtcaggcagcacaaagctgtcaattattccagaggaagctgctgccagctgttttgtattgttgcttcctcttggggaacaaagacagatttggtatcattgattgctcagctagcctctttttaaaagaacgtttctgggaatcagatgtctagggaaggattccactgaggagtgatacacgtgtacattgtttaagagcatagtctagtgtgagtaggccattaaggggaaggatattcatgaaagaatttaggcaacctgttatttagaaagccttcacgtctgtaaggtgcttggcctacttttttttttaaattagtatacatgcataaaaccttgtatcatcaatatacaaattattctgttaggggacatgtttttgttctccatgtttctgtttctattgtggtatgagttgtatttgtatcactgagataacctattgttatattctaattcattgataatatgttttgtaagaaaagctgacatccttcattgcaagtgaagaacaggtttaccatgaaatgaatgcctttattcaacttagagtcctaatgtttctgatttcacattcttgttgctgaaatgcagaagaaacagctacagcaagagcagaaggaaaactcttagacttaatgtctccaattgcaagaattgtttcactaaagaaacagtcatcattcaactactgaatttgaaagcctcagcagtttcaatgacaaaaatcatttttgattttttaaaattaatcccaatggcatgataaattttcatataaaaagtaaagtttcaatttagtttttaataatggtttaatgccttttttgaataactggtttaacctaattttttttaaatgtaatgtattaatgcatataccataatcaaaagtttgaaatatcctgtttcttaaataatgagaacattaatcacatttagcaagcatttgtacattcaaacctggatattaaagtgaaatgattactttgaatcactgtctgccaaggttcatgattcacattttgagatggattcttttcttaatgcaatacctaacttttgataattttttaaaactaatatttgatcagataatgtaagtcaaaatgcagacgatcctttaaaaggatgcattgtctgtgtatgtagcaacagctccaaagtatttttgggcagtttgataccttttatatctgaagtagccttaaccagaaaaatggtaatttaaaattgacaaaatgatatttttaagacttcaaaatgataaataatttttaactattaaaattggcctcaaactaataaatctgtaattaaattagaattaaatatcagtttaacaacaaaatgaaatatttattttttagaagctgcctctcttcattggtcatttatttttaattataaaatttccaacagatctttgctttaagcccttgatatttgacctagttggacacttgatgaggaagttgcctctagaattataaaaatctcagctttataaaatgcatctgttcacgaaggtaatttctttaattggtgatcaaaatataaaattaaagaaggtactaatgtctcactggaagtatatatatatatatatatatatgtatgcgtgtgtgtgtgtgtatatatatatatatatgtatatgtttctgagtaatttttaaaaaataaaacaggttaataagaagatccattcctttgcatgtgattgttataacattctttcccagggagttcaatttcagcaacctcagaaatccatacttgatattaggaaactgtaaatgtaacacctgaaattattatgttcactattctacatgaaccttatggaaattcatgatttatgtctttgtttttctttttccaagtatatgcaggactccccaaccttgattttataatggtgactgcattttgtaggtggaatcatttctaccgaaatcattttgaaacacaagaatattgatcagtactgtttcactctgatttagtaaatcagaaagcctccccctacccccagcccccactttcacataccttctgggaggtgcctcagtatagacttggtatctgtgaaggactgagttcatgaatatgcacagaagcacttaaaccatgcctcttatttctataatatctgaaaatggcttcataaaagttaagtcaggagaacactgtttacatgacacttcttaactcatttttaatgtttatttttaatttcaaaaacttgttgcctatttggttttcagtactgcataacactgactttcttaaattagtcatagttgcaataatttacttaaatttggtaatgtcacatttgggttggggtttcagtgggaatagtaacttgccgctagtgagaaatggcattgaatactaaagactcaatatgaacaggctttatagacccttagagaaactgttgccttaatgtttggtgcaatttctagtagtgcataagtgaatttagtcttatgataagtaactttgagctgtttttagcttagtaagaattgtggaaaccacatgtttattgtgcccatcattttacacaaagaaaagaggattatattatttcttctaaggaagtaggagttttcttcctaaaagtgcttacatattgtagtactattacttaaaagttatttatgaagttgggagccttctagtttgcctgtgttgatgtattttgaaaacaaaattgcaataaaggatgagcttccatcggtgtgtatggtataccagatacagatggttgcaaggaaaccttttcccccactagaatagtctattagtaactgctaagtcctagcttgcatttttgaaaatgcctttctgcatgttagcacccagactttcctttgtcatattcctttatagctacaacttaactgtagcttatcagagaagctctgtagtcctacactgaagtgtgttcccttggctgttcatatggggctgggtttggttgaacttccattctgtataaatgctagaacacagttactacagattgattcacaaactgcatgtgctggtgcttgaggcagccaaaatggaatgctgtggaaagcatatctatatcttaaaaaacactcagacaggagttaaggacagctttaataatttttttgtttaccacttaatctttatcaactttgattttagttagggcttagctcatggttgaagaaaagtggaaaataacaagtgcccatttaggtttgaagaatccagaatgttttacctttgactttatgagttatagaagcttggctttgctctaggtttcatgttcccaaatgagccatctgtcagtatattcacttaattcttactaatttcagtttcctgtaaaggaaacaacttacatattgatgcttaaatccagaaagtgtaaaaggttttcttaaactgttaaaatatagtgtctgatataaaggatgtaagttactcagctttctgctccctaagccaaacagtgtttgtcttcagtgtgaaatttaactgtaaaaactacttgtaatgtcaagagattatagatcatattattaataaaatggacctgggtctaatatttttttttcttcaaaagggagtgtgaagctgtttattcttttatttgcatatgagtttttcttttagttttagtttttcatgttcatatttccactgatttgaaaacacaaaatttatttttataattttgttgcttgtagcataatcaagtgcaaaatcaagtgcaacctacttgtgactaaatctctttggatttatagctgaggatattgttagctaggttttgtcaatccctaatcattttttaaaatcaatgctgtattcccaggaggctttgagactcctatgaacctgaagcactcccttttgaaccttggaagatcctcaaagagtgagcactcttgtgctcttctaatcataattaattccttaacaaatcagagtaaggaccactgacatatagaacactcaagccaaagaaccatcacagaatttagtaactttagttctgtgaacatgaaaagatttcttttttggtttccaaaggagattatttatttttccacaaggaaaaacatcttgcagagactctgaattccaaatctgagtgagaaagaaaaggaaaaaaatctgtttcatggtggatttctaagcaacatatatacatgtttttaagacaaccttttgttggcagtgtttttcctgaacaccatatgcaccctaggaaacatgtttttcctttaatcttgttcacatatcagaaaaggacatgaaatgctcatactggcatacaagtttctataagtagttattttttgagctacttatactatatccccaaaagctcacagtgccttgttgggattttttttttccatgaactagccattattttaaatgagtgggagagggtaagtctttagacagaggtcattcagcagttcaagactattcctcttcaagaacatgtcaggaattaagcagttatatgtggaaacactggtaattctttccacagtgttgttttggataatctgttctagtatatttaactaattgtatggtggacctgtactctgatacacatcgaatcagtcaatgggatttgtatgtgcttttccttcctacattttcattcctactgccccaacctagtagccctaagttgtggcttggtgggtttggcactgagcctcaagacactcactacattctttctggatgtttgctcacaggctccctgaggagcagaacctgtggagctggggagtgcgggtggtttctattcctaatattgtgtgtcagtcctttttcgtgtgatggtgccttcagaataacgaatatttctgttctggacaatgattaaatcttatgagaaatatatgtaggttatattaattcttgtccatttttgctaagcctgtgaaatactttggctctgatacaacttaacttgaataatatcttatcctgagtcttcctccaaggcagtacatattcctgccaggactgtagtaatcctttgggaactacatgtgagtaagcacttgtatgtaagccattatactgctgtaactaatgcatacaaacaattcttctctttacatttatagtctaaaaggggatatgcagtgggaaggaaaattcctgagagattccagcatagctttgtcaattccgactgagccatactgttttccacaagggctcaacacatagtcagtattccgtgctttcagtgtgtgttcagattctcctcttactggttttcttagactgtattgttctataagcaaatgcccatgtgtgatttttaagatgtgctggggaaaaataaatcaataccacaaccaccaaaaaaaaa

SEQ ID NO: 48887 - DNA, 6595 bp, Homo sapiens
aattggtttatagtgtacaagtcctattgccttcttggtcttgtgcctagttgttgtgtccattatagaaagaactcttggtgtaataacagaagctacaataaaaatcagaccagtccctgaataccaaaagtatggctcagtagctttccctaattttgaacaaggagtagcctgtttaagagaaattgcaaaacagagatgtgctccggcatctattcgcctcatggacaacaagcagtttcagtttggtcatgctcttaaacctcaggtttcctctatttttacatcatttttggacggattaaaaaagttttatattacaaagtttaaaggatttgacccaaatcagctaagtgtagccacattactgtttgagggggatcgtgagaaggttcttcaacatgaaaaacaagtgtatgatattgctgcaaaatttggtgggttggcagctggagaagataatggacagagaggttatttgctgacctatgttattgcatacattcgagacttggctttggaatactatgtattaggagaatcttttgagacttctgctccttgggacagggtggtagatctctgtagaaatgtaaaagaaagaataacaagggaatgcaaagagaagggtgttcagtttgctcctttttctacatgcagggtgacgcagacttacgatgcaggtgcttgtatctacttctattttgcctttaactacaggggaattagtgacccactgaccgtatttgaacaaactgaggcagctgctagagaagaaatccttgctaatggagggagcctgtcacatcaccatggagtgggcaagttacggaagcaatggctaaaggaaagtatctctgatgtcggctttgggatgctgaagtctgtcaaggaatatgtggaccccaataacatctttggaaacagaaaccttttataaatccattagtaccattacaaaaaaatgtcaattttttttttaagttttcaactgtggttatactagtaatcaaatatatcatggactatattttggatacatttgtttctttggtttaaaataagtttgttttcattctgtagtttgttttgtttctacatctatggattgacagatagtattcctaaatctctctcattgtaggtacatcattttacattcagcggttgtcatttcaaattttagtcaggcagcacaaagctgtcaattattccagaggaagctgctgccagctgttttgtattgttgcttcctcttggggaacaaagacagatttggtatcattgattgctcagctagcctctttttaaaagaacgtttctgggaatcagatgtctagggaaggattccactgaggagtgatacacgtgtacattgtttaagagcatagtctagtgtgagtaggccattaaggggaaggatattcatgaaagaatttaggcaacctgttatttagaaagccttcacgtctgtaaggtgcttggcctacttttttttttaaattagtatacatgcataaaaccttgtatcatcaatatacaaattattctgttaggggacatgtttttgttctccatgtttctgtttctattgtggtatgagttgtatttgtatcactgagataacctattgttatattctaattcattgataatatgttttgtaagaaaagctgacatccttcattgcaagtgaagaacaggtttaccatgaaatgaatgcctttattcaacttagagtcctaatgtttctgatttcacattcttgttgctgaaatgcagaagaaacagctacagcaagagcagaaggaaaactcttagacttaatgtctccaattgcaagaattgtttcactaaagaaacagtcatcattcaactactgaatttgaaagcctcagcagtttcaatgacaaaaatcatttttgattttttaaaattaatcccaatggcatgataaattttcatataaaaagtaaagtttcaatttagtttttaataatggtttaatgccttttttgaataactggtttaacctaattttttttaaatgtaatgtattaatgcatataccataatcaaaagtttgaaatatcctgtttcttaaataatgagaacattaatcacatttagcaagcatttgtacattcaaacctggatattaaagtgaaatgattactttgaatcactgtctgccaaggttcatgattcacattttgagatggattcttttcttaatgcaatacctaacttttgataattttttaaaactaatatttgatcagataatgtaagtcaaaatgcagacgatcctttaaaaggatgcattgtctgtgtatgtagcaacagctccaaagtatttttgggcagtttgataccttttatatctgaagtagccttaaccagaaaaatggtaatttaaaattgacaaaatgatatttttaagacttcaaaatgataaataatttttaactattaaaattggcctcaaactaataaatctgtaattaaattagaattaaatatcagtttaacaacaaaatgaaatatttattttttagaagctgcctctcttcattggtcatttatttttaattataaaatttccaacagatctttgctttaagcccttgatatttgacctagttggacacttgatgaggaagttgcctctagaattataaaaatctcagctttataaaatgcatctgttcacgaaggtaatttctttaattggtgatcaaaatataaaattaaagaaggtactaatgtctcactggaagtatatatatatatatatatatatgtatgcgtgtgtgtgtgtgtatatatatatatatatgtatatgtttctgagtaatttttaaaaaataaaacaggttaataagaagatccattcctttgcatgtgattgttataacattctttcccagggagttcaatttcagcaacctcagaaatccatacttgatattaggaaactgtaaatgtaacacctgaaattattatgttcactattctacatgaaccttatggaaattcatgatttatgtctttgtttttctttttccaagtatatgcaggactccccaaccttgattttataatggtgactgcattttgtaggtggaatcatttctaccgaaatcattttgaaacacaagaatattgatcagtactgtttcactctgatttagtaaatcagaaagcctccccctacccccagcccccactttcacataccttctgggaggtgcctcagtatagacttggtatctgtgaaggactgagttcatgaatatgcacagaagcacttaaaccatgcctcttatttctataatatctgaaaatggcttcataaaagttaagtcaggagaacactgtttacatgacacttcttaactcatttttaatgtttatttttaatttcaaaaacttgttgcctatttggttttcagtactgcataacactgactttcttaaattagtcatagttgcaataatttacttaaatttggtaatgtcacatttgggttggggtttcagtgggaatagtaacttgccgctagtgagaaatggcattgaatactaaagactcaatatgaacaggctttatagacccttagagaaactgttgccttaatgtttggtgcaatttctagtagtgcataagtgaatttagtcttatgataagtaactttgagctgtttttagcttagtaagaattgtggaaaccacatgtttattgtgcccatcattttacacaaagaaaagaggattatattatttcttctaaggaagtaggagttttcttcctaaaagtgcttacatattgtagtactattacttaaaagttatttatgaagttgggagccttctagtttgcctgtgttgatgtattttgaaaacaaaattgcaataaaggatgagcttccatcggtgtgtatggtataccagatacagatggttgcaaggaaaccttttcccccactagaatagtctattagtaactgctaagtcctagcttgcatttttgaaaatgcctttctgcatgttagcacccagactttcctttgtcatattcctttatagctacaacttaactgtagcttatcagagaagctctgtagtcctacactgaagtgtgttcccttggctgttcatatggggctgggtttggttgaacttccattctgtataaatgctagaacacagttactacagattgattcacaaactgcatgtgctggtgcttgaggcagccaaaatggaatgctgtggaaagcatatctatatcttaaaaaacactcagacaggagttaaggacagctttaataatttttttgtttaccacttaatctttatcaactttgattttagttagggcttagctcatggttgaagaaaagtggaaaataacaagtgcccatttaggtttgaagaatccagaatgttttacctttgactttatgagttatagaagcttggctttgctctaggtttcatgttcccaaatgagccatctgtcagtatattcacttaattcttactaatttcagtttcctgtaaaggaaacaacttacatattgatgcttaaatccagaaagtgtaaaaggttttcttaaactgttaaaatatagtgtctgatataaaggatgtaagttactcagctttctgctccctaagccaaacagtgtttgtcttcagtgtgaaatttaactgtaaaaactacttgtaatgtcaagagattatagatcatattattaataaaatggacctgggtctaatatttttttttcttcaaaagggagtgtgaagctgtttattcttttatttgcatatgagtttttcttttagttttagtttttcatgttcatatttccactgatttgaaaacacaaaatttatttttataattttgttgcttgtagcataatcaagtgcaaaatcaagtgcaacctacttgtgactaaatctctttggatttatagctgaggatattgttagctaggttttgtcaatccctaatcattttttaaaatcaatgctgtattcccaggaggctttgagactcctatgaacctgaagcactcccttttgaaccttggaagatcctcaaagagtgagcactcttgtgctcttctaatcataattaattccttaacaaatcagagtaaggaccactgacatatagaacactcaagccaaagaaccatcacagaatttagtaactttagttctgtgaacatgaaaagatttcttttttggtttccaaaggagattatttatttttccacaaggaaaaacatcttgcagagactctgaattccaaatctgagtgagaaagaaaaggaaaaaaatctgtttcatggtggatttctaagcaacatatatacatgtttttaagacaaccttttgttggcagtgtttttcctgaacaccatatgcaccctaggaaacatgtttttcctttaatcttgttcacatatcagaaaaggacatgaaatgctcatactggcatacaagtttctataagtagttattttttgagctacttatactatatccccaaaagctcacagtgccttgttgggattttttttttccatgaactagccattattttaaatgagtgggagagggtaagtctttagacagaggtcattcagcagttcaagactattcctcttcaagaacatgtcaggaattaagcagttatatgtggaaacactggtaattctttccacagtgttgttttggataatctgttctagtatatttaactaattgtatggtggacctgtactctgatacacatcgaatcagtcaatgggatttgtatgtgcttttccttcctacattttcattcctactgccccaacctagtagccctaagttgtggcttggtgggtttggcactgagcctcaagacactcactacattctttctggatgtttgctcacaggctccctgaggagcagaacctgtggagctggggagtgcgggtggtttctattcctaatattgtgtgtcagtcctttttcgtgtgatggtgccttcagaataacgaatatttctgttctggacaatgattaaatcttatgagaaatatatgtaggttatattaattcttgtccatttttgctaagcctgtgaaatactttggctctgatacaacttaacttgaataatatcttatcctgagtcttcctccaaggcagtacatattcctgccaggactgtagtaatcctttgggaactacatgtgagtaagcacttgtatgtaagccattatactgctgtaactaatgcatacaaacaattcttctctttacatttatagtctaaaaggggatatgcagtgggaaggaaaattcctgagagattccagcatagctttgtcaattccgactgagccatactgttttccacaagggctcaacacatagtcagtattccgtgctttcagtgtgtgttcagattctcctcttactggttttcttagactgtattgttctataagcaaatgcccatgtgtgatttttaagatgtgctggggaaaaataaatcaataccacaaccaccaaaaaaaaa

SEQ ID NO: 48888 - DNA, 6324 bp, Homo sapiens
ggctgccgggatgcgccgcagcgaatggtcgcgccgggcgccgctctgagtgacctttcacccgcgcccagcggttccgggcggcagcacaaggcggtagccatggcggaggcggcggctgcagcgggtgggactggcttgggcgcgggcgcgagctacgggtctgcagcggaccgggaccgggacccggacccggaccgcgccgggcggaggctgcgggttctctctggccatctgctgggccggccccgggaggctctgagtaccaatgagtgcaaagcgcggagagccgcgtcggcggccacggcagcgcccacggccactcccgccgcgcaggagtcgggcaccatcccaaagaagcggcaagaagttatgaaatggaatggatggggatataatgattctaaattcatcttcaataagaagggccaaattgaattgactgggaaaaggggaattagtgacccactgaccgtatttgaacaaactgaggcagctgctagagaagaaatccttgctaatggagggagcctgtcacatcaccatggagtgggcaagttacggaagcaatggctaaaggaaagtatctctgatgtcggctttgggatgctgaagtctgtcaaggaatatgtggaccccaataacatctttggaaacagaaaccttttataaatccattagtaccattacaaaaaaatgtcaattttttttttaagttttcaactgtggttatactagtaatcaaatatatcatggactatattttggatacatttgtttctttggtttaaaataagtttgttttcattctgtagtttgttttgtttctacatctatggattgacagatagtattcctaaatctctctcattgtaggtacatcattttacattcagcggttgtcatttcaaattttagtcaggcagcacaaagctgtcaattattccagaggaagctgctgccagctgttttgtattgttgcttcctcttggggaacaaagacagatttggtatcattgattgctcagctagcctctttttaaaagaacgtttctgggaatcagatgtctagggaaggattccactgaggagtgatacacgtgtacattgtttaagagcatagtctagtgtgagtaggccattaaggggaaggatattcatgaaagaatttaggcaacctgttatttagaaagccttcacgtctgtaaggtgcttggcctacttttttttttaaattagtatacatgcataaaaccttgtatcatcaatatacaaattattctgttaggggacatgtttttgttctccatgtttctgtttctattgtggtatgagttgtatttgtatcactgagataacctattgttatattctaattcattgataatatgttttgtaagaaaagctgacatccttcattgcaagtgaagaacaggtttaccatgaaatgaatgcctttattcaacttagagtcctaatgtttctgatttcacattcttgttgctgaaatgcagaagaaacagctacagcaagagcagaaggaaaactcttagacttaatgtctccaattgcaagaattgtttcactaaagaaacagtcatcattcaactactgaatttgaaagcctcagcagtttcaatgacaaaaatcatttttgattttttaaaattaatcccaatggcatgataaattttcatataaaaagtaaagtttcaatttagtttttaataatggtttaatgccttttttgaataactggtttaacctaattttttttaaatgtaatgtattaatgcatataccataatcaaaagtttgaaatatcctgtttcttaaataatgagaacattaatcacatttagcaagcatttgtacattcaaacctggatattaaagtgaaatgattactttgaatcactgtctgccaaggttcatgattcacattttgagatggattcttttcttaatgcaatacctaacttttgataattttttaaaactaatatttgatcagataatgtaagtcaaaatgcagacgatcctttaaaaggatgcattgtctgtgtatgtagcaacagctccaaagtatttttgggcagtttgataccttttatatctgaagtagccttaaccagaaaaatggtaatttaaaattgacaaaatgatatttttaagacttcaaaatgataaataatttttaactattaaaattggcctcaaactaataaatctgtaattaaattagaattaaatatcagtttaacaacaaaatgaaatatttattttttagaagctgcctctcttcattggtcatttatttttaattataaaatttccaacagatctttgctttaagcccttgatatttgacctagttggacacttgatgaggaagttgcctctagaattataaaaatctcagctttataaaatgcatctgttcacgaaggtaatttctttaattggtgatcaaaatataaaattaaagaaggtactaatgtctcactggaagtatatatatatatatatatatatgtatgcgtgtgtgtgtgtgtatatatatatatatatgtatatgtttctgagtaatttttaaaaaataaaacaggttaataagaagatccattcctttgcatgtgattgttataacattctttcccagggagttcaatttcagcaacctcagaaatccatacttgatattaggaaactgtaaatgtaacacctgaaattattatgttcactattctacatgaaccttatggaaattcatgatttatgtctttgtttttctttttccaagtatatgcaggactccccaaccttgattttataatggtgactgcattttgtaggtggaatcatttctaccgaaatcattttgaaacacaagaatattgatcagtactgtttcactctgatttagtaaatcagaaagcctccccctacccccagcccccactttcacataccttctgggaggtgcctcagtatagacttggtatctgtgaaggactgagttcatgaatatgcacagaagcacttaaaccatgcctcttatttctataatatctgaaaatggcttcataaaagttaagtcaggagaacactgtttacatgacacttcttaactcatttttaatgtttatttttaatttcaaaaacttgttgcctatttggttttcagtactgcataacactgactttcttaaattagtcatagttgcaataatttacttaaatttggtaatgtcacatttgggttggggtttcagtgggaatagtaacttgccgctagtgagaaatggcattgaatactaaagactcaatatgaacaggctttatagacccttagagaaactgttgccttaatgtttggtgcaatttctagtagtgcataagtgaatttagtcttatgataagtaactttgagctgtttttagcttagtaagaattgtggaaaccacatgtttattgtgcccatcattttacacaaagaaaagaggattatattatttcttctaaggaagtaggagttttcttcctaaaagtgcttacatattgtagtactattacttaaaagttatttatgaagttgggagccttctagtttgcctgtgttgatgtattttgaaaacaaaattgcaataaaggatgagcttccatcggtgtgtatggtataccagatacagatggttgcaaggaaaccttttcccccactagaatagtctattagtaactgctaagtcctagcttgcatttttgaaaatgcctttctgcatgttagcacccagactttcctttgtcatattcctttatagctacaacttaactgtagcttatcagagaagctctgtagtcctacactgaagtgtgttcccttggctgttcatatggggctgggtttggttgaacttccattctgtataaatgctagaacacagttactacagattgattcacaaactgcatgtgctggtgcttgaggcagccaaaatggaatgctgtggaaagcatatctatatcttaaaaaacactcagacaggagttaaggacagctttaataatttttttgtttaccacttaatctttatcaactttgattttagttagggcttagctcatggttgaagaaaagtggaaaataacaagtgcccatttaggtttgaagaatccagaatgttttacctttgactttatgagttatagaagcttggctttgctctaggtttcatgttcccaaatgagccatctgtcagtatattcacttaattcttactaatttcagtttcctgtaaaggaaacaacttacatattgatgcttaaatccagaaagtgtaaaaggttttcttaaactgttaaaatatagtgtctgatataaaggatgtaagttactcagctttctgctccctaagccaaacagtgtttgtcttcagtgtgaaatttaactgtaaaaactacttgtaatgtcaagagattatagatcatattattaataaaatggacctgggtctaatatttttttttcttcaaaagggagtgtgaagctgtttattcttttatttgcatatgagtttttcttttagttttagtttttcatgttcatatttccactgatttgaaaacacaaaatttatttttataattttgttgcttgtagcataatcaagtgcaaaatcaagtgcaacctacttgtgactaaatctctttggatttatagctgaggatattgttagctaggttttgtcaatccctaatcattttttaaaatcaatgctgtattcccaggaggctttgagactcctatgaacctgaagcactcccttttgaaccttggaagatcctcaaagagtgagcactcttgtgctcttctaatcataattaattccttaacaaatcagagtaaggaccactgacatatagaacactcaagccaaagaaccatcacagaatttagtaactttagttctgtgaacatgaaaagatttcttttttggtttccaaaggagattatttatttttccacaaggaaaaacatcttgcagagactctgaattccaaatctgagtgagaaagaaaaggaaaaaaatctgtttcatggtggatttctaagcaacatatatacatgtttttaagacaaccttttgttggcagtgtttttcctgaacaccatatgcaccctaggaaacatgtttttcctttaatcttgttcacatatcagaaaaggacatgaaatgctcatactggcatacaagtttctataagtagttattttttgagctacttatactatatccccaaaagctcacagtgccttgttgggattttttttttccatgaactagccattattttaaatgagtgggagagggtaagtctttagacagaggtcattcagcagttcaagactattcctcttcaagaacatgtcaggaattaagcagttatatgtggaaacactggtaattctttccacagtgttgttttggataatctgttctagtatatttaactaattgtatggtggacctgtactctgatacacatcgaatcagtcaatgggatttgtatgtgcttttccttcctacattttcattcctactgccccaacctagtagccctaagttgtggcttggtgggtttggcactgagcctcaagacactcactacattctttctggatgtttgctcacaggctccctgaggagcagaacctgtggagctggggagtgcgggtggtttctattcctaatattgtgtgtcagtcctttttcgtgtgatggtgccttcagaataacgaatatttctgttctggacaatgattaaatcttatgagaaatatatgtaggttatattaattcttgtccatttttgctaagcctgtgaaatactttggctctgatacaacttaacttgaataatatcttatcctgagtcttcctccaaggcagtacatattcctgccaggactgtagtaatcctttgggaactacatgtgagtaagcacttgtatgtaagccattatactgctgtaactaatgcatacaaacaattcttctctttacatttatagtctaaaaggggatatgcagtgggaaggaaaattcctgagagattccagcatagctttgtcaattccgactgagccatactgttttccacaagggctcaacacatagtcagtattccgtgctttcagtgtgtgttcagattctcctcttactggttttcttagactgtattgttctataagcaaatgcccatgtgtgatttttaagatgtgctggggaaaaataaatcaataccacaaccaccaaaaaaaaa

SEQ ID NO: 48889 - DNA, 321 bp, Homo sapiens
aaacataaaagttgttgtttcctattttggcaggaggaacaagtgtttcatatggcctgatgtgtcctgcagatgagacaagaacaattatttctttggacacttcacaaatggtatttaataatttgagatatatttaaaacattttctttattggctccaccttaattgtcattaaaaaagaatctagccactgggcgctgtggctcacgcttgtaatcccagcacctggggaggctgaggtgggtggatcacttgaggtcgggagttcgagaccagccaggccaacatagcaaaacctcatctctactaaaaatacaa

SEQ ID NO: 48890 - DNA, 344 bp, Homo sapiens
tcttcttaggtcatgctcttaaacctcaggtttcctctatttttacatcatttttggacggattaaaaaagttttatattacaaaggtaagaatttttataaaatgctaaaattgtaaatgcttaagatatctgttttctgctttcttcccacatgcacctattataagggtgtttttccatgttgctatgtacatttcagaattacagtttttcatgttggaataaatattaagtaaatcaggcagtcaatttcagaaaattttatttcttttccagttttgaagcttctaaaaataacactgcatttgaacagttttgttttcataacattttctatagttt

SEQ ID NO: 48891 - DNA, 380 bp, Homo sapiens
gaaaaacatagactaacctattaatataaacttttttctcttcttaggtcatgctcttaaacctcaggtttcctctatttttacatcatttttggacggattaaaaaagttttatattacaaaggtaagaatttttataaaatgctaaaattgtaaatgcttaagatatctgttttctgctttcttcccacatgcacctattataagggtgtttttccatgttgctatgtacatttcagaattacagtttttcatgttggaataaatattaagtaaatcaggcagtcaatttcagaaaattttatttcttttccagttttgaagcttctaaaaataacactgcatttgaacagttttgttttcataacattttctatagt

SEQ ID NO: 48892 - DNA, 473 bp, Homo sapiens
caatagaagttttagtaacatgggacagacatgaaaaagattgaatatgtacctataatattgactaatttggtacttcagtgaaggtaaaattcttgttttgcactgcgtcctcagttcacctgttttggcggacaactctaaagcaagccaatgtgtattccttccatggagtagaggctgggaagaaactgagattatatcttaaactaatcatttgggtcgtcttgactttcagtttctagatgttaaatctgatttcacttaacttaaagcccctgtggggattttgtttgttttttagggtgacgcagacttacgatgcaggtgcttgtatctacttctattttgcctttaactacaggggaattagtgacccactgaccgtatttgaacaaactgaggtaattttgcatacctgcatatagcttttacagctgttgattaatttcaataaattttactgtcaattt

SEQ ID NO: 48893 - DNA, 503 bp, Homo sapiens
ctgagttgtttttcctagggtgtgagccacgtctctttgcccatctgcccatttgttttgggctgaatcatgtccccccaacaatgtcacaggctgaagccatcatccccagggactcggaatgtaactgtgtttgtagatacgatgttcacaaacgttgattaagttaaaatggggtcatatgggagggccctaatttaatctgactgtgtcctgataaaaagaagaaatctggacacacaaaaagacccccggggtgcacacagggagtaaaggccaagtgagggcacagggagaaggcaggggctgccagctgcggagagaggcctcggaggaaccagtcctgcccccttgatctcggactcctgcctccaggactgtgggaaaatcagtgtgctggtggctcaagccggtcgaggcagcactgaagacacgtgggttgtttgcaattgttgctgttacacctaaaactgccataaatattcatggtcaatttactgtgt

SEQ ID NO: 48894 - DNA, 608 bp, Homo sapiens
aactagtggatctaatcgacgaggtaggctctatgacaatctgctgtttacggaggcacagatttctttccaagaggacgaacctgcccctggagagtggagtgtcggacttcaaacctggacagtctgagtgcacggatccttggccgctaggctgcactgcgtttgagtgcaaacctgcaggaattccagacttctcagatcacagagaagtacgcgatgccctgcaaacaacagctcatgcatcggggccagttcaagaagctaccgtaagatgaagtctaggaatgctttctatatcggccccggcaggcccagacgtcttggtggaggcgttggtgagaaatgaccttggggacagaagcacatatgtgaagctctctacacttgaagccagtagggaacacatgtcattattttgtccaccttcaaacagaattggaaatccaagtggcaaatggcagataagggtcctgtgtgtttttaaaacatgcttcagaagaactggcaccccttggaaagaaatagcaacaaataatgataaatgcacctcctcctcttgccttttgccttccagtttctctcctgcctctcatctttctatgcat

SEQ ID NO: 48895 - DNA, 824 bp, Homo sapiens
ctgcacgtttaagaagcggcgactgaaccaaagcacctgcaccaactacgacacgccgctctggctcaacaccggcaagccccccgcccgcaaggacgaccccttgcacgaccccaccaaggacaagaccaacctgatcgtctacatcatctgcggggtggtggccgtcatggtgctcgtgggcatcttcaccaagctggggctggagaaagcgcaccggccccaaagggagcacatgtccaggctctatgacaatctgctgtttacggaggcacagatttctttccaagaggacgaacctgcccctggagagtggagtgtcggacttcaaacctggacagtctgagtgcacggatccttggccgctaggctgcactgcgtttgagtgcaaacctgcaggaattccagacttctcagatcacagagaagtacgcgatgccctgcaaacaacagctcatgcatcggggccagttcaagaagctaccgtaagatgaagtctaggaatgctttctatatcggccccggcaggcccagacgtcttggtggaggcgttggtgagaaatgaccttggggacagaagcacatatgtgaagctctctacacttgaagccagtagggaacacatgtcattattttgtccaccttcaaacagaattggaaatccaagtggcaaatggcagataagggtcctgtgtgtttttaaaacatgcttcagaagaactggcaccccttggaaagaaatagcaacaaataatgataaatgcacctcctcctcttgccttttgccttccagtttctctcctgcctctcatctttctatgcat

SEQ ID NO: 48896 - DNA, 388 bp, Homo sapiens
ctagagtgacacaaggaaccaaggtttgtgaggggggatgagagaggctgctgaccccaaagttctgtccaaaggcatccttggtcttcatatgggcttccttacatccctccctccatggtctacacttccttcccatatcctctccttcctcaaactagagtccaaatgttaggtacaataaagggagaaactgaggcaacctccccttcaatgggatctgggtaagcttcaggaaataaataacctcttcacccctctcagcctgagaaggttcagtgaaaaagatgacatgaggcagagcctacactctgaaagccagttccaatcatggtgttggctgttgctgtcattggccttgcctccagcacaggaggccgttactgta

SEQ ID NO: 48897 - DNA, 322 bp, Homo sapiens
tgcactctcgtttcaacaccattggagaaaacacagcccagtgtggctcctctcctactgatgccccacactcggcgtggtccctggagctgcagccctgcctccagatcctagagttccaacttgggcaagcaggagttccatgttccctgctgcctataattctgacttaagctgaaaagggacctttgtttactagcccttttaaagttctatccccaaaccaaaataggaggagtcagcgttctgcggcaagaaccaccttcttagcttttcccaaggtggcagtgagagatgcagagggcaagatttggtcactgag

SEQ ID NO: 48898 - DNA, 355 bp, Homo sapiens
  misc_feature (313)..(314): n is a, c, g, or t
  misc_feature (345)..(346): n is a, c, g, or t
tctacagttttagaccataaaaaaatttattgtcatgattataacccacccaccttgactcaagggaatgatcatatttaaatatatgcaaaattaaagcagaagcattaaacattttttttattttactttatgttctagtatacatgtgtagaatgtgcaggtttgttacataggtatacgtgtgccatggtggtttggtgcacccatcaacccgtcatctagggttttttgttgctgctgttgctgttgttgtgtttgagatggagtcttgctctgttgcccaggctggagagcagtgagctgaagaacnntactgcactccaccctgggggacagaaaagnntccgtctca

SEQ ID NO: 48899 - DNA, 796 bp, Homo sapiens
ggactctgtaattcactcatctccaacagactgttcctctttgccagcacgctaggcaaatttgagaggcataaatgcactctaacaagatgaaagaaagacatggagatggaaatgggactgaaagtggcaaatgtcaacagagaagaagaaaaacaatgaaaatatcacaaatggttcagctaccagctggtaaagtgctttgcctcacaaacaggtagaccagccttccataccagaccaaagcaaaactgtaaagtagataaaacccaggcattatcagtagccaagaagcttcgcaaactgctgagaagaaaaattctccgaaatttcagtgtcatggtaggtgaagaatttaacaagctcaccttaaattatttagttacctagaacataccattgtttgacttgatattactgggattaaagttaagacttggtgaccttacacattaacctgtagatttatatccagtttaaagaaagaaaaacaggcagcagttgtattaccctgtaggacattaaccagtgttggctgtaacctagcaatcatattctggcatgcctttgtaacttacgaatacccagttcctcaaaatgtcctttaaaccaactttacttgattattgtttgccttattaatgatttgcgtttgacatgtattcattttgtttgtataaaatccatggttttaactttttgatatgggccgggcaccgtgggtcatgcccataatcccaaatcccaggctgagctgggcataccacctgaggcagacaagatgcgtcctctagag

SEQ ID NO: 48900 - DNA, 444 bp, Homo sapiens
tactcaagaggctgaggcgagaggatagcttgagcccaggagttttaggctgcggtgagctatgatcatgccacttcactccaactcagcaacagaatgagaccctatctctaaaaaaaaaaataacaaaaataacatttaaaaaatcaacaaaggaattaaaatgggatactaaacaaaaatatttgacagaaatgatagtagtacaggaagaacagaggaacaaaacagatgagacatttaaaaaaaaaaaagaaaaagaaactttgagtacagagagaagtctagacccagataactttacagctgaatgttttcaaacataagaagcattattacatacattccaaaagactttgtattagggtaatggtagagaaaatgctttcagctcatttctgttagtccagtattactgctaccaatactaggcaaaaaaaaaaa

SEQ ID NO: 48901 - DNA, 550 bp, Homo sapiens
gagacaagagttttgctcttgtcgcccaggctggagtgcaatggcatgatcttggctcactgcaaactccacttcccgggttcaagtgattctcctgcctcagcctcctgagtagctaagattacaggtgcataccaccacgcccagataaattttgtatttttagtagagacaggccaggctggtctcgaactcctgacctcaggtgatccacctgcctcggcttcccaaagtgctgggattataggtgtcagccaccgcgcccggcctacaaaggaaatttatgatcaacttgctatcaataaattgggcaaatcttgcaaagacatacattacaaaaaaaggctcaaaaaaaaaaaagaaaaagaaactttgagtacagagagaagtctagacccagataactttacagctgaatgttttcaaacataagaagcattattacatacattccaaaagactttgtattagggtaatggtagagaaaatgctttcagctcatttctgttagtccagtattactgctaccaatactaggcaaaaaaaaaaa

SEQ ID NO: 48902 - DNA, 1567 bp, Homo sapiens
aaaagtgcagatcacttaaacggcctgcttcgggaagtagaggcaaccagtgcagtccttatggagcaaattaagcttctcaaaagtgaaataagaagattggaaaggaatcaagagcaagaggtgtctgcagctaacgtggaacacttgaagaacgtcttgctgcagttcattttcttgaagccaggtagtgaaagagagagacttcttcctgttataaatacgatgttgcagctcagccttgaagaaaagggaaaacttgctgcggttgctcaaggtgaggaataaaatgcttcccgttcttctggatgggcatcctatcttcgtagttggtttggacttcgataggttgatggaaggaatgtttttattaaccaaataaaatctatttacaaaaatggttcatgtgtattaccatcattcttttgtcaaaaagtgtgtatatgtttgcatttacatatatttgtacatctatatgacagatgtattttaaaagtttcaacttgaagtaaaagtacaacagcttgaagtgttgataccaggccacagccctctaactcatgtgatctcccatgcatgctgccagaataaaaccaccaggaatgaattcactccccacttctctggaacctcaggacccgcccatttctcggcagtactgtgaattttgaagttaaactaaattttggtaccataccaactggaatttaggctttaaaaataatgtttcaaggccaggtgtggtgattcatgcctgaaatcccactactttgggaggctgaggctggagaatcgtttgaggctagtgagctgtgattgtaccactgcactccagctcggggaacagagcgagaccttgtctctaaaaataataatagtaaaataaaaataacattttatgactatttattgcaaggtcagatttacagattgttataaattgttgagaaatttttgtgattagaatatgaaggaaaaagctttgttggtaaaagtgacatgttaaggggctatgaagtaaatatgctgcagttaattgtgctaagttaaaatacagtttagttatttgctttaaaataaactcttctttttttctttaaagtatactatctcaaaactcattatgttgtcagagccctagagctggctaatgtaacactgactatgagtaggtgggcccaccacttgagttgaggtgatttcatggtgtctttccaggctcttgatagggtgtcactgcatgcaagccatgaatctgttttgagaatcctctccattttcccaaataaaaacctatcccaacagtgactatatcactcagcattggatctaaatataaaagtggtgctttcagtgtttttggcagatagtgttccataagctttccatcagaagggattttagacaccttagaggtccgtgctacatcttcacagttcctctgaataaccttaggtggtagtgttacttgcctttgacaccgctgcatatgttttaatgactagatccaaactgtgttgttcttaaatcaaaaattggataatttttaatatttatgtattaatca

SEQ ID NO: 48903 - DNA, 427 bp, Homo sapiens
aaaagtgcagatcacttaaacggcctgcttcgggaagtagaggcaaccagtgcagtccttatggagcaaattaagcttctcaaaagtgaaataagaagattggaaaggaatcaagagcaagaggtgtctgcagctaacgtggaacacttgaagaacgtcttgctgcagttcattttcttgaagccaggtagtgaaagagagagacttcttcctgttataaatacgatgttgcagctcagccttgaagaaaagggaaaacttgctgcggttgctcaaggtcttcaagaaacctccatacccaagaaaaaatagaaagcaaccatgttctactatggtgccaaaaatagttgaacatcgacatcaaaaagattctttctgtctgcttattcacatattctggtttgaattaaaagtgatgaaattaaaa

SEQ ID NO: 48904 - DNA, 190 bp, Homo sapiens
gcttcgggaagtagaggcaaccagtgcagtccttatggagcaaattaaggtgagatcagaaaacctggccaccatgaaaactgccaatttggttttctggaccctccatacacatgtacccaagtttaaaaattcacattgcagatgcatctataacgtcttgatctttatattagattcctgatggtga

SEQ ID NO: 48905 - DNA, 1706 bp, Homo sapiens
ctcaaatttaaatctaattctcaagtctagttattttcctactgtgccacagatacaaacttttgtgttttaatgtttattgttctgcttatcaaagaaagaatgtaaacttatgattctgttttgctttgtttaaaaatgtgattcagcatgattccacctttccactgatagactcaagttcccagaaccagattagaaaacgcatcgtacttgaaaagttgagtaaagtgttgcctgggcttctggttcctcttcagattacattgggagatatttacacacaacttaaaaatcttgttcgaactttcaggttaacaaatagaaatattatacacaaacctgcggaatggactttaattgctatggtgttgctgtcattactgaccccaattcttggcattcagaaacattctcaggaaggtatggtgtttacacggtttctagacaccctccttgaagaattacatctaaaaaatgaagaccttgaaagtctaaccatcatatttagaaccagctgtttaccagagtgatatattccatgaagacaaaatagaagatgaacttctattcaccgtttctggaattctagccgccatgatggtctggtggtgactgataactagttttattccaagacatacctttacctctttaagtttcaatctcccatctcccagtccttcagtccccaactgcagaggatgacctccccagatagaggagaatcattactccaacaagaataaccaagtctttgtatccctagtacaagacatagtatttttattcgaaaatgaatgtttaagtattaaattgaaacttgaatgaatattcaagaaaatataatgatctctactttttctggatgatttccagccatcatatcagtttgccaaaaaaattgagaaagttatgattttgacctcccaacctaaactctaaattctaaagatcagtaaacaattaggtcaataaatacatacaatttaagatgaagccctttggaagtctagtccaaaacaggaaaatctcagaactttctggactcaaggaaatgctttaaatggaatctgtagtttgtttgcaggagagacaatttctagaatttagattgcttttcaaaatgtttatcaggtaggcaagttagcagttgaggcggaacacagacaacttggggagctttactggaaggccaagaaaatactcttggacactggaggaaatgacagctactaaagcccaatcatggaaaaggaccagaaagcagcccactggaatggggagcttagtgggcaaggaggtagggatataatttctcttcttggctccaccagtaattagctctgtggcccagtcacctaaactttctggacttcagttcaggttgtatggcagtaggccatagaattggctactgccatacaatctctatgggaaaggactgcaaaaactaaattttatctctgtatgggcaaaggctactgtcatcctgttgttggtctggggccactctgacaattttttttaacctcatttgattgtgtaagggtctaaccacaacaaaaaatcatagtgtaatagaattaatcaagttcagcaaggtcacaggctagatcaatatacagaaaatcaattgtatttttctgttcagaaaactccaaaaatgaaataaagaaaattgtgttcacaataaaaaaaaaaaa

SEQ ID NO: 48906 - DNA, 960 bp, Homo sapiens
  misc_feature (15)..(15): n is a, c, g, or t
gcaggctggtaccgnccgggggttagggatcggggcctcggggcgagacgccggagcgtgtccccgtccggcagactactctcccccatggcggacttcgctgggccgtcttctgccggccgcaaggccggggctccccgctgctctcgaaaagccgcaggtactaaacagacaagtactttgaaacaagaagatgcttctaaaaggaaagctgaactagaagcagctgtgagaaagaagattgaatttgagagaaaagctctacatattgttgaacagcttttagaggagaatattacagaagagttcctaatggagtgtgggaggttcattacacctgctcactacagtgatgtcgtggatgaacgttctattgtcaaactctgtggttatcctttatgtcagaagaagctgggaattgtaccaaaacagaaatataaaatttctaccaaaaccaataaagtctatgatattactgaaagaaagtctttttgcagcaatttttgttatcaagcatctaagttttttgaagcacaaattcccaaaactccagtatgggttcgagaagaagagaggcatcctgattttcaactgctaaaggaagaacaacatgattccacctttccactgatagactcaagttcccagaaccagattagaaaacgcatcgtacttgaaaagttgagtaaagtgttgcctgggcttctggttcctcttcagattacattgggagatatttacacacaacttaaaaatcttgttcgaactttcaggttaacaaatagaaatattatacacaaacctgcggaatggactttaattgctatggtgttgctgtcattactgacccaattctggatcacgaacattctcaggaacgtatggtgttccaggtctagaacaccttcttgaaaattctctaaaagagcactgaagttacgtcttttgacctgtcccagg

SEQ ID NO: 48907 - DNA, 2602 bp, Homo sapiens
  misc_feature (15)..(15): n is a, c, g, or t
gcaggctggtaccgnccgggggttagggatcggggcctcggggcgagacgccggagcgtgtccccgtccggcagactactctcccccatggcggacttcgctgggccgtcttctgccggccgcaaggccggggctccccgctgctctcgaaaagccgcaggtactaaacagacaagtactttgaaacaagaagatgcttctaaaaggaaagctgaactagaagcagctgtgagaaagaagattgaatttgagagaaaagctctacatattgttgaacagcttttagaggagaatattacagaagagttcctaatggagtgtgggaggttcattacacctgctcactacagtgatgtcgtggatgaacgttctattgtcaaactctgtggttatcctttatgtcagaagaagctgggaattgtaccaaaacagaaatataaaatttctaccaaaaccaataaagtctatgatattactgaaagaaagtctttttgcagcaatttttgttatcaagcatctaagttttttgaagcacaaattcccaaaactccagtatgggttcgagaagaagagaggcatcctgattttcaactgctaaaggaagaacaaagtggccattctggagaagaagtacagttatgcagtaaagccattaaaacatcagatatcgacaatcctagccactttgaaaagcaatatgaatctagttcttctagcactcacagtgatagtagcagtgacaatgagcaagactttgtttcctccattctaccaggaaacagaccaaattcaacaaatattagaccacagctgcaccaaaaaagcataatgaaaaagaaagctggtcacaaagctaactccaaacacaaagacaaagaacagacagtagtagatgtcactgagcagttaggcgattgcaaattagatagtcaggagaaagatgctacatgtgaacttcctttacagaaagtaaatactcagagttcttcaaatagcactttgcctgaaagattaaaagcgtcagaaaattctgaaagtgaatacagtaggtcagaaataactctagtaggcataagtaagaaaagtgcagagcattttaagagaaaatttgccaaatcaaaccaagtgtctaggtcagtgtctagttcagtgcaggtgtgtcctgaagttggaaagagaaacttacttaaagttttgaaggagactttgattgagtggaagacagaagaaacattgaggtttttgtatggccagaattatgcttctgtgtgtctgaaacccgaagcctctctggttaaagaagaacttgatgaagatgacataatctcagatccagatagtcatttccctgcctggagggaatctcagaacagcttggatgagtctttaccttttaggggctcaggtacagccattaaaccactgccaagttacgagaatttgaaaaaagaaactgaaaagttaaatctgaggatcagggagttttacagaggacggtatgttttgggtgactgataactagttttattccaagacatacctttacctctttaagtttcaatctcccatctcccagtccttcagtccccaactgcagaggatgacctccccagatagaggagaatcattactccaacaagaataaccaagtctttgtatccctagtacaagacatagtatttttattcgaaaatgaatgtttaagtattaaattgaaacttgaatgaatattcaagaaaatataatgatctctactttttctggatgatttccagccatcatatcagtttgccaaaaaaattgagaaagttatgattttgacctcccaacctaaactctaaattctaaagatcagtaaacaattaggtcaataaatacatacaatttaagatgaagccctttggaagtctagtccaaaacaggaaaatctcagaactttctggactcaaggaaatgctttaaatggaatctgtagtttgtttgcaggagagacaatttctagaatttagattgcttttcaaaatgtttatcaggtaggcaagttagcagttgaggcggaacacagacaacttggggagctttactggaaggccaagaaaatactcttggacactggaggaaatgacagctactaaagcccaatcatggaaaaggaccagaaagcagcccactggaatggggagcttagtgggcaaggaggtagggatataatttctcttcttggctccaccagtaattagctctgtggcccagtcacctaaactttctggacttcagttcaggttgtatggcagtaggccatagaattggctactgccatacaatctctatgggaaaggactgcaaaaactaaattttatctctgtatgggcaaaggctactgtcatcctgttgttggtctggggccactctgacaattttttttaacctcatttgattgtgtaagggtctaaccacaacaaaaaatcatagtgtaatagaattaatcaagttcagcaaggtcacaggctagatcaatatacagaaaatcaattgtatttttctgttcagaaaactccaaaaatgaaataaagaaaattgtgttcacaataaaaaaaaaaaa

SEQ ID NO: 48908 - DNA, 1928 bp, Homo sapiens
ggactcccgaggcatccccagtgttgtaaagagctttgattgagtggaagacagaagaaacattgaggtttttgtatggccagaattatgcttctgtgtgtctgaaacccgaagcctctctggttaaagaagaacttgatgaagatgacataatctcagatccagatagtcatttccctgcctggagggaatctcagaacagcttggatgagtctttaccttttaggggctcaggtacagccattaaaccactgccaagttacgagaatttgaaaaaagaaactgaaaagttaaatctgaggatcagggagttttacagaggacggtatgttttgggtgaagaaaccaccaaatcacaagactcagaagagcatgattccacctttccactgatagactcaagttcccagaaccagattagaaaacgcatcgtacttgaaaagttgagtaaagtgttgcctgggcttctggttcctcttcagattacattgggagatatttacacacaacttaaaaatcttgttcgaactttcaggttaacaaatagaaatattatacacaaacctgcggaatggactttaattgctatggtgttgctgtcattactgaccccaattcttggcattcagaaacattctcaggaaggtatggtgtttacacggtttctagacaccctccttgaagaattacatctaaaaaatgaagaccttgaaagtctaaccatcatatttagaaccagctgtttaccagagtgatatattccatgaagacaaaatagaagatgaacttctattcaccgtttctggaattctagccgccatgatggtctggtggtgactgataactagttttattccaagacatacctttacctctttaagtttcaatctcccatctcccagtccttcagtccccaactgcagaggatgacctccccagatagaggagaatcattactccaacaagaataaccaagtctttgtatccctagtacaagacatagtatttttattcgaaaatgaatgtttaagtattaaattgaaacttgaatgaatattcaagaaaatataatgatctctactttttctggatgatttccagccatcatatcagtttgccaaaaaaattgagaaagttatgattttgacctcccaacctaaactctaaattctaaagatcagtaaacaattaggtcaataaatacatacaatttaagatgaagccctttggaagtctagtccaaaacaggaaaatctcagaactttctggactcaaggaaatgctttaaatggaatctgtagtttgtttgcaggagagacaatttctagaatttagattgcttttcaaaatgtttatcaggtaggcaagttagcagttgaggcggaacacagacaacttggggagctttactggaaggccaagaaaatactcttggacactggaggaaatgacagctactaaagcccaatcatggaaaaggaccagaaagcagcccactggaatggggagcttagtgggcaaggaggtagggatataatttctcttcttggctccaccagtaattagctctgtggcccagtcacctaaactttctggacttcagttcaggttgtatggcagtaggccatagaattggctactgccatacaatctctatgggaaaggactgcaaaaactaaattttatctctgtatgggcaaaggctactgtcatcctgttgttggtctggggccactctgacaattttttttaacctcatttgattgtgtaagggtctaaccacaacaaaaaatcatagtgtaatagaattaatcaagttcagcaaggtcacaggctagatcaatatacagaaaatcaattgtatttttctgttcagaaaactccaaaaatgaaataaagaaaattgtgttcacaataaaaaaaaaaaa

SEQ ID NO: 48909 - DNA, 1821 bp, Homo sapiens
  misc_feature (23)..(23): n is a, c, g, or t
gcagtctgtacgccagggagtanggatattgatgaagatgacataatctcagatccagatagtcatttccctgcctggagggaatctcagaacagcttggatgagtctttaccttttaggggctcaggtacagccattaaaccactgccaagttacgagaatttgaaaaaagaaactgaaaagttaaatctgaggatcagggagttttacagaggacggtatgttttgggtgaagaaaccaccaaatcacaagactcagaagagcatgattccacctttccactgatagactcaagttcccagaaccagattagaaaacgcatcgtacttgaaaagttgagtaaagtgttgcctgggcttctggttcctcttcagattacattgggagatatttacacacaacttaaaaatcttgttcgaactttcaggttaacaaatagaaatattatacacaaacctgcggaatggactttaattgctatggtgttgctgtcattactgaccccaattcttggcattcagaaacattctcaggaaggtatggtgtttacacggtttctagacaccctccttgaagaattacatctaaaaaatgaagaccttgaaagtctaaccatcatatttagaaccagctgtttaccagagtgatatattccatgaagacaaaatagaagatgaacttctattcaccgtttctggaattctagccgccatgatggtctggtggtgactgataactagttttattccaagacatacctttacctctttaagtttcaatctcccatctcccagtccttcagtccccaactgcagaggatgacctccccagatagaggagaatcattactccaacaagaataaccaagtctttgtatccctagtacaagacatagtatttttattcgaaaatgaatgtttaagtattaaattgaaacttgaatgaatattcaagaaaatataatgatctctactttttctggatgatttccagccatcatatcagtttgccaaaaaaattgagaaagttatgattttgacctcccaacctaaactctaaattctaaagatcagtaaacaattaggtcaataaatacatacaatttaagatgaagccctttggaagtctagtccaaaacaggaaaatctcagaactttctggactcaaggaaatgctttaaatggaatctgtagtttgtttgcaggagagacaatttctagaatttagattgcttttcaaaatgtttatcaggtaggcaagttagcagttgaggcggaacacagacaacttggggagctttactggaaggccaagaaaatactcttggacactggaggaaatgacagctactaaagcccaatcatggaaaaggaccagaaagcagcccactggaatggggagcttagtgggcaaggaggtagggatataatttctcttcttggctccaccagtaattagctctgtggcccagtcacctaaactttctggacttcagttcaggttgtatggcagtaggccatagaattggctactgccatacaatctctatgggaaaggactgcaaaaactaaattttatctctgtatgggcaaaggctactgtcatcctgttgttggtctggggccactctgacaattttttttaacctcatttgattgtgtaagggtctaaccacaacaaaaaatcatagtgtaatagaattaatcaagttcagcaaggtcacaggctagatcaatatacagaaaatcaattgtatttttctgttcagaaaactccaaaaatgaaataaagaaaattgtgttcacaataaaaaaaaaaaa

SEQ ID NO: 48910 - DNA, 1868 bp, Homo sapiens
  misc_feature (15)..(15): n is a, c, g, or t
gcaggctggtaccgnccgggggttagggatcggggcctcggggcgagacgccggagcgtgtccccgtccggcagactactctcccccatggcggacttcgctgggccgtcttctgccggccgcaaggccggggctccccgctgctctcgaaaagccgcaggtactaaacagacaagtactttgaaacaagaagatgcttctaaaaggaaagctgaactagaagcagctgtgagaaagaagattgaatttgagagaaaagctctacatattgttgaacagcttttagaggagaatattacagaagagttcctaatggagtgtgggaggttcattacacctgctcactacagtgatgtcgtggatgaacgttctattgtcaaactctgtggttatcctttatgtcagaagaagctgggaattgtaccaaaacagaaatataaaatttctaccaaaaccaataaagtctatgatattactgaaagaaagtctttttgcagcaatttttgttatcaagcatctaagttttttgaagcacaaattcccaaaactccagtatgggttcgagaagaagagaggcatcctgattttcaactgctaaaggaagaacaaagtggccattctggagaagaagtacagttatgcagtaaagccattaaaacatcagatatcgacaatcctagccactttgaaaagcaatatgaatctagttcttctagcactcacagtgatagtagcagtgacaatgagcaagactttgtttcctccattctaccaggaaacagaccaaattcaacaaatattagaccacagctgcaccaaaaaagcataatgaaaaagaaagctggtcacaaagctaactccaaacacaaagacaaagaacagacagtagtagatgtcactgagcagttaggcgattgcaaattagatagtcaggagaaagatgctacatgtgaacttcctttacagaaagtaaatactcagagttcttcaaatagcactttgcctgaaagattaaaagcgtcagaaaattctgaaagtgaatacagtaggtcagaaataactctagtaggcataagtaagaaaagtgcagagcattttaagagaaaatttgccaaatcaaaccaagtgtctaggtcagtgtctagttcagtgcaggtgtgtcctgaagttggaaagagaaacttacttaaagttttgaaggagactttgattgagtggaagacagaagaaacattgaggtttttgtatggccagaattatgcttctgtgtgtctgaaacccgaagcctctctggttaaagaagaacttgatgaagatgacataatctcagatccagatagtcatttccctgcctggagggaatctcagaacagcttggatgagtctttaccttttaggggctcaggtacagccattaaaccactgccaagttacgagaatttgaaaaaagaaactgaaaagttaaatctgaggatcagggagttttacagaggacggtatgttttgggtgaagaaaccaccaaatcacaagactcagaagaggtatgtcttacagacattgagtttttccagatcgttaacatttggaaaactcaccacagcaaatcttggagcaggaaggatattgaagagttaattgttaaattttcaaatagtttctttagtcattctgccttttggtttacagtgccatctccactgttggcattactattttacaaataagttgacgtttacccctagcaaattttcatcagtgtgcaatatttttttctaatgtaaaaatagcctaaaatggtgggacaaagttttccctaattcttcatacaataaatgaagcctctgaagaggcttgctttttcttaaaa

SEQ ID NO: 48911 - DNA, 3099 bp, Homo sapiens
  misc_feature (15)..(15): n is a, c, g, or t
gcaggctggtaccgnccgggggttagggatcggggcctcggggcgagacgccggagcgtgtccccgtccggcagactactctcccccatggcggacttcgctgggccgtcttctgccggccgcaaggccggggctccccgctgctctcgaaaagccgcaggtactaaacagacaagtactttgaaacaagaagatgcttctaaaaggaaagctgaactagaagcagctgtgagaaagaagattgaatttgagagaaaagctctacatattgttgaacagcttttagaggagaatattacagaagagttcctaatggagtgtgggaggttcattacacctgctcactacagtgatgtcgtggatgaacgttctattgtcaaactctgtggttatcctttatgtcagaagaagctgggaattgtaccaaaacagaaatataaaatttctaccaaaaccaataaagtctatgatattactgaaagaaagtctttttgcagcaatttttgttatcaagcatctaagttttttgaagcacaaattcccaaaactccagtatgggttcgagaagaagagaggcatcctgattttcaactgctaaaggaagaacaaagtggccattctggagaagaagtacagttatgcagtaaagccattaaaacatcagatatcgacaatcctagccactttgaaaagcaatatgaatctagttcttctagcactcacagtgatagtagcagtgacaatgagcaagactttgtttcctccattctaccaggaaacagaccaaattcaacaaatattagaccacagctgcaccaaaaaagcataatgaaaaagaaagctggtcacaaagctaactccaaacacaaagacaaagaacagacagtagtagatgtcactgagcagttaggcgattgcaaattagatagtcaggagaaagatgctacatgtgaacttcctttacagaaagtaaatactcagagttcttcaaatagcactttgcctgaaagattaaaagcgtcagaaaattctgaaagtgaatacagtaggtcagaaataactctagtaggcataagtaagaaaagtgcagagcattttaagagaaaatttgccaaatcaaaccaagtgtctaggtcagtgtctagttcagtgcaggtgtgtcctgaagttggaaagagaaacttacttaaagttttgaaggagactttgattgagtggaagacagaagaaacattgaggtttttgtatggccagaattatgcttctgtgtgtctgaaacccgaagcctctctggttaaagaagaacttgatgaagatgacataatctcagatccagatagtcatttccctgcctggagggaatctcagaacagcttggatgagtctttaccttttaggggctcaggtacagccattaaaccactgccaagttacgagaatttgaaaaaagaaactgaaaagttaaatctgaggatcagggagttttacagaggacggtatgttttgggtgaagaaaccaccaaatcacaagactcagaagagcatgattccacctttccactgatagactcaagttcccagaaccagattagaaaacgcatcgtacttgaaaagttgagtaaagtgttgcctgggcttctggttcctcttcagattacattgggagatatttacacacaacttaaaaatcttgttcgaactttcaggttaacaaatagaaatattatacacaaacctgcggaatggactttaattgctatggtgttgctgtcattactgaccccaattcttggcattcagaaacattctcaggaaggtatggtgtttacacggtttctagacaccctccttgaagaattacatctaaaaaatgaagaccttgaaagtctaaccatcatatttagaaccagctgtttaccagagtgatatattccatgaagacaaaatagaagatgaacttctattcaccgtttctggaattctagccgccatgatggtctggtggtgactgataactagttttattccaagacatacctttacctctttaagtttcaatctcccatctcccagtccttcagtccccaactgcagaggatgacctccccagatagaggagaatcattactccaacaagaataaccaagtctttgtatccctagtacaagacatagtatttttattcgaaaatgaatgtttaagtattaaattgaaacttgaatgaatattcaagaaaatataatgatctctactttttctggatgatttccagccatcatatcagtttgccaaaaaaattgagaaagttatgattttgacctcccaacctaaactctaaattctaaagatcagtaaacaattaggtcaataaatacatacaatttaagatgaagccctttggaagtctagtccaaaacaggaaaatctcagaactttctggactcaaggaaatgctttaaatggaatctgtagtttgtttgcaggagagacaatttctagaatttagattgcttttcaaaatgtttatcaggtaggcaagttagcagttgaggcggaacacagacaacttggggagctttactggaaggccaagaaaatactcttggacactggaggaaatgacagctactaaagcccaatcatggaaaaggaccagaaagcagcccactggaatggggagcttagtgggcaaggaggtagggatataatttctcttcttggctccaccagtaattagctctgtggcccagtcacctaaactttctggacttcagttcaggttgtatggcagtaggccatagaattggctactgccatacaatctctatgggaaaggactgcaaaaactaaattttatctctgtatgggcaaaggctactgtcatcctgttgttggtctggggccactctgacaattttttttaacctcatttgattgtgtaagggtctaaccacaacaaaaaatcatagtgtaatagaattaatcaagttcagcaaggtcacaggctagatcaatatacagaaaatcaattgtatttttctgttcagaaaactccaaaaatgaaataaagaaaattgtgttcacaataaaaaaaaaaaa

SEQ ID NO: 48912 - DNA, 2949 bp, Homo sapiens
  misc_feature (15)..(15): n is a, c, g, or t
gcaggctggtaccgnccgggggttagggatcggggcctcggggcgagacgccggagcgtgtccccgtccggcagactactctcccccatggcggacttcgctgggccgtcttctgccggccgcaaggccggggctccccgctgctctcgaaaagccgcaggtactaaacagacaagtactttgaaacaagaagatgcttctaaaaggaaagctgaactagaagcagctgtgagaaagaagattgaatttgagagaaaagctctacatattgttgaacagcttttagaggagaatattacagaagagttcctaatggagtgtgggaggttcattacacctgctcactacagtgatgtcgtggatgaacgttctattgtcaaactctgtggttatcctttatgtcagaagaagctgggaattgtaccaaaacagaaatataaaatttctaccaaaaccaataaagtctatgatattactgaaagaaagtctttttgcagcaatttttgttatcaagcatctaagttttttgaagcacaaattcccaaaactccagtatgggttcgagaagaagagaggcatcctgattttcaactgctaaaggaagaacaaagtggccattctggagaagaagtacagttatgcagtaaagccattaaaacatcagatatcgacaatcctagccactttgaaaagcaatatgaatctagttcttctagcactcacagtgatagtagcagtgacaatgagcaagactttgtttcctccattctaccaggaaacagaccaaattcaacaaatattagaccacagctgcaccaaaaaagcataatgaaaaagaaagctggtcacaaagctaactccaaacacaaagacaaagaacagacagtagtagatgtcactgagcagttaggcgattgcaaattagatagtcaggagaaagatgctacatgtgaacttcctttacagaaagtaaatactcagagttcttcaaatagcactttgcctgaaagattaaaagcgtcagaaaattctgaaagtgaatacagtaggtcagaaataactctagtaggcataagtaagaaaagtgcagagcattttaagagaaaatttgccaaatcaaaccaagtgtctaggtcagtgtctagttcagtgcaggtgtgtcctgaagttggaaagagaaacttacttaaagttttgaaggagactttgattgagtggaagacagaagaaacattgaggtttttgtatggccagaattatgcttctgtgtgtctgaaacccgaagcctctctggttaaagaagaacttgatgaagatgacataatctcagatccagatagtcatttccctgcctggagggaatctcagaacagcttggatgagtctttaccttttaggggctcaggtacagccattaaaccactgccaagttacgagaatttgaaaaaagaaactgaaaagttaaatctgaggatcagggagttttacagaggacggtatgttttgggtgaagaaaccaccaaatcacaagactcagaagagcatgattccacctttccactgatagactcaagttcccagaaccagattagaaaacgcatcgtacttgaaaagttgagtaaagtgttgcctgggcttctggttcctcttcagattacattgggagatatttacacacaacttaaaaatcttgttcgaactttcaggttaacaaatagaaatattatacacaaacctgcggaatggactttaattgctatggtgttgctgtcattatatattccatgaagacaaaatagaagatgaacttctattcaccgtttctggaattctagccgccatgatggtctggtggtgactgataactagttttattccaagacatacctttacctctttaagtttcaatctcccatctcccagtccttcagtccccaactgcagaggatgacctccccagatagaggagaatcattactccaacaagaataaccaagtctttgtatccctagtacaagacatagtatttttattcgaaaatgaatgtttaagtattaaattgaaacttgaatgaatattcaagaaaatataatgatctctactttttctggatgatttccagccatcatatcagtttgccaaaaaaattgagaaagttatgattttgacctcccaacctaaactctaaattctaaagatcagtaaacaattaggtcaataaatacatacaatttaagatgaagccctttggaagtctagtccaaaacaggaaaatctcagaactttctggactcaaggaaatgctttaaatggaatctgtagtttgtttgcaggagagacaatttctagaatttagattgcttttcaaaatgtttatcaggtaggcaagttagcagttgaggcggaacacagacaacttggggagctttactggaaggccaagaaaatactcttggacactggaggaaatgacagctactaaagcccaatcatggaaaaggaccagaaagcagcccactggaatggggagcttagtgggcaaggaggtagggatataatttctcttcttggctccaccagtaattagctctgtggcccagtcacctaaactttctggacttcagttcaggttgtatggcagtaggccatagaattggctactgccatacaatctctatgggaaaggactgcaaaaactaaattttatctctgtatgggcaaaggctactgtcatcctgttgttggtctggggccactctgacaattttttttaacctcatttgattgtgtaagggtctaaccacaacaaaaaatcatagtgtaatagaattaatcaagttcagcaaggtcacaggctagatcaatatacagaaaatcaattgtatttttctgttcagaaaactccaaaaatgaaataaagaaaattgtgttcacaataaaaaaaaaaaa

SEQ ID NO: 48913 - DNA, 1925 bp, Homo sapiens
atgactctagaggaccccgacgtgtctcagctttgattgagtggaagacagaagaaacattgaggtttttgtatggccagaattatgcttctgtgtgtctgaaacccgaagcctctctggttaaagaagaacttgatgaagatgacataatctcagatccagatagtcatttccctgcctggagggaatctcagaacagcttggatgagtctttaccttttaggggctcaggtacagccattaaaccactgccaagttacgagaatttgaaaaaagaaactgaaaagttaaatctgaggatcagggagttttacagaggacggtatgttttgggtgaagaaaccaccaaatcacaagactcagaagagcatgattccacctttccactgatagactcaagttcccagaaccagattagaaaacgcatcgtacttgaaaagttgagtaaagtgttgcctgggcttctggttcctcttcagattacattgggagatatttacacacaacttaaaaatcttgttcgaactttcaggttaacaaatagaaatattatacacaaacctgcggaatggactttaattgctatggtgttgctgtcattactgaccccaattcttggcattcagaaacattctcaggaaggtatggtgtttacacggtttctagacaccctccttgaagaattacatctaaaaaatgaagaccttgaaagtctaaccatcatatttagaaccagctgtttaccagagtgatatattccatgaagacaaaatagaagatgaacttctattcaccgtttctggaattctagccgccatgatggtctggtggtgactgataactagttttattccaagacatacctttacctctttaagtttcaatctcccatctcccagtccttcagtccccaactgcagaggatgacctccccagatagaggagaatcattactccaacaagaataaccaagtctttgtatccctagtacaagacatagtatttttattcgaaaatgaatgtttaagtattaaattgaaacttgaatgaatattcaagaaaatataatgatctctactttttctggatgatttccagccatcatatcagtttgccaaaaaaattgagaaagttatgattttgacctcccaacctaaactctaaattctaaagatcagtaaacaattaggtcaataaatacatacaatttaagatgaagccctttggaagtctagtccaaaacaggaaaatctcagaactttctggactcaaggaaatgctttaaatggaatctgtagtttgtttgcaggagagacaatttctagaatttagattgcttttcaaaatgtttatcaggtaggcaagttagcagttgaggcggaacacagacaacttggggagctttactggaaggccaagaaaatactcttggacactggaggaaatgacagctactaaagcccaatcatggaaaaggaccagaaagcagcccactggaatggggagcttagtgggcaaggaggtagggatataatttctcttcttggctccaccagtaattagctctgtggcccagtcacctaaactttctggacttcagttcaggttgtatggcagtaggccatagaattggctactgccatacaatctctatgggaaaggactgcaaaaactaaattttatctctgtatgggcaaaggctactgtcatcctgttgttggtctggggccactctgacaattttttttaacctcatttgattgtgtaagggtctaaccacaacaaaaaatcatagtgtaatagaattaatcaagttcagcaaggtcacaggctagatcaatatacagaaaatcaattgtatttttctgttcagaaaactccaaaaatgaaataaagaaaattgtgttcacaataaaaaaaaaaaa

SEQ ID NO: 48914 - DNA, 458 bp, Homo sapiens
  misc_feature (413)..(413): n is a, c, g, or t
acattctgagtggggaaagggactaaggtggtctgaggaccccacagagtcaggaagattgagagagtgcccctccggcctcgccatgaggctcttcctgtcgctcccggtcctggtggtggttctgtcgatcgtcttggaagcccagccccagcccaggggaccccagacgtctccagtgccttggataagctgaaggagtttggaaacacactggaggacaaggctcgggaactcatcagccgcatcaaacagagtgaactttctgccaagatgcgggagtggttttcagagacatttcagaaagtgaaggagaaactcaagattgactcatgaggacctgaagggtgacatcccaggaggggcctctgaaatttcccacaccccagcgcctgtgctgaggactccctccnattgccccaggtgccaccaataaaaatcctacagaaaaaaaaaaa

SEQ ID NO: 48915 - DNA, 283 bp, Homo sapiens
acggtacaggaaaataacctgtatgcattgcatgcctgggttttttgttggtttgggtatttttttgtttgtttttgctttcttttgaattagtacaaaaacctgaggagttttactagaaaccccgtatcttgatgaggcagacttattttatctgaaacctgcttaacctttgggcagctttttagtttgggaagtcaggttacactatttgtccggaaaataattagcatcagtccataaatctgggacataaaatgtttccctttggaggatgtaaaag

SEQ ID NO: 48916 - DNA, 761 bp, Homo sapiens
ggacgcgtgggtccggacgcgtgggtcgacccacgcgtcgcggtgtcgtgaaaactacccctaaaagccaaaatgggaaaggaaaagactcatatcaacattgtcgtcattggacacgtagattcgggcaagtccaccactactggccatctgatctataaatgcggtggcatcgacaaaagaaccattgaaaaatttgagaaggaggctgctgagatgggaaagggctccttcaagtatgcctgggtcttggataaactgaaagctgagcgtgaacgtggtatcaccattgatatctccttgtggaaatttgagaccagcaagtactatgtgactatcattgatgccccaggacacagagactttatcaaaaacatgattacagggacatctcaggctgactgtgctgtcctgattgttgctgctggtgttggtgaatttgaagctggtatctccaagaatgggcagacccgagagcatgcccttctggcttacacactgggtgtgaaacaactaattgtcggtgttaacaaaatggattccactgagccaccctacagccagaagagatatgaggaaattgttaaggaagtcagcacttacattaagaaaattggctacaaccccgacacagtagcatttgtgccaatttctggttggaccggtcggacagggacaccaggtggaacaagggcatgcccggatcagggagggcacgtacgtggcagccagggacacgcgcagagccgggcggtacacgc

SEQ ID NO: 48917 - DNA, 1028 bp, Homo sapiens
ggacgcgtgggtccggacgcgtgggtcgacccacgcgtcgcgtgtggaaatttgagaccagcaagtactatgtgactatcattgatgccccaggacacagagactttatcaaaaacatgattacagggacatctcaggctgactgtgctgtcctgattgttgctgctggtgttggtgaatttgaagctggtatctccaagaatgggcagacccgagagcatgcccttctggcttacacactgggtgtgaaacaactaattgtcggtgttaacaaaatggattccactgagccaccctacagccagaagagatatgaggaaattgttaaggaagtcagcacttacattaagaaaattggctacaaccccgacacagtagcatttgtgccaatttctggttggaatggtgacaacatgctggagccaagtgctaacatgccttggttcaagggatggaaagtcacccgtaaggatggcaatgccagtggaaccacgctgcttgaggctctggactgcatcctaccaccaactcgtccaactgacaagcccttgcgcctgctctccaggatgtctacaaaattggtggtattggtactgttcctgttggccgagtggagactggtgttctcaaacccggtatggtggtcacctttgctccagtcaacgttacaacggaagtaaaatctgtcgaaatgcaccatgaagctttgagtgaagctcttcctggggacaatgtgggcttcaatgtcaagaatgtgtctgtcaaggatgttcgtcgtggcaacgttgctggtgacagcaaaaatgacccaccaatggaagcagctggcttcactgctcagacaaggagactgcttcatgccagtgatttctgacctcggcaataagcggtatgccgttggttgccacggtctgatacatggacagaaataagcgtgaaaggaggcaatagatggataggatatgacacttggacacaccgtaaggaaaaccggaagaatgggctcccactcctgcggtctaattggg

SEQ ID NO: 48918 - DNA, 1181 bp, Homo sapiens
  misc_feature (873)..(873): n is a, c, g, or t
cccgagaagttggggggaggggtcggcaattgaaccggtgcctagagaaggtggcgcggggtaaactgggaaagtgatgtcgtgtactggctccgcctttttcccgagggtgggggagaaccgtatataagtgcagtagtcgccgtgaacgggctttttcgcaacgggtttgccgccagaacacaggtgtcgtgaaaactacccctaaaagccaaaatgggaaaggaaaagactcatatcaacattgtcgtcattggacacgtagattcgggcaagtccaccactactggccatctgatctataaatgcggtggcatcgacaaaagaactgtggaaatttgagaccagcaagtactatgtgactatcattgatgccccaggacacagagactttatcaaaaacatgattacagggacatctcaggctgactgtgctgtcctgattgttgctgctggtgttggtgaatttgaagctggtatctccaagaatgggcagacccgagagcatgcccttctggcttacacactgggtgtgaaacaactaattgtcggtgttaacaaaatggattccactgagccaccctacagccagaagagatatgaggaaattgttaaggaagtcagcacttacattaagaaaattggctacaaccccgacacagtagcatttgtgccaatttctggttggaatggtgacaacatgctggagccaagtgctaacatgccttggttcaagggatggaaagtcacccgtaaggatggcaatgccagtggaaccacgctgcttgaggctctggactgcatcctaccaccaactcgtccaactgacaagcccttgcgcctgctctccaggatgtctacaaaattggtgtnggtactgttctgttgccgatggagactggggtctcaacccggatggtggcaccttgttcagtcacgtcacggagtaaactgcgaatccctgaacttgatgactctctgggcatgggctccaatgcaagaatggctgcaggagttcgcctggacgtgcgggacgcaaaggcccacggggcagggctcccgccgggaccggaaccggcaaaaacgaccgtgtgccaggcattcatgggaacaaagctaagaagcaaaacaggggatcccagacacacctggaggacagcgccgatgaccacaaacacaaa

SEQ ID NO: 48919 - DNA, 1150 bp, Homo sapiens
  misc_feature (1006)..(1006): n is a, c, g, or t
  misc_feature (1091)..(1091): n is a, c, g, or t
  misc_feature (1105)..(1105): n is a, c, g, or t
  misc_feature (1134)..(1134): n is a, c, g, or t
  misc_feature (1150)..(1150): n is a, c, g, or t
cccgagaagttggggggaggggtcggcaattgaaccggtgcctagagaaggtggcgcggggtaaactgggaaagtgatgtcgtgtactggctccgcctttttcccgagggtgggggagaaccgtatataagtgcagtagtcgccgtgaacgggctttttcgcaacgggtttgccgccagaacacaggtgtcgtgaaaactacccctaaaagccaaaatgggaaaggaaaagactcatatcaacattgtcgtcattggacacgtagattcgggcaagtccaccactactggccatctgatctataaatgcggtggcatcgacaaaagaaccattgaaaaatttgagaaggaggctgctgagatgggaaagggctccttcaagtatgcctgggtcttggataaactgaaagctgagcgtgaacgtggtatcaccattgatatctccttgtggaaatttgagaccagcaagtactatgtgactatcattgatgccccaggacacagagactttatcaaaaacatgattacagggacatctcaggctgactgtgctgtcctgattgttgctgctggtgttggtgaatttgaagctggtatctccaagaatgggcagacccgagagcatgcccttctggcttacacactgggtgtgaaacaactaattgtcggtgttaacaaaatggattccactgagccaccctacagccagaagagatatgaggaaattgttaaggaagtcagcacttacattaagaaaattggctacaaccccgacacagtagcatttgtgccaatttctggttggaatggtgacaacatgctggagccaagtgctaacatgccttggttcaagggatggaaagtcacccgtaaggatggcaatgccagtggaaccacgctgcttgaggctctggactgcatcctaccaccaactcgtccaactgacaagcccttgcgcctgctctccaggatgtctacaaaattggtgatttgggggggaattgggnaccggtttcccggtttggcccaaattggaaaacctggggggttcctcaaaaaccccggtttgggggggccaccctttgctccaanttcaaacggtttancaaccgggaaagttaaaaatcctggtccnaaaattggcacccaan

SEQ ID NO: 48920 - DNA, 737 bp, Homo sapiens
  misc_feature (734)..(734): n is a, c, g, or t
  misc_feature (737)..(737): n is a, c, g, or t
cacgtttgccgccagaacacaggtgtcgtgaaaactacccctaaaagccaaaatgggaaaggaaaagactcatatcaacattgtcgtcattggacacgtagattcgggcaagtccaccactactggccatctgatctataaatgcggtggcatcgacaaaagaaccattgaaaaatttgagaaggaggctgctgagatgggaaagggctccttcaagtatgcctgggtcttggataaactgaaagctgagcgtgaacgtggtatcaccattgatatctccttgtggaaatttgagaccagcaagtactatgtgactatcattgatgccccaggacacagagactttgctgactgtgctgtcctgattgttgctgctggtgttggtgaatttgaagctggtatctccaagaatgggcagacccgagagcatgcccttctggcttacacactgggtgtgaaacaactaattgtcggtgttaacaaaatggattccactgagccaccctacagccagaagagatatgaggaaattgttaaggaagtcagcacttacattaagaaaattggctacaaccccgacacagtagcatttgtgccaatttctggttggaatggtgacaacatgctggagccaagtgctaacatgcctggtccagggatgaagtccgtaggatgcatgcagtgaccacgctgtgagcttgatgatctacacaactgtcctggcctgcgctgcntcn

SEQ ID NO: 48921 - DNA, 978 bp, Homo sapiens
cccgagaagttggggggaggggtcggcaattgaaccggtgcctagagaaggtggcgcggggtaaactgggaaagtgatgtcgtgtactggctccgcctttttcccgagggtgggggagaaccgtatataagtgcagtagtcgccgtgaacgggctttttcgcaacgggtttgccgccagaacacaggtgtcgtgaaaactacccctaaaagccaaaatgggaaaggaaaagactcatatcaacattgtcgtcattggacacgtagattcgggcaagtccaccactactggccatctgatctataaatgcggtggcatcgacaaaagaaccattgaaaaatttgagaaggaggctgctgagatgggaaagggctccttcaagtatgcctgggtcttggataaactgaaagctgagcgtgaacgtggtatcaccattgatatctccttgtggaaatttgagaccagcaagtactatgtgactatcattgatgccccaggacacagagactttatcaaaaacatgattacagggacatctcaggctgactgtgctgtcctgattgttgctgctggtgttggtgaatttgaagctggtatctccaagaatgggcagacccgagagcatgcccttctggcttacacactgggtgtgaaacaactaattgtcggtgttaacaaaatggattccactgagccaccctacagccagaagagatatgaggaaattgttaaggaagtcagcacttacattaagaaaattggctacaaccccgacacagtagcatttgtgccaatttctggttgggccgcatggcgggccacatggaacatggcctggtcacggagggaatcaccgtcagatgcgagaccagaaccccggcagagagcgaacggagcaaccacggcgcaaagaaacgacacagcggcccaggaagaccacagggagaggacaaaccgagggcaccaggggagggactcc

SEQ ID NO: 48922 - DNA, 1760 bp, Homo sapiens
gtagagcctagtgcgaggcctggtggtggtttgccgccagaacacaggtgtcgtgaaaactacccctaaaagccaaaatgggaaaggaaaagactcatatcaacattgtcgtcattggacacgtagattcgggcaagtccaccactactggccatctgatctataaatgcggtggcatcgacaaaagaaccattgaaaaatttgagaaggaggctgctgagatgggaaagggctccttcaagtatgcctgggtcttggataaactgaaagctgagcgtgaacgtggtatcaccattgatatctccttgtggaaatttgagaccagcaagtactatgtgactatcattgatgccccaggacacagagactttatcaaaaacatgattacagggacatctcaggctgactgtgctgtcctgattgttgctgctggtgttggtgaatttgaagctggtatctccaagaatgggcagacccgagagcatgcccttctggcttacacactgggtgtgaaacaactaattgtcggtgttaacaaaatggattccactgagccaccctacagccagaagagatatgaggaaattgttaaggaagtcagcacttacattaagaaaattggctacaaccccgacacagtagcatttgtgccaatttctggttggaatggtgacaacatgctggagccaagtgctaacatgccttggttcaagggatggaaagtcacccgtaaggatggcaatgccagtggaaccacgctgcttgaggctctggactgcatcctaccaccaactcgtccaactgacaagcccttgcgcctgctctccaggatgtctacaaaattggtggtattggtactgttcctgttggccgagtggagactggtgttctcaaacccggtatggtggtcacctttgctccagtcaacgttacaacggaagtaaaatctgtcgaaatgcaccatgaagctttgagtgaagctcttcctggggacaatgtgggcttcaatgtcaagaatgtgtctgtcaaggatgttcgtcgtggcaacgttgctggtgacagcaaaaatgacccaccaatggaagcagctggcttcactgctcaggtgattatcctgaaccatccaggccaaataagcgccggctatgcccctgtattggattgccacacggctcacattgcatgcaagtttgctgagctgaaggaaaagattgatcgccgttctggtaaaaagctggaagatggccctaaattcttgaagtctggtgatgctgccattgttgatatggttcctggcaagcccatgtgtgttgagagcttctcagactatccacctttgggtcgctttgctgttcgtgatatgagacagacagttgcggtgggtgtcatcaaagcagtggacaagaaggctgctggagctggcaaggtcaccaagtctgcccagaaagctcagaaggctaaatgaatattatccctaatacctgccaccccactcttaatcagtggtggaagaacggtctcagaactgtttgtttcaattggccatttaagtttagtagtaaaagactggttaatgataacaatgcatcgtaaaaccttcagaaggaaaggagaatgttttgtggaccactttggttttcttttttgcgtgtggcagttttaagttattagtttttaaaatcagtactttttaatggaaacaacttgaccaaaaatttgtcacagaattttgagacccattaaaaaagttaaatgagaaa

SEQ ID NO: 48923 - DNA, 1772 bp, Homo sapiens
tggtccggatcaggagtgctgggttggtcaaaattgtgcactgatgggccagaacacaggtgtcgtgaaaactacccctaaaagccaaaatgggaaaggaaaagactcatatcaacattgtcgtcattggacacgtagattcgggcaagtccaccactactggccatctgatctataaatgcggtggcatcgacaaaagaaccattgaaaaatttgagaaggaggctgctgagatgggaaagggctccttcaagtatgcctgggtcttggataaactgaaagctgagcgtgaacgtggtatcaccattgatatctccttgtggaaatttgagaccagcaagtactatgtgactatcattgatgccccaggacacagagactttatcaaaaacatgattacagggacatctcaggctgactgtgctgtcctgattgttgctgctggtgttggtgaatttgaagctggtatctccaagaatgggcagacccgagagcatgcccttctggcttacacactgggtgtgaaacaactaattgtcggtgttaacaaaatggattccactgagccaccctacagccagaagagatatgaggaaattgttaaggaagtcagcacttacattaagaaaattggctacaaccccgacacagtagcatttgtgccaatttctggttggaatggtgacaacatgctggagccaagtgctaacatgccttggttcaagggatggaaagtcacccgtaaggatggcaatgccagtggaaccacgctgcttgaggctctggactgcatcctaccaccaactcgtccaactgacaagcccttgcgcctgctctccaggatgtctacaaaattggtggtattggtactgttcctgttggccgagtggagactggtgttctcaaacccggtatggtggtcacctttgctccagtcaacgttacaacggaagtaaaatctgtcgaaatgcaccatgaagctttgagtgaagctcttcctggggacaatgtgggcttcaatgtcaagaatgtgtctgtcaaggatgttcgtcgtggcaacgttgctggtgacagcaaaaatgacccaccaatggaagcagctggcttcactgctcaggtgattatcctgaaccatccaggccaaataagcgccggctatgcccctgtattggattgccacacggctcacattgcatgcaagtttgctgagctgaaggaaaagattgatcgccgttctggtaaaaagctggaagatggccctaaattcttgaagtctggtgatgctgccattgttgatatggttcctggcaagcccatgtgtgttgagagcttctcagactatccacctttgggtcgctttgctgttcgtgatatgagacagacagttgcggtgggtgtcatcaaagcagtggacaagaaggctgctggagctggcaaggtcaccaagtctgcccagaaagctcagaaggctaaatgaatattatccctaatacctgccaccccactcttaatcagtggtggaagaacggtctcagaactgtttgtttcaattggccatttaagtttagtagtaaaagactggttaatgataacaatgcatcgtaaaaccttcagaaggaaaggagaatgttttgtggaccactttggttttcttttttgcgtgtggcagttttaagttattagtttttaaaatcagtactttttaatggaaacaacttgaccaaaaatttgtcacagaattttgagacccattaaaaaagttaaatgagaaa

SEQ ID NO: 48924 - DNA, 1788 bp, Homo sapiens
aagacttagagttctaggagtccgagtccgcgtgtgcttaaattcggcactgatgggtttgccgccagaacacaggtgtcgtgaaaactacccctaaaagccaaaatgggaaaggaaaagactcatatcaacattgtcgtcattggacacgtagattcgggcaagtccaccactactggccatctgatctataaatgcggtggcatcgacaaaagaaccattgaaaaatttgagaaggaggctgctgagatgggaaagggctccttcaagtatgcctgggtcttggataaactgaaagctgagcgtgaacgtggtatcaccattgatatctccttgtggaaatttgagaccagcaagtactatgtgactatcattgatgccccaggacacagagactttatcaaaaacatgattacagggacatctcaggctgactgtgctgtcctgattgttgctgctggtgttggtgaatttgaagctggtatctccaagaatgggcagacccgagagcatgcccttctggcttacacactgggtgtgaaacaactaattgtcggtgttaacaaaatggattccactgagccaccctacagccagaagagatatgaggaaattgttaaggaagtcagcacttacattaagaaaattggctacaaccccgacacagtagcatttgtgccaatttctggttggaatggtgacaacatgctggagccaagtgctaacatgccttggttcaagggatggaaagtcacccgtaaggatggcaatgccagtggaaccacgctgcttgaggctctggactgcatcctaccaccaactcgtccaactgacaagcccttgcgcctgctctccaggatgtctacaaaattggtggtattggtactgttcctgttggccgagtggagactggtgttctcaaacccggtatggtggtcacctttgctccagtcaacgttacaacggaagtaaaatctgtcgaaatgcaccatgaagctttgagtgaagctcttcctggggacaatgtgggcttcaatgtcaagaatgtgtctgtcaaggatgttcgtcgtggcaacgttgctggtgacagcaaaaatgacccaccaatggaagcagctggcttcactgctcaggtgattatcctgaaccatccaggccaaataagcgccggctatgcccctgtattggattgccacacggctcacattgcatgcaagtttgctgagctgaaggaaaagattgatcgccgttctggtaaaaagctggaagatggccctaaattcttgaagtctggtgatgctgccattgttgatatggttcctggcaagcccatgtgtgttgagagcttctcagactatccacctttgggtcgctttgctgttcgtgatatgagacagacagttgcggtgggtgtcatcaaagcagtggacaagaaggctgctggagctggcaaggtcaccaagtctgcccagaaagctcagaaggctaaatgaatattatccctaatacctgccaccccactcttaatcagtggtggaagaacggtctcagaactgtttgtttcaattggccatttaagtttagtagtaaaagactggttaatgataacaatgcatcgtaaaaccttcagaaggaaaggagaatgttttgtggaccactttggttttcttttttgcgtgtggcagttttaagttattagtttttaaaatcagtactttttaatggaaacaacttgaccaaaaatttgtcacagaattttgagacccattaaaaaagttaaatgagaaa

SEQ ID NO: 48925 - DNA, 1758 bp, Homo sapiens
  misc_feature (21)..(21): n is a, c, g, or t
  misc_feature (27)..(27): n is a, c, g, or t
  misc_feature (41)..(41): n is a, c, g, or t
tcccaggggctcgataaactnacggcnaaggtagcgaggcngggtgtgtcgtgaaaactacccctaaaagccaaaatgggaaaggaaaagactcatatcaacattgtcgtcattggacacgtagattcgggcaagtccaccactactggccatctgatctataaatgcggtggcatcgacaaaagaaccattgaaaaatttgagaaggaggctgctgagatgggaaagggctccttcaagtatgcctgggtcttggataaactgaaagctgagcgtgaacgtggtatcaccattgatatctccttgtggaaatttgagaccagcaagtactatgtgactatcattgatgccccaggacacagagactttatcaaaaacatgattacagggacatctcaggctgactgtgctgtcctgattgttgctgctggtgttggtgaatttgaagctggtatctccaagaatgggcagacccgagagcatgcccttctggcttacacactgggtgtgaaacaactaattgtcggtgttaacaaaatggattccactgagccaccctacagccagaagagatatgaggaaattgttaaggaagtcagcacttacattaagaaaattggctacaaccccgacacagtagcatttgtgccaatttctggttggaatggtgacaacatgctggagccaagtgctaacatgccttggttcaagggatggaaagtcacccgtaaggatggcaatgccagtggaaccacgctgcttgaggctctggactgcatcctaccaccaactcgtccaactgacaagcccttgcgcctgctctccaggatgtctacaaaattggtggtattggtactgttcctgttggccgagtggagactggtgttctcaaacccggtatggtggtcacctttgctccagtcaacgttacaacggaagtaaaatctgtcgaaatgcaccatgaagctttgagtgaagctcttcctggggacaatgtgggcttcaatgtcaagaatgtgtctgtcaaggatgttcgtcgtggcaacgttgctggtgacagcaaaaatgacccaccaatggaagcagctggcttcactgctcaggtgattatcctgaaccatccaggccaaataagcgccggctatgcccctgtattggattgccacacggctcacattgcatgcaagtttgctgagctgaaggaaaagattgatcgccgttctggtaaaaagctggaagatggccctaaattcttgaagtctggtgatgctgccattgttgatatggttcctggcaagcccatgtgtgttgagagcttctcagactatccacctttgggtcgctttgctgttcgtgatatgagacagacagttgcggtgggtgtcatcaaagcagtggacaagaaggctgctggagctggcaaggtcaccaagtctgcccagaaagctcagaaggctaaatgaatattatccctaatacctgccaccccactcttaatcagtggtggaagaacggtctcagaactgtttgtttcaattggccatttaagtttagtagtaaaagactggttaatgataacaatgcatcgtaaaaccttcagaaggaaaggagaatgttttgtggaccactttggttttcttttttgcgtgtggcagttttaagttattagtttttaaaatcagtactttttaatggaaacaacttgaccaaaaatttgtcacagaattttgagacccattaaaaaagttaaatgagaaa

SEQ ID NO: 48926 - DNA, 1955 bp, Homo sapiens
gtagagcctagtgcgaggcctggtggtggtttgccgccagaacacaggtgtcgtgaaaactacccctaaaagccaaaatgggaaaggaaaagactcatatcaacattgtcgtcattggacacgtagattcgggcaagtccaccactactggccatctgatctataaatgcggtggcatcgacaaaagaaccattgaaaaatttgagaaggaggctgctgagatgggaaagggctccttcaagtatgcctgggtcttggataaactgaaagctgagcgtgaacgtggtatcaccattgatatctccttgtggaaatttgagaccagcaagtactatgtgactatcattgatgccccaggacacagagactttatcaaaaacatgattacagggacatctcaggctgactgtgctgtcctgattgttgctgctggtgttggtgaatttgaagctggtatctccaagaatgggcagacccgagagcatgcccttctggcttacacactgggtgtgaaacaactaattgtcggtgttaacaaaatggattccactgagccaccctacagccagaagagatatgaggaaattgttaaggaagtcagcacttacattaagaaaattggctacaaccccgacacagtagcatttgtgccaatttctggttggaatggtgacaacatgctggagccaagtgctaacatgccttggttcaagggatggaaagtcacccgtaaggatggcaatgccagtggaaccacgctgcttgaggctctggactgcatcctaccaccaactcgtccaactgacaagcccttgcgcctgctctccaggatgtctacaaaattggtggtattggtactgttcctgttggccgagtggagactggtgttctcaaacccggtatggtggtcacctttgctccagtcaacgttacaacggaagtaaaatctgtcgaaatgcaccatgaagctttgagtgaagctcttcctggggacaatgtgggcttcaatgtcaagaatgtgtctgtcaaggatgttcgtcgtggcaacgttgctggtgacagcaaaaatgacccaccaatggaagcagctggcttcactgctcaggtgattatcctgaaccatccaggccaaataagcgccggctatgcccctgtattggattgccacacggctcacattgcatgcaagtttgctgagctgaaggaaaagattgatcgccgttctggtaaaaagctggaagatggccctaaattcttgaagtctggtgatgctgccattgttgatatggttcctggcaagcccatgtgtgttgagagcttctcagactatccacctttgggtcgctttgctgttcgtgatatgagacagacagttgcggtgggtgtcatcaaagcagtggacaagaaggctgctggagctggcaaggtcaccaagtctgcccagaaagctcagaaggctaaatgaatattatccctaatacctgccaccccactcttaatcagtggtggaagaacggtctcagaactgtttgtttcaattggccatttaagtttagtagtaaaagactggttaatgataacaatgcatcgtaaaaccttcagaaggaaaggagaatgttttgtggaccactttggttttcttttttgcgtgtggcagttttaagttattagtttttaaaatcagtactttttaatggaaacaacttgaccaaaaatttgtcacagaattttgagacccattaaaaaagttaaatgagaaaaaaaaaaaagaaatcggctcttttcggggcggaaaggggatgaatggcatggcttgcttccggaccgttttgtcacaaggtaactggggcccatgggccgtatcgtagccggactatgatctcgcgcacactaagttcgctggccctaacacgggagcaaaaacaaaacgctgctatttgcgcatcatcccaacc

SEQ ID NO: 48927 - DNA, 1869 bp, Homo sapiens
gtagagcctagtgcgaggcctggtggtggtttgccgccagaacacaggtgtcgtgaaaactacccctaaaagccaaaatgggaaaggaaaagactcatatcaacattgtcgtcattggacacgtagattcgggcaagtccaccactactggccatctgatctataaatgcggtggcatcgacaaaagaaccattgaaaaatttgagaaggaggctgctgagatgggaaagggctccttcaagtatgcctgggtcttggataaactgaaagctgagcgtgaacgtggtatcaccattgatatctccttgtggaaatttgagaccagcaagtactatgtgactatcattgatgccccaggacacagagactttatcaaaaacatgattacagggacatctcaggctgactgtgctgtcctgattgttgctgctggtgttggtgaatttgaagctggtatctccaagaatgggcagacccgagagcatgcccttctggcttacacactgggtgtgaaacaactaattgtcggtgttaacaaaatggattccactgagccaccctacagccagaagagatatgaggaaattgttaaggaagtcagcacttacattaagaaaattggctacaaccccgacacagtagcatttgtgccaatttctggttggaatggtgacaacatgctggagccaagtgctaacatgccttggttcaagggatggaaagtcacccgtaaggatggcaatgccagtggaaccacgctgcttgaggctctggactgcatcctaccaccaactcgtccaactgacaagcccttgcgcctgctctccaggatgtctacaaaattggtggtattggtactgttcctgttggccgagtggagactggtgttctcaaacccggtatggtggtcacctttgctccagtcaacgttacaacggaagtaaaatctgtcgaaatgcaccatgaagctttgagtgaagctcttcctggggacaatgtgggcttcaatgtcaagaatgtgtctgtcaaggatgttcgtcgtggcaacgttgctggtgacagcaaaaatgacccaccaatggaagcagctggcttcactgctcaggtgattatcctgaaccatccaggccaaataagcgccggctatgcccctgtattggattgccacacggctcacattgcatgcaagtttgctgagctgaaggaaaagattgatcgccgttctggtaaaaagctggaagatggccctaaattcttgaagtctggtgatgctgccattgttgatatggttcctggcaagcccatgtgtgttgagagcttctcagactatccacctttgggtcgctttgctgttcgtgatatgagacagacagttgcggtgggtgtcatcaaagcagtggacaagaaggctgctggagctggcaaggtcaccaagtctgcccagaaagctcagaaggctaaatgaatattatccctaatacctgccaccccactcttaatcagtggtggaagaacggtctcagaactgtttgtttcaattggccatttaagtttagtagtaaaagactggttaatgataacaatgcatcgtaaaaccttcagaaggaaaggagaatgttttgtggaccactttggttttcttttttgcgtgtggcagttttaagttattagtttttaaaatcagtactttttaatggaaacaacttgaccaaaaatttgtcacagaattttgagacccattaaaaaagttaaatgagaaagaattttcttctatttttaataatcttcgggggggtcttctattaaataaaaataaattgcattgcggccgcattttcggctaacttggccaatttcgccctatagggg

SEQ ID NO: 48928 - DNA, 1709 bp, Homo sapiens
  misc_feature (1632)..(1632): n is a, c, g, or t
  misc_feature (1650)..(1650): n is a, c, g, or t
  misc_feature (1656)..(1656): n is a, c, g, or t
  misc_feature (1670)..(1671): n is a, c, g, or t
  misc_feature (1680)..(1681): n is a, c, g, or t
gtagagcctagtgcgaggcctggtggtggtttgccgccagaacacaggtgtcgtgaaaactacccctaaaagccaaaatgggaaaggaaaagactcatatcaacattgtcgtcattggacacgtagattcgggcaagtccaccactactggccatctgatctataaatgcggtggcatcgacaaaagaaccattgaaaaatttgagaaggaggctgctgagatgggaaagggctccttcaagtatgcctgggtcttggataaactgaaagctgagcgtgaacgtggtatcaccattgatatctccttgtggaaatttgagaccagcaagtactatgtgactatcattgatgccccaggacacagagactttatcaaaaacatgattacagggacatctcaggctgactgtgctgtcctgattgttgctgctggtgttggtgaatttgaagctggtatctccaagaatgggcagacccgagagcatgcccttctggcttacacactgggtgtgaaacaactaattgtcggtgttaacaaaatggattccactgagccaccctacagccagaagagatatgaggaaattgttaaggaagtcagcacttacattaagaaaattggctacaaccccgacacagtagcatttgtgccaatttctggttggaatggtgacaacatgctggagccaagtgctaacatgccttggttcaagggatggaaagtcacccgtaaggatggcaatgccagtggaaccacgctgcttgaggctctggactgcatcctaccaccaactcgtccaactgacaagcccttgcgcctgctctccaggatgtctacaaaattggtggtattggtactgttcctgttggccgagtggagactggtgttctcaaacccggtatggtggtcacctttgctccagtcaacgttacaacggaagtaaaatctgtcgaaatgcaccatgaagctttgagtgaagctcttcctggggacaatgtgggcttcaatgtcaagaatgtgtctgtcaaggatgttcgtcgtggcaacgttgctggtgacagcaaaaatgacccaccaatggaagcagctggcttcactgctcaggtgattatcctgaaccatccaggccaaataagcgccggctatgcccctgtattggattgccacacggctcacattgcatgcaagtttgctgagctgaaggaaaagattgatcgccgttctggtaaaaagctggaagatggccctaaattcttgaagtctggtgatgctgccattgttgatatggttcctggcaagcccatgtgtgttgagagcttctcagactatccacctttgggtcgctttgctgttcgtgatatgagacagacagttgcggtgggtgtcatcaaagcagtggacaagaaggctgctggagctggcaaggtcaccaagtctgcccagaaagctcagaaggctaaatgaatattatccctaatacctgccaccccactcttaatcagtggtggaagaacggtctcagaactgtttgtttcaattggccatttaagtttagtagtaaaagactggttaatgataacaatgcatcgtaaaaccttcagaaggaaaggagaatgttttgtggacttatntggattattaaataatgngagtgnacagtttaaagatnngtagcaaanntatgcagaaatacctagcgtgggagcaa

SEQ ID NO: 48929 - DNA, 1737 bp, Homo sapiens
gtagagcctagtgcgaggcctggtggtggtttgccgccagaacacaggtgtcgtgaaaactacccctaaaagccaaaatgggaaaggaaaagactcatatcaacattgtcgtcattggacacgtagattcgggcaagtccaccactactggccatctgatctataaatgcggtggcatcgacaaaagaaccattgaaaaatttgagaaggaggctgctgagatgggaaagggctccttcaagtatgcctgggtcttggataaactgaaagctgagcgtgaacgtggtatcaccattgatatctccttgtggaaatttgagaccagcaagtactatgtgactatcattgatgccccaggacacagagactttatcaaaaacatgattacagggacatctcaggctgactgtgctgtcctgattgttgctgctggtgttggtgaatttgaagctggtatctccaagaatgggcagacccgagagcatgcccttctggcttacacactgggtgtgaaacaactaattgtcggtgttaacaaaatggattccactgagccaccctacagccagaagagatatgaggaaattgttaaggaagtcagcacttacattaagaaaattggctacaaccccgacacagtagcatttgtgccaatttctggttggaatggtgacaacatgctggagccaagtgctaacatgccttggttcaagggatggaaagtcacccgtaaggatggcaatgccagtggaaccacgctgcttgaggctctggactgcatcctaccaccaactcgtccaactgacaagcccttgcgcctgctctccaggatgtctacaaaattggtggtattggtactgttcctgttggccgagtggagactggtgttctcaaacccggtatggtggtcacctttgctccagtcaacgttacaacggaagtaaaatctgtcgaaatgcaccatgaagctttgagtgaagctcttcctggggacaatgtgggcttcaatgtcaagaatgtgtctgtcaaggatgttcgtcgtggcaacgttgctggtgacagcaaaaatgacccaccaatggaagcagctggcttcactgctcaggtgattatcctgaaccatccaggccaaataagcgccggctatgcccctgtattggattgccacacggctcacattgcatgcaagtttgctgagctgaaggaaaagattgatcgccgttctggtaaaaagctggaagatggccctaaattcttgaagtctggtgatgctgccattgttgatatggttcctggcaagcccatgtgtgttgagagcttctcagactatccacctttgggtcgctttgctgttcgtgatatgagacagacagttgcggtgggtgtcatcaaagcagtggacaagaaggctgctggagctggcaaggtcaccaagtctgcccagaaagctcagaaggctaaatgaatattatccctaatacctgccaccccactcttaatcagtggtggaagaacggtctcagaactgtttgtttcaattggccatttaagtttagtagtaaaagactggttaatgataacaatgcatcgtaaaaccttcagaaggaaaggagaatgttttgtggaccgtaggtcgacctcggtatctcctttatagcgtgggcagattcactgaggtacttacaatatccgtacttgtgtaagtgatacgtgcatatgcatcaatcaccagctgcc

SEQ ID NO: 48930 - DNA, 1656 bp, Homo sapiens
tggtccggatcaggagtgctgggttggtcaaaattgtgcactgatgggccagaacacaggtgtcgtgaaaactacccctaaaagccaaaatgggaaaggaaaagactcatatcaacattgtcgtcattggacacgtagattcgggcaagtccaccactactggccatctgatctataaatgcggtggcatcgacaaaagaactgtggaaatttgagaccagcaagtactatgtgactatcattgatgccccaggacacagagactttatcaaaaacatgattacagggacatctcaggctgactgtgctgtcctgattgttgctgctggtgttggtgaatttgaagctggtatctccaagaatgggcagacccgagagcatgcccttctggcttacacactgggtgtgaaacaactaattgtcggtgttaacaaaatggattccactgagccaccctacagccagaagagatatgaggaaattgttaaggaagtcagcacttacattaagaaaattggctacaaccccgacacagtagcatttgtgccaatttctggttggaatggtgacaacatgctggagccaagtgctaacatgccttggttcaagggatggaaagtcacccgtaaggatggcaatgccagtggaaccacgctgcttgaggctctggactgcatcctaccaccaactcgtccaactgacaagcccttgcgcctgctctccaggatgtctacaaaattggtggtattggtactgttcctgttggccgagtggagactggtgttctcaaacccggtatggtggtcacctttgctccagtcaacgttacaacggaagtaaaatctgtcgaaatgcaccatgaagctttgagtgaagctcttcctggggacaatgtgggcttcaatgtcaagaatgtgtctgtcaaggatgttcgtcgtggcaacgttgctggtgacagcaaaaatgacccaccaatggaagcagctggcttcactgctcaggtgattatcctgaaccatccaggccaaataagcgccggctatgcccctgtattggattgccacacggctcacattgcatgcaagtttgctgagctgaaggaaaagattgatcgccgttctggtaaaaagctggaagatggccctaaattcttgaagtctggtgatgctgccattgttgatatggttcctggcaagcccatgtgtgttgagagcttctcagactatccacctttgggtcgctttgctgttcgtgatatgagacagacagttgcggtgggtgtcatcaaagcagtggacaagaaggctgctggagctggcaaggtcaccaagtctgcccagaaagctcagaaggctaaatgaatattatccctaatacctgccaccccactcttaatcagtggtggaagaacggtctcagaactgtttgtttcaattggccatttaagtttagtagtaaaagactggttaatgataacaatgcatcgtaaaaccttcagaaggaaaggagaatgttttgtggaccactttggttttcttttttgcgtgtggcagttttaagttattagtttttaaaatcagtactttttaatggaaacaacttgaccaaaaatttgtcacagaattttgagacccattaaaaaagttaaatgagaaa

SEQ ID NO: 48931 - DNA, 1841 bp, Homo sapiens
  misc_feature (240)..(240): n is a, c, g, or t
  misc_feature (273)..(274): n is a, c, g, or t
  misc_feature (284)..(284): n is a, c, g, or t
  misc_feature (286)..(286): n is a, c, g, or t
  misc_feature (289)..(289): n is a, c, g, or t
  misc_feature (296)..(296): n is a, c, g, or t
  misc_feature (302)..(302): n is a, c, g, or t
  misc_feature (306)..(306): n is a, c, g, or t
  misc_feature (312)..(312): n is a, c, g, or t
tggtccggatcaggagtgctgggttggtcaaaattgtgcactgatgggccagaacacaggtgtcgtgaaaactacccctaaaagccaaaatgggaaaggaaaagactcatatcaacattgtcgtcattggacacgtagattcgggcaagtccaccactactggccatctgatctataaatgcggtggcatcgacaaaagaaccattgaaaaatttgagaaggaggctgctgagatgggancagggctccttcaagtaatgcctgggtcttggnnttaaacttgnanagnctggagnccgtgnaacngttggntattcaacccatttggaattaattcctccccttttggttggggaaaacaacttttttcggaacggaaccccaagctgtggaaatttgagaccagcaagtactatgtgactatcattgatgccccaggacacagagactttatcaaaaacatgattacagggacatctcaggctgactgtgctgtcctgattgttgctgctggtgttggtgaatttgaagctggtatctccaagaatgggcagacccgagagcatgcccttctggcttacacactgggtgtgaaacaactaattgtcggtgttaacaaaatggattccactgagccaccctacagccagaagagatatgaggaaattgttaaggaagtcagcacttacattaagaaaattggctacaaccccgacacagtagcatttgtgccaatttctggttggaatggtgacaacatgctggagccaagtgctaacatgccttggttcaagggatggaaagtcacccgtaaggatggcaatgccagtggaaccacgctgcttgaggctctggactgcatcctaccaccaactcgtccaactgacaagcccttgcgcctgctctccaggatgtctacaaaattggtggtattggtactgttcctgttggccgagtggagactggtgttctcaaacccggtatggtggtcacctttgctccagtcaacgttacaacggaagtaaaatctgtcgaaatgcaccatgaagctttgagtgaagctcttcctggggacaatgtgggcttcaatgtcaagaatgtgtctgtcaaggatgttcgtcgtggcaacgttgctggtgacagcaaaaatgacccaccaatggaagcagctggcttcactgctcaggtgattatcctgaaccatccaggccaaataagcgccggctatgcccctgtattggattgccacacggctcacattgcatgcaagtttgctgagctgaaggaaaagattgatcgccgttctggtaaaaagctggaagatggccctaaattcttgaagtctggtgatgctgccattgttgatatggttcctggcaagcccatgtgtgttgagagcttctcagactatccacctttgggtcgctttgctgttcgtgatatgagacagacagttgcggtgggtgtcatcaaagcagtggacaagaaggctgctggagctggcaaggtcaccaagtctgcccagaaagctcagaaggctaaatgaatattatccctaatacctgccaccccactcttaatcagtggtggaagaacggtctcagaactgtttgtttcaattggccatttaagtttagtagtaaaagactggttaatgataacaatgcatcgtaaaaccttcagaaggaaaggagaatgttttgtggaccactttggttttcttttttgcgtgtggcagttttaagttattagtttttaaaatcagtactttttaatggaaacaacttgaccaaaaatttgtcacagaattttgagacccattaaaaaagttaaatgagaaa

SEQ ID NO: 48932 - DNA, 1393 bp, Homo sapiens
gtacatctagaagatgatcaaccggacatctcaggctgactgtgctgtcctgattgttgctgctggtgttggtgaatttgaagctggtatctccaagaatgggcagacccgagagcatgcccttctggcttacacactgggtgtgaaacaactaattgtcggtgttaacaaaatggattccactgagccaccctacagccagaagagatatgaggaaattgttaaggaagtcagcacttacattaagaaaattggctacaaccccgacacagtagcatttgtgccaatttctggttggaatggtgacaacatgctggagccaagtgctaacatgccttggttcaagggatggaaagtcacccgtaaggatggcaatgccagtggaaccacgctgcttgaggctctggactgcatcctaccaccaactcgtccaactgacaagcccttgcgcctgctctccaggatgtctacaaaattggtggtattggtactgttcctgttggccgagtggagactggtgttctcaaacccggtatggtggtcacctttgctccagtcaacgttacaacggaagtaaaatctgtcgaaatgcaccatgaagctttgagtgaagctcttcctggggacaatgtgggcttcaatgtcaagaatgtgtctgtcaaggatgttcgtcgtggcaacgttgctggtgacagcaaaaatgacccaccaatggaagcagctggcttcactgctcaggtgattatcctgaaccatccaggccaaataagcgccggctatgcccctgtattggattgccacacggctcacattgcatgcaagtttgctgagctgaaggaaaagattgatcgccgttctggtaaaaagctggaagatggccctaaattcttgaagtctggtgatgctgccattgttgatatggttcctggcaagcccatgtgtgttgagagcttctcagactatccacctttgggtcgctttgctgttcgtgatatgagacagacagttgcggtgggtgtcatcaaagcagtggacaagaaggctgctggagctggcaaggtcaccaagtctgcccagaaagctcagaaggctaaatgaatattatccctaatacctgccaccccactcttaatcagtggtggaagaacggtctcagaactgtttgtttcaattggccatttaagtttagtagtaaaagactggttaatgataacaatgcatcgtaaaaccttcagaaggaaaggagaatgttttgtggaccactttggttttcttttttgcgtgtggcagttttaagttattagtttttaaaatcagtactttttaatggaaacaacttgaccaaaaatttgtcacagaattttgagacccattaaaaaagttaaatgagaaa

SEQ ID NO: 48933 - DNA, 1812 bp, Homo sapiens
ggacgcgtgggtccggacgcgtgggtcgacccacgcgtcgcggggtttgccgccagaacacaggtgtcgtgaaaactacccctaaaagccaaaatgggaaaggaaaagactcatatcaacattgtcgtcattggacacgtagattcgggcaagtccaccactactggccatctgatctataaatgcggtggcatcgacaaaagaaccattgaaaaatttgagaaggaggctgctgagatgggaaagggctccttcaagtatgcctgggtcttggataaactgaaagctgagcgtgaacgtggtatcaccattgatatctccttgtggaaatttgagaccagcaagtactatgtgactatcattgatgccccaggacacagagactttatcaaaaacatgattacagggacatctcaggctgactgtgctgtcctgattgttgctgctggtgttggtgaatttgaagctggtatctccaagaatgggcagacccgagagcatgcccttctggcttaccaacaagcatggggggaatgggaatggaacaaacgcaaagcctaaacaatatgggtcagagagtggtattaaacaatggattccactgagccaccctacagccagaagagatatgaggaaattgttaaggaagtcagcacttacattaagaaaattggctacaaccccgacacagtagcatttgtgccaatttctggttggaatggtgacaacatgctggagccaagtgctaacatgccttggttcaagggatggaaagtcacccgtaaggatggcaatgccagtggaaccacgctgcttgaggctctggactgcatcctaccaccaactcgtccaactgacaagcccttgcgcctgctctccaggatgtctacaaaattggtggtattggtactgttcctgttggccgagtggagactggtgttctcaaacccggtatggtggtcacctttgctccagtcaacgttacaacggaagtaaaatctgtcgaaatgcaccatgaagctttgagtgaagctcttcctggggacaatgtgggcttcaatgtcaagaatgtgtctgtcaaggatgttcgtcgtggcaacgttgctggtgacagcaaaaatgacccaccaatggaagcagctggcttcactgctcaggtgattatcctgaaccatccaggccaaataagcgccggctatgcccctgtattggattgccacacggctcacattgcatgcaagtttgctgagctgaaggaaaagattgatcgccgttctggtaaaaagctggaagatggccctaaattcttgaagtctggtgatgctgccattgttgatatggttcctggcaagcccatgtgtgttgagagcttctcagactatccacctttgggtcgctttgctgttcgtgatatgagacagacagttgcggtgggtgtcatcaaagcagtggacaagaaggctgctggagctggcaaggtcaccaagtctgcccagaaagctcagaaggctaaatgaatattatccctaatacctgccaccccactcttaatcagtggtggaagaacggtctcagaactgtttgtttcaattggccatttaagtttagtagtaaaagactggttaatgataacaatgcatcgtaaaaccttcagaaggaaaggagaatgttttgtggaccactttggttttcttttttgcgtgtggcagttttaagttattagtttttaaaatcagtactttttaatggaaacaacttgaccaaaaatttgtcacagaattttgagacccattaaaaaagttaaatgagaaa

SEQ ID NO: 48934 - DNA, 983 bp, Homo sapiens
  misc_feature (865)..(865): n is a, c, g, or t
  misc_feature (884)..(884): n is a, c, g, or t
  misc_feature (888)..(889): n is a, c, g, or t
  misc_feature (891)..(891): n is a, c, g, or t
  misc_feature (894)..(894): n is a, c, g, or t
  misc_feature (899)..(899): n is a, c, g, or t
  misc_feature (906)..(906): n is a, c, g, or t
  misc_feature (912)..(912): n is a, c, g, or t
  misc_feature (915)..(915): n is a, c, g, or t
  misc_feature (917)..(917): n is a, c, g, or t
  misc_feature (921)..(922): n is a, c, g, or t
tggtccggatcaggagtgctgggttggtcaaaattgtgcactgatgggccagaacacaggtgtcgtgaaaactacccctaaaagccaaaatgggaaaggaaaagactcatatcaacattgtcgtcattggacacgtagattcgggcaagtccaccactactggccatctgatctataaatgcggtggcatcgacaaaagaaccattgaaaaatttgagaaggaggctgctgagatgggaaagggctccttcaagtatgcctgggtcttggataaactgaaagctgagcgtgaacgtggtatcaccattgatatctccttgtggaaatttgagaccagcaagtactatgtgactatcattgatgccccaggacacagagactttatcaaaaacatgattacagggacatctcaggctgactgtgctgtcctgattgttgctgctggtgttggtgaatttgaagctggtatctccaagaatgggcagacccgagagcatgcccttctggcttacacactgggtgtgaaacaactaattgtcggtgttaacaaaatggattccactgagccaccctacagccagaagagatatgaggaaattgttaaggaagtcagcacttacattaagaaaattggctacaaccccgacacagtagcatttgtgccaatttctggttggaatggtgacaacatgctggagccaagtgctaacatgccttggttcaagggatggaaagtcacccgtaaggatggcaatgccagtggaaccacgctgcttgaggctctggactgcatcctaccaccaactcgtccaactgacaagcccttgcgcctgctctccaggatgtctacaaaattggtgggggnttgggctgtccgtggggcnaggnnanggnggtcncaacggntggggnctngnccgnnagtaagggagaatcggaagccaagggaggacctcggaacggcaccaaagtagcaacaaaga

SEQ ID NO: 48935 - DNA, 1043 bp, Homo sapiens
  misc_feature (865)..(865): n is a, c, g, or t
  misc_feature (868)..(868): n is a, c, g, or t
  misc_feature (874)..(874): n is a, c, g, or t
  misc_feature (879)..(879): n is a, c, g, or t
  misc_feature (888)..(888): n is a, c, g, or t
  misc_feature (891)..(891): n is a, c, g, or t
tggtccggatcaggagtgctgggttggtcaaaattgtgcactgatgggccagaacacaggtgtcgtgaaaactacccctaaaagccaaaatgggaaaggaaaagactcatatcaacattgtcgtcattggacacgtagattcgggcaagtccaccactactggccatctgatctataaatgcggtggcatcgacaaaagaaccattgaaaaatttgagaaggaggctgctgagatgggaaagggctccttcaagtatgcctgggtcttggataaactgaaagctgagcgtgaacgtggtatcaccattgatatctccttgtggaaatttgagaccagcaagtactatgtgactatcattgatgccccaggacacagagactttatcaaaaacatgattacagggacatctcaggctgactgtgctgtcctgattgttgctgctggtgttggtgaatttgaagctggtatctccaagaatgggcagacccgagagcatgcccttctggcttacacactgggtgtgaaacaactaattgtcggtgttaacaaaatggattccactgagccaccctacagccagaagagatatgaggaaattgttaaggaagtcagcacttacattaagaaaattggctacaaccccgacacagtagcatttgtgccaatttctggttggaatggtgacaacatgctggagccaagtgctaacatgccttggttcaagggatggaaagtcacccgtaaggatggcaatgccagtggaaccacgctgcttgaggctctggactgcatcctaccaccaactcgtccaactgacaagcccttgcgcctgctctccaggatgtctacaaaattggtgtgggnctngtccgntgccngtggcaggngtnccacccggttgtggtcccttgctccagacttcaacgagtaattgtgaatggcagaatttgggaactccgggaacgggtccgcacatgttgccgttctcggcatttgggcaacccccaacggtgcgtgtttataccaacgcccggcttgtgca

SEQ ID NO: 48936 - DNA, 1023 bp, Homo sapiens
  misc_feature (879)..(879): n is a, c, g, or t
  misc_feature (964)..(964): n is a, c, g, or t
  misc_feature (978)..(978): n is a, c, g, or t
  misc_feature (1007)..(1007): n is a, c, g, or t
  misc_feature (1023)..(1023): n is a, c, g, or t
tggtccggatcaggagtgctgggttggtcaaaattgtgcactgatgggccagaacacaggtgtcgtgaaaactacccctaaaagccaaaatgggaaaggaaaagactcatatcaacattgtcgtcattggacacgtagattcgggcaagtccaccactactggccatctgatctataaatgcggtggcatcgacaaaagaaccattgaaaaatttgagaaggaggctgctgagatgggaaagggctccttcaagtatgcctgggtcttggataaactgaaagctgagcgtgaacgtggtatcaccattgatatctccttgtggaaatttgagaccagcaagtactatgtgactatcattgatgccccaggacacagagactttatcaaaaacatgattacagggacatctcaggctgactgtgctgtcctgattgttgctgctggtgttggtgaatttgaagctggtatctccaagaatgggcagacccgagagcatgcccttctggcttacacactgggtgtgaaacaactaattgtcggtgttaacaaaatggattccactgagccaccctacagccagaagagatatgaggaaattgttaaggaagtcagcacttacattaagaaaattggctacaaccccgacacagtagcatttgtgccaatttctggttggaatggtgacaacatgctggagccaagtgctaacatgccttggttcaagggatggaaagtcacccgtaaggatggcaatgccagtggaaccacgctgcttgaggctctggactgcatcctaccaccaactcgtccaactgacaagcccttgcgcctgctctccaggatgtctacaaaattggtgatttgggggggaattgggnaccggtttcccggtttggcccaaattggaaaacctggggggttcctcaaaaaccccggtttgggggggccaccctttgctccaanttcaaacggtttancaaccgggaaagttaaaaatcctggtccnaaaattggcacccaan

SEQ ID NO: 48937 - DNA, 914 bp, Homo sapiens
  misc_feature (834)..(834): n is a, c, g, or t
  misc_feature (870)..(870): n is a, c, g, or t
  misc_feature (894)..(894): n is a, c, g, or t
  misc_feature (909)..(909): n is a, c, g, or t
ggacgcgtgggtccggacgcgtgggtcgacccacgcgtcgcggggtttgccgccagaacacaggtgtcgtgaaaactacccctaaaagccaaaatgggaaaggaaaagactcatatcaacattgtcgtcattggacacgtagattcgggcaagtccaccactactggccatctgatctataaatgcggtggcatcgacaaaagaaccattgaaaaatttgagaaggaggctgctgagatgggaaagggctccttcaagtatgcctgggtcttggataaactgaaagctgagcgtgaacgtggtatcaccattgatatctccttgtggaaatttgagaccagcaagtactatgtgactatcattgatgccccaggacacagagactttatcaaaaacatgattacagggacatctcaggctgactgtgctgtcctgattgttgctgctggtgttggtgaatttgaagctggtatctccaagaatgggcagacccgagagcatgcccttctggcttacacactgggtgtgaaacaactaattgtcggtgttaacaaaatggattccactgagccaccctacagccagaagagatatgaggaaattgttaaggaagtcagcacttacattaagaaaattggctacaaccccgacacagtagcatttgtgccaatttctggttggaatggtgacaacatgctggagccaagtgctaacatgccttggttcaagggatggaaagtcacccgtaaggatggcaatgccagtggaaccacgctgcttgaggctctggactgcatcctaccaccaactcgtccaactggaacaaagcccccntttgcgccctggccctcctcccaaaggaattgttcnaaacaaaaaaatttgggggggggnaaatttggggaaacngggtt

SEQ ID NO: 48938 - DNA, 1076 bp, Homo sapiens
ggacgcgtgggtccggacgcgtgggtcgacccacgcgtcgcggggtttgccgccagaacacaggtgtcgtgaaaactacccctaaaagccaaaatgggaaaggaaaagactcatatcaacattgtcgtcattggacacgtagattcgggcaagtccaccactactggccatctgatctataaatgcggtggcatcgacaaaagaaccattgaaaaatttgagaaggaggctgctgagatgggaaagggctccttcaagtatgcctgggtcttggataaactgaaagctgagcgtgaacgtggtatcaccattgatatctccttgtggaaatttgagaccagcaagtactatgtgactatcattgatgccccaggacacagagactttatcaaaaacatgattacagggacatctcaggctgactgtgctgtcctgattgttgctgctggtgttggtgaatttgaagctggtatctccaagaatgggcagacccgagagcatgcccttctggcttacacactgggtgtgaaacaactaattgtcggtgttaacaaaatggattccactgagccaccctacagccagaagagatatgaggaaattgttaaggaagtcagcacttacattaagaaaattggctacaaccccgacacagtagcatttgtgccaatttctggttggaatggtgacaacatgctggagccaagtgctaacatgccttggttcaagggatggaaagtcacccgtaaggatggcaatgccagtggaacaacaagaaccacacgacagcacaagaaccacacgagcacaagaaccacacgagcacaagaacaggctggtctcaaatgcctggcctcaggtgatcctcctacctcagagagaggatcttgccatcctcccaaatgttgagattacaggcatgagccactacgccagccagattctgttacttctattttgtagataaactaaggcagaaaaatgatttcattaacttaaataatttgtccaggtaacatagctagtaagttacatagctgggatttaaacccagcagtttaacggaaagccagcac

SEQ ID NO: 48939 - DNA, 870 bp, Homo sapiens
ggacgcgtgggtccggacgcgtgggtcgacccacgcgtcgcggggtttgccgccagaacacaggtgtcgtgaaaactacccctaaaagccaaaatgggaaaggaaaagactcatatcaacattgtcgtcattggacacgtagattcgggcaagtccaccactactggccatctgatctataaatgcggtggcatcgacaaaagaaccattgaaaaatttgagaaggaggctgctgagatgggaaagggctccttcaagtatgcctgggtcttggataaactgaaagctgagcgtgaacgtggtatcaccattgatatctccttgtggaaatttgagaccagcaagtactatgtgactatcattgatgccccaggacacagagactttatcaaaaacatgattacagggacatctcaggctgactgtgctgtcctgattgttgctgctggtgttggtgaatttgaagctggtatctccaagaatgggcagacccgagagcatgcccttctggcttacacactgggtgtgaaacaactaattgtcggtgttaacaaaatggattccactgagccaccctacagccagaagagatatgaggaaattgttaaggaagtcagcacttacattaagaaaattggctacaaccccgacacagtagcatttgtgccaatttctggttggaatggtgacaacatgctggagccaagtgctaacatgccttggttcaagggatggaaagtcacccgtaaggatggcaatgccagtggaaatttccacaaggagatatcaatggtgataccacgttcacgctcagctttcagtttatccaagacccaggcatacttgaaggagccctttcccatctcagca

SEQ ID NO: 48940 - DNA, 899 bp, Homo sapiens
  misc_feature (720)..(720): n is a, c, g, or t
  misc_feature (725)..(725): n is a, c, g, or t
  misc_feature (728)..(730): n is a, c, g, or t
  misc_feature (733)..(733): n is a, c, g, or t
  misc_feature (742)..(742): n is a, c, g, or t
  misc_feature (754)..(754): n is a, c, g, or t
  misc_feature (756)..(756): n is a, c, g, or t
ggacgcgtgggtccggacgcgtgggtcgacccacgcgtcgcggggtttgccgccagaacacaggtgtcgtgaaaactacccctaaaagccaaaatgggaaaggaaaagactcatatcaacattgtcgtcattggacacgtagattcgggcaagtccaccactactggccatctgatctataaatgcggtggcatcgacaaaagaaccattgaaaaatttgagaaggaggctgctgagatgggaaagggctccttcaagtatgcctgggtcttggataaactgaaagctgagcgtgaacgtggtatcaccattgatatctccttgtggaaatttgagaccagcaagtactatgtgactatcattgatgccccaggacacagagactttatcaaaaacatgattacagggacatctcaggctgactgtgctgtcctgattgttgctgctggtgttggtgaatttgaagctggtatctccaagaatgggcagacccgagagcatgcccttctggcttacacactgggtgtgaaacaactaattgtcggtgttaacaaaatggattccactgagccaccctacagccagaagagatatgaggaaattgttaaggaagtcagcacttacattaagaaaattggctacaaccccgacacagtagcatttgtgccaatttctggttggaatggtgacaacatgctggagccaagtgctaacatgccngggcncgnnnggnaagcaccgnaggaggcatgcngngaacaagcgctgaaggccgacggaccacaacaacgtcaatgaaagccgagcagctccggagtcaaagcggggacggagcgcccggcagaggacggtccaccgaagggcccgcacgccagaagcagaccaacggccgggaggcc

SEQ ID NO: 48941 - DNA, 423 bp, Homo sapiens
tggtccggatcaggagtgctgggttggtcaaaattgtgcactgatgggccagaacacaggtgtcgtgaaaactacccctaaaagccaaaatgggaaaggaaaagactcatatcaacattgtcgtcattggacacgtagattcgggcaagtccaccactactggccatctgatctataaatgcggtggcatcgacaaaagaaccattgaaaaatttgagaaggaggctgctgagatgggaaagggctccttcaagtatgcctgggtcttggataaactgaaagctgagcgtgaacgtggtatcaccattgatatctcctagggtggagagagggagagagccaggcatacttgaaggaggctgctgagatgggaaagggctccttcaagtatgcctgggtcttggataaactgaaagctgagcg

SEQ ID NO: 48942 - DNA, 973 bp, Homo sapiens
  misc_feature (867)..(867): n is a, c, g, or t
tggtccggatcaggagtgctgggttggtcaaaattgtgcactgatgggccagaacacaggtgtcgtgaaaactacccctaaaagccaaaatgggaaaggaaaagactcatatcaacattgtcgtcattggacacgtagattcgggcaagtccaccactactggccatctgatctataaatgcggtggcatcgacaaaagaaccattgaaaaatttgagaaggaggctgctgagatgggaaagggctccttcaagtatgcctgggtcttggataaactgaaagctgagcgtgaacgtggtatcaccattgatatctccttgtggaaatttgagaccagcaagtactatgtgactatcattgatgccccaggacacagagactttatcaaaaacatgattacagggacatctcaggctgactgtgctgtcctgattgttgctgctggtgttggtgaatttgaagctggtatctccaagaatgggcagacccgagagcatgcccttctggcttacacactgggtgtgaaacaactaattgtcggtgttaacaaaatggattccactgagccaccctacagccagaagagatatgaggaaattgttaaggaagtcagcacttacattaagaaaattggctacaaccccgacacagtagcatttgtgccaatttctggttggaatggtgacaacatgctggagccaagtgctaacatgccttggttcaagggatggaaagtcacccgtaaggatggcaatgccagtggaaccacgctgcttgaggctctggactgcatcctaccaccaactcgtccaactgacaagcccttgcgcctgctctccaggatgtctacaaaattggtgggtgttncacatgggggtttggacgtccgatgacacagggaaggggttcacaccggtggggaccttgtccaacaagtaggaataaattaggagggccaaactgagacctcgga

SEQ ID NO: 48943 - DNA, 526 bp, Homo sapiens
cctgtaataggagctcctattccgctcggtgtggaaatttgagaccagcaagtactatgtgactatcattgatgccccaggacacagagactttatcaaaaacatgattacagggacatctcaggctgactgtgctgtcctgattgttgctgctgaatggtgacaacatgctggagccaagtgctaacatgccttggttcaagggatggaaagtcacccgtaaggatggcaatgccagtggaaccacgctgcttgaggctctggactgcatcctaccaccaactcgtccagagcggaccgtccgctcggacgaaggagggcgcaactgtgtgaggagaacatgcggggtgtgcgcttcgacgtccacgacgtcaccctgcacgccgacgccatccaccgcggagggggccagatcatccccacagcacggggctgcctctacgccagtgtgctgaccgcccagacacgcctcatggagcccatctaccttgtggagatccagtgtccagagccaggtggtccgagc

SEQ ID NO: 48944 - DNA, 1022 bp, Homo sapiens
  misc_feature (843)..(843): n is a, c, g, or t
  misc_feature (848)..(848): n is a, c, g, or t
  misc_feature (851)..(853): n is a, c, g, or t
  misc_feature (856)..(856): n is a, c, g, or t
  misc_feature (865)..(865): n is a, c, g, or t
  misc_feature (877)..(877): n is a, c, g, or t
  misc_feature (879)..(879): n is a, c, g, or t
cccgagaagttggggggaggggtcggcaattgaaccggtgcctagagaaggtggcgcggggtaaactgggaaagtgatgtcgtgtactggctccgcctttttcccgagggtgggggagaaccgtatataagtgcagtagtcgccgtgaacgggctttttcgcaacgggtttgccgccagaacacaggtgtcgtgaaaactacccctaaaagccaaaatgggaaaggaaaagactcatatcaacattgtcgtcattggacacgtagattcgggcaagtccaccactactggccatctgatctataaatgcggtggcatcgacaaaagaaccattgaaaaatttgagaaggaggctgctgagatgggaaagggctccttcaagtatgcctgggtcttggataaactgaaagctgagcgtgaacgtggtatcaccattgatatctccttgtggaaatttgagaccagcaagtactatgtgactatcattgatgccccaggacacagagactttatcaaaaacatgattacagggacatctcaggctgactgtgctgtcctgattgttgctgctggtgttggtgaatttgaagctggtatctccaagaatgggcagacccgagagcatgcccttctggcttacacactgggtgtgaaacaactaattgtcggtgttaacaaaatggattccactgagccaccctacagccagaagagatatgaggaaattgttaaggaagtcagcacttacattaagaaaattggctacaaccccgacacagtagcatttgtgccaatttctggttggaatggtgacaacatgctggagccaagtgctaacatgccngggcncgnnnggnaagcaccgnaggaggcatgcngngaacaagcgctgaaggccgacggaccacaacaacgtcaatgaaagccgagcagctccggagtcaaagcggggacggagcgcccggcagaggacggtccaccgaagggcccgcacgccagaagcagaccaacggccgggaggcc

SEQ ID NO: 48945 - DNA, 1755 bp, Homo sapiens
ggacgcgtgggtccggacgcgtgggtcgacccacgcgtcgcggtgtcgtgaaaactacccctaaaagccaaaatgggaaaggaaaagactcatatcaacattgtcgtcattggacacgtagattcgggcaagtccaccactactggccatctgatctataaatgcggtggcatcgacaaaagaaccattgaaaaatttgagaaggaggctgctgagatgggaaagggctccttcaagtatgcctgggtcttggataaactgaaagctgagcgtgaacgtggtatcaccattgatatctccttgtggaaatttgagaccagcaagtactatgtgactatcattgatgccccaggacacagagactttatcaaaaacatgattacagggacatctcaggctgactgtgctgtcctgattgttgctgctggtgttggtgaatttgaagctggtatctccaagaatgggcagacccgagagcatgcccttctggcttacacactgggtgtgaaacaactaattgtcggtgttaacaaaatggattccactgagccaccctacagccagaagagatatgaggaaattgttaaggaagtcagcacttacattaagaaaattggctacaaccccgacacagtagcatttgtgccaatttctggttggaatggtgacaacatgctggagccaagtgctaacatgccttggttcaagggatggaaagtcacccgtaaggatggcaatgccagtggaaccacgctgcttgaggctctggactgcatcctaccaccaactcgtccaactgacaagcccttgcgcctgctctccaggatgtctacaaaattggtggtattggtactgttcctgttggccgagtggagactggtgttctcaaacccggtatggtggtcacctttgctccagtcaacgttacaacggaagtaaaatctgtcgaaatgcaccatgaagctttgagtgaagctcttcctggggacaatgtgggcttcaatgtcaagaatgtgtctgtcaaggatgttcgtcgtggcaacgttgctggtgacagcaaaaatgacccaccaatggaagcagctggcttcactgctcaggtgattatcctgaaccatccaggccaaataagcgccggctatgcccctgtattggattgccacacggctcacattgcatgcaagtttgctgagctgaaggaaaagattgatcgccgttctggtaaaaagctggaagatggccctaaattcttgaagtctggtgatgctgccattgttgatatggttcctggcaagcccatgtgtgttgagagcttctcagactatccacctttgggtcgctttgctgttcgtgatatgagacagacagttgcggtgggtgtcatcaaagcagtggacaagaaggctgctggagctggcaaggtcaccaagtctgcccagaaagctcagaaggctaaatgaatattatccctaatacctgccaccccactcttaatcagtggtggaagaacggtctcagaactgtttgtttcaattggccatttaagtttagtagtaaaagactggttaatgataacaatgcatcgtaaaaccttcagaaggaaaggagaatgttttgtggaccactttggttttcttttttgcgtgtggcagttttaagttattagtttttaaaatcagtactttttaatggaaacaacttgaccaaaaatttgtcacagaattttgagacccattaaaaaagttaaatgagaaa

SEQ ID NO: 48946 - DNA, 1776 bp, Homo sapiens
ggacgcgtgggtccggacgcgtgggtcgacccacgcgtcgcggggtttgccgccagaacacaggtgtcgtgaaaactacccctaaaagccaaaatgggaaaggaaaagactcatatcaacattgtcgtcattggacacgtagattcgggcaagtccaccactactggccatctgatctataaatgcggtggcatcgacaaaagaaccattgaaaaatttgagaaggaggctgctgagatgggaaagggctccttcaagtatgcctgggtcttggataaactgaaagctgagcgtgaacgtggtatcaccattgatatctccttgtggaaatttgagaccagcaagtactatgtgactatcattgatgccccaggacacagagactttatcaaaaacatgattacagggacatctcaggctgactgtgctgtcctgattgttgctgctggtgttggtgaatttgaagctggtatctccaagaatgggcagacccgagagcatgcccttctggcttacacactgggtgtgaaacaactaattgtcggtgttaacaaaatggattccactgagccaccctacagccagaagagatatgaggaaattgttaaggaagtcagcacttacattaagaaaattggctacaaccccgacacagtagcatttgtgccaatttctggttggaatggtgacaacatgctggagccaagtgctaacatgccttggttcaagggatggaaagtcacccgtaaggatggcaatgccagtggaaccacgctgcttgaggctctggactgcatcctaccaccaactcgtccaactgacaagcccttgcgcctgctctccaggatgtctacaaaattggtggtattggtactgttcctgttggccgagtggagactggtgttctcaaacccggtatggtggtcacctttgctccagtcaacgttacaacggaagtaaaatctgtcgaaatgcaccatgaagctttgagtgaagctcttcctggggacaatgtgggcttcaatgtcaagaatgtgtctgtcaaggatgttcgtcgtggcaacgttgctggtgacagcaaaaatgacccaccaatggaagcagctggcttcactgctcaggtgattatcctgaaccatccaggccaaataagcgccggctatgcccctgtattggattgccacacggctcacattgcatgcaagtttgctgagctgaaggaaaagattgatcgccgttctggtaaaaagctggaagatggccctaaattcttgaagtctggtgatgctgccattgttgatatggttcctggcaagcccatgtgtgttgagagcttctcagactatccacctttgggtcgctttgctgttcgtgatatgagacagacagttgcggtgggtgtcatcaaagcagtggacaagaaggctgctggagctggcaaggtcaccaagtctgcccagaaagctcagaaggctaaatgaatattatccctaatacctgccaccccactcttaatcagtggtggaagaacggtctcagaactgtttgtttcaattggccatttaagtttagtagtaaaagactggttaatgataacaatgcatcgtaaaaccttcagaaggaaaggagaatgttttgtggaccactttggttttcttttttgcgtgtggcagttttaagttattagtttttaaaatcagtactttttaatggaaacaacttgaccaaaaatttgtcacagaattttgagacccattaaaaaagttaaatgagaaa

SEQ ID NO: 48947 - DNA, 1758 bp, Homo sapiens
tcccgttaccgtccgcagaagtgaatttgcgctgccagaacacaggtgtcgtgaaaactacccctaaaagccaaaatgggaaaggaaaagactcatatcaacattgtcgtcattggacacgtagattcgggcaagtccaccactactggccatctgatctataaatgcggtggcatcgacaaaagaaccattgaaaaatttgagaaggaggctgctgagatgggaaagggctccttcaagtatgcctgggtcttggataaactgaaagctgagcgtgaacgtggtatcaccattgatatctccttgtggaaatttgagaccagcaagtactatgtgactatcattgatgccccaggacacagagactttatcaaaaacatgattacagggacatctcaggctgactgtgctgtcctgattgttgctgctggtgttggtgaatttgaagctggtatctccaagaatgggcagacccgagagcatgcccttctggcttacacactgggtgtgaaacaactaattgtcggtgttaacaaaatggattccactgagccaccctacagccagaagagatatgaggaaattgttaaggaagtcagcacttacattaagaaaattggctacaaccccgacacagtagcatttgtgccaatttctggttggaatggtgacaacatgctggagccaagtgctaacatgccttggttcaagggatggaaagtcacccgtaaggatggcaatgccagtggaaccacgctgcttgaggctctggactgcatcctaccaccaactcgtccaactgacaagcccttgcgcctgctctccaggatgtctacaaaattggtggtattggtactgttcctgttggccgagtggagactggtgttctcaaacccggtatggtggtcacctttgctccagtcaacgttacaacggaagtaaaatctgtcgaaatgcaccatgaagctttgagtgaagctcttcctggggacaatgtgggcttcaatgtcaagaatgtgtctgtcaaggatgttcgtcgtggcaacgttgctggtgacagcaaaaatgacccaccaatggaagcagctggcttcactgctcaggtgattatcctgaaccatccaggccaaataagcgccggctatgcccctgtattggattgccacacggctcacattgcatgcaagtttgctgagctgaaggaaaagattgatcgccgttctggtaaaaagctggaagatggccctaaattcttgaagtctggtgatgctgccattgttgatatggttcctggcaagcccatgtgtgttgagagcttctcagactatccacctttgggtcgctttgctgttcgtgatatgagacagacagttgcggtgggtgtcatcaaagcagtggacaagaaggctgctggagctggcaaggtcaccaagtctgcccagaaagctcagaaggctaaatgaatattatccctaatacctgccaccccactcttaatcagtggtggaagaacggtctcagaactgtttgtttcaattggccatttaagtttagtagtaaaagactggttaatgataacaatgcatcgtaaaaccttcagaaggaaaggagaatgttttgtggaccactttggttttcttttttgcgtgtggcagttttaagttattagtttttaaaatcagtactttttaatggaaacaacttgaccaaaaatttgtcacagaattttgagacccattaaaaaagttaaatgagaaa

SEQ ID NO: 48948 - DNA, 1750 bp, Homo sapiens
gggaccctggggtggtgttaaaacttcggacgaggctgtgtcgtgaaaactacccctaaaagccaaaatgggaaaggaaaagactcatatcaacattgtcgtcattggacacgtagattcgggcaagtccaccactactggccatctgatctataaatgcggtggcatcgacaaaagaaccattgaaaaatttgagaaggaggctgctgagatgggaaagggctccttcaagtatgcctgggtcttggataaactgaaagctgagcgtgaacgtggtatcaccattgatatctccttgtggaaatttgagaccagcaagtactatgtgactatcattgatgccccaggacacagagactttatcaaaaacatgattacagggacatctcaggctgactgtgctgtcctgattgttgctgctggtgttggtgaatttgaagctggtatctccaagaatgggcagacccgagagcatgcccttctggcttacacactgggtgtgaaacaactaattgtcggtgttaacaaaatggattccactgagccaccctacagccagaagagatatgaggaaattgttaaggaagtcagcacttacattaagaaaattggctacaaccccgacacagtagcatttgtgccaatttctggttggaatggtgacaacatgctggagccaagtgctaacatgccttggttcaagggatggaaagtcacccgtaaggatggcaatgccagtggaaccacgctgcttgaggctctggactgcatcctaccaccaactcgtccaactgacaagcccttgcgcctgctctccaggatgtctacaaaattggtggtattggtactgttcctgttggccgagtggagactggtgttctcaaacccggtatggtggtcacctttgctccagtcaacgttacaacggaagtaaaatctgtcgaaatgcaccatgaagctttgagtgaagctcttcctggggacaatgtgggcttcaatgtcaagaatgtgtctgtcaaggatgttcgtcgtggcaacgttgctggtgacagcaaaaatgacccaccaatggaagcagctggcttcactgctcaggtgattatcctgaaccatccaggccaaataagcgccggctatgcccctgtattggattgccacacggctcacattgcatgcaagtttgctgagctgaaggaaaagattgatcgccgttctggtaaaaagctggaagatggccctaaattcttgaagtctggtgatgctgccattgttgatatggttcctggcaagcccatgtgtgttgagagcttctcagactatccacctttgggtcgctttgctgttcgtgatatgagacagacagttgcggtgggtgtcatcaaagcagtggacaagaaggctgctggagctggcaaggtcaccaagtctgcccagaaagctcagaaggctaaatgaatattatccctaatacctgccaccccactcttaatcagtggtggaagaacggtctcagaactgtttgtttcaattggccatttaagtttagtagtaaaagactggttaatgataacaatgcatcgtaaaaccttcagaaggaaaggagaatgttttgtggaccactttggttttcttttttgcgtgtggcagttttaagttattagtttttaaaatcagtactttttaatggaaacaacttgaccaaaaatttgtcacagaattttgagacccattaaaaaagttaaatgagaaa

SEQ ID NO: 48949 - DNA, 1757 bp, Homo sapiens
  misc_feature (1735)..(1735): n is a, c, g, or t
gtagagcctagtgcgaggcctggtggtggtttgccgccagaacacaggtgtcgtgaaaactacccctaaaagccaaaatgggaaaggaaaagactcatatcaacattgtcgtcattggacacgtagattcgggcaagtccaccactactggccatctgatctataaatgcggtggcatcgacaaaagaaccattgaaaaatttgagaaggaggctgctgagatgggaaagggctccttcaagtatgcctgggtcttggataaactgaaagctgagcgtgaacgtggtatcaccattgatatctccttgtggaaatttgagaccagcaagtactatgtgactatcattgatgccccaggacacagagactttatcaaaaacatgattacagggacatctcaggctgactgtgctgtcctgattgttgctgctggtgttggtgaatttgaagctggtatctccaagaatgggcagacccgagagcatgcccttctggcttacacactgggtgtgaaacaactaattgtcggtgttaacaaaatggattccactgagccaccctacagccagaagagatatgaggaaattgttaaggaagtcagcacttacattaagaaaattggctacaaccccgacacagtagcatttgtgccaatttctggttggaatggtgacaacatgctggagccaagtgctaacatgccttggttcaagggatggaaagtcacccgtaaggatggcaatgccagtggaaccacgctgcttgaggctctggactgcatcctaccaccaactcgtccaactgacaagcccttgcgcctgctctccaggatgtctacaaaattggtggtattggtactgttcctgttggccgagtggagactggtgttctcaaacccggtatggtggtcacctttgctccagtcaacgttacaacggaagtaaaatctgtcgaaatgcaccatgaagctttgagtgaagctcttcctggggacaatgtgggcttcaatgtcaagaatgtgtctgtcaaggatgttcgtcgtggcaacgttgctggtgacagcaaaaatgacccaccaatggaagcagctggcttcactgctcaggtgattatcctgaaccatccaggccaaataagcgccggctatgcccctgtattggattgccacacggctcacattgcatgcaagtttgctgagctgaaggaaaagattgatcgccgttctggtaaaaagctggaagatggccctaaattcttgaagtctggtgatgctgccattgttgatatggttcctggcaagcccatgtgtgttgagagcttctcagactatccacctttgggtcgctttgctgttcgtgatatgagacagacagttgcggtgggtgtcatcaaagcagtggacaagaaggctgctggagctggcaaggtcaccaagtctgcccagaaagctcagaaggctaaatgaatattatccctaatacctgccaccccactcttaatcagtggtggaagaacggtctcagaactgtttgtttcaattggccatttaagtttagtagtaaaagactggttaatgataacaatgcatcgtaaaaccttcagaaggaaaggagaatgttttgtggaccactttggttttcttttttgcgtgtggcagttttaagttaggtacgtctatatactgtcagtaaatttataagtgacagtcatctgacctcaaaatgtgttaccgcanggtagacacacaataaagaacg

SEQ ID NO: 48950 - DNA, 1772 bp, Homo sapiens
  misc_feature (1769)..(1769): n is a, c, g, or t
gtagagcctagtgcgaggcctggtggtggtttgccgccagaacacaggtgtcgtgaaaactacccctaaaagccaaaatgggaaaggaaaagactcatatcaacattgtcgtcattggacacgtagattcgggcaagtccaccactactggccatctgatctataaatgcggtggcatcgacaaaagaaccattgaaaaatttgagaaggaggctgctgagatgggaaagggctccttcaagtatgcctgggtcttggataaactgaaagctgagcgtgaacgtggtatcaccattgatatctccttgtggaaatttgagaccagcaagtactatgtgactatcattgatgccccaggacacagagactttatcaaaaacatgattacagggacatctcaggctgactgtgctgtcctgattgttgctgctggtgttggtgaatttgaagctggtatctccaagaatgggcagacccgagagcatgcccttctggcttacacactgggtgtgaaacaactaattgtcggtgttaacaaaatggattccactgagccaccctacagccagaagagatatgaggaaattgttaaggaagtcagcacttacattaagaaaattggctacaaccccgacacagtagcatttgtgccaatttctggttggaatggtgacaacatgctggagccaagtgctaacatgccttggttcaagggatggaaagtcacccgtaaggatggcaatgccagtggaaccacgctgcttgaggctctggactgcatcctaccaccaactcgtccaactgacaagcccttgcgcctgctctccaggatgtctacaaaattggtggtattggtactgttcctgttggccgagtggagactggtgttctcaaacccggtatggtggtcacctttgctccagtcaacgttacaacggaagtaaaatctgtcgaaatgcaccatgaagctttgagtgaagctcttcctggggacaatgtgggcttcaatgtcaagaatgtgtctgtcaaggatgttcgtcgtggcaacgttgctggtgacagcaaaaatgacccaccaatggaagcagctggcttcactgctcaggtgattatcctgaaccatccaggccaaataagcgccggctatgcccctgtattggattgccacacggctcacattgcatgcaagtttgctgagctgaaggaaaagattgatcgccgttctggtaaaaagctggaagatggccctaaattcttgaagtctggtgatgctgccattgttgatatggttcctggcaagcccatgtgtgttgagagcttctcagactatccacctttgggtcgctttgctgttcgtgatatgagacagacagttgcggtgggtgtcatcaaagcagtggacaagaaggctgctggagctggcaaggtcaccaagtctgcccagaaagctcagaaggctaaatgaatattatccctaatacctgccaccccactcttaatcagtggtggaagaacggtctcagaactgtttgtttcaattggccatttaagtttagtagtaaaagactggttaatgataacaatgcatcgtaaaaccttcagaaggaaaggagaatgttttgtggacatatattaattttattgtcgatgtggacaagtatatataaagtgaggtagcattaaatattgcaagtacattacttaaggtgggagctagtcatgcaccaaaaatgttaacgctgagtatgagaccaccataacgatcaaantgg

SEQ ID NO: 48951 - DNA, 1665 bp, Homo sapiens
ggacgcgtgggtccggacgcgtgggtcgacccacgcgtcgcgtccaccactactggccatctgatctataaatgcggtggcatcgacaaaagaaccattgaaaaatttgagaaggaggctgctgagatgggaaagggctccttcaagtatgcctgggtcttggataaactgaaagctgagcgtgaacgtggtatcaccattgatatctccttgtggaaatttgagaccagcaagtactatgtgactatcattgatgccccaggacacagagactttatcaaaaacatgattacagggacatctcaggctgactgtgctgtcctgattgttgctgctggtgttggtgaatttgaagctggtatctccaagaatgggcagacccgagagcatgcccttctggcttacacactgggtgtgaaacaactaattgtcggtgttaacaaaatggattccactgagccaccctacagccagaagagatatgaggaaattgttaaggaagtcagcacttacattaagaaaattggctacaaccccgacacagtagcatttgtgccaatttctggttggaatggtgacaacatgctggagccaagtgctaacatgccttggttcaagggatggaaagtcacccgtaaggatggcaatgccagtggaaccacgctgcttgaggctctggactgcatcctaccaccaactcgtccaactgacaagcccttgcgcctgctctccaggatgtctacaaaattggtggtattggtactgttcctgttggccgagtggagactggtgttctcaaacccggtatggtggtcacctttgctccagtcaacgttacaacggaagtaaaatctgtcgaaatgcaccatgaagctttgagtgaagctcttcctggggacaatgtgggcttcaatgtcaagaatgtgtctgtcaaggatgttcgtcgtggcaacgttgctggtgacagcaaaaatgacccaccaatggaagcagctggcttcactgctcaggtgattatcctgaaccatccaggccaaataagcgccggctatgcccctgtattggattgccacacggctcacattgcatgcaagtttgctgagctgaaggaaaagattgatcgccgttctggtaaaaagctggaagatggccctaaattcttgaagtctggtgatgctgccattgttgatatggttcctggcaagcccatgtgtgttgagagcttctcagactatccacctttgggtcgctttgctgttcgtgatatgagacagacagttgcggtgggtgtcatcaaagcagtggacaagaaggctgctggagctggcaaggtcaccaagtctgcccagaaagctcagaaggctaaatgaatattatccctaatacctgccaccccactcttaatcagtggtggaagaacggtctcagaactgtttgtttcaattggccatttaagtttagtagtaaaagactggttaatgataacaatgcatcgtaaaaccttcagaaggaaaggagaatgttttgtggaccactttggttttcttttttgcgtgtggcagttttaagttattagtttttaaaatcagtactttttaatggaaacaacttgaccaaaaatttgtcacagaattttgagacccattaaaaaagttaaatgagaaa

SEQ ID NO: 48952 - DNA, 1810 bp, Homo sapiens
  misc_feature (424)..(424): n is a, c, g, or t
ggacgcgtgggtccggacgcgtgggtcgacccacgcgtcgcggggtttgccgccagaacacaggtgtcgtgaaaactacccctaaaagccaaaatgggaaaggaaaagactcatatcaacattgtcgtcattggacacgtagattcgggcaagtccaccactactggccatctgatctataaatgcggtggcatcgacaaaagaaccattgaaaaatttgagaaggaggctgctgagatgggaaagggctccttcaagtatgcctgggtcttggataaactgaaagctgagcgtgaacgtggtatcaccattgatatctccttgtggaaatttgagaccagcaagtactatgtgactatcattgatgccccaggacacagagactttatcaaaaacatgattacagggacatctcagcttgacntggtttggggggccccctttttggggggctgactgtgctgtcctgattgttgctgctggtgttggtgaatttgaagctggtatctccaagaatgggcagacccgagagcatgcccttctggcttacacactgggtgtgaaacaactaattgtcggtgttaacaaaatggattccactgagccaccctacagccagaagagatatgaggaaattgttaaggaagtcagcacttacattaagaaaattggctacaaccccgacacagtagcatttgtgccaatttctggttggaatggtgacaacatgctggagccaagtgctaacatgccttggttcaagggatggaaagtcacccgtaaggatggcaatgccagtggaaccacgctgcttgaggctctggactgcatcctaccaccaactcgtccaactgacaagcccttgcgcctgctctccaggatgtctacaaaattggtggtattggtactgttcctgttggccgagtggagactggtgttctcaaacccggtatggtggtcacctttgctccagtcaacgttacaacggaagtaaaatctgtcgaaatgcaccatgaagctttgagtgaagctcttcctggggacaatgtgggcttcaatgtcaagaatgtgtctgtcaaggatgttcgtcgtggcaacgttgctggtgacagcaaaaatgacccaccaatggaagcagctggcttcactgctcaggtgattatcctgaaccatccaggccaaataagcgccggctatgcccctgtattggattgccacacggctcacattgcatgcaagtttgctgagctgaaggaaaagattgatcgccgttctggtaaaaagctggaagatggccctaaattcttgaagtctggtgatgctgccattgttgatatggttcctggcaagcccatgtgtgttgagagcttctcagactatccacctttgggtcgctttgctgttcgtgatatgagacagacagttgcggtgggtgtcatcaaagcagtggacaagaaggctgctggagctggcaaggtcaccaagtctgcccagaaagctcagaaggctaaatgaatattatccctaatacctgccaccccactcttaatcagtggtggaagaacggtctcagaactgtttgtttcaattggccatttaagtttagtagtaaaagactggttaatgataacaatgcatcgtaaaaccttcagaaggaaaggagaatgttttgtggaccactttggttttcttttttgcgtgtggcagttttaagttattagtttttaaaatcagtactttttaatggaaacaacttgaccaaaaatttgtcacagaattttgagacccattaaaaaagttaaatgagaaa

SEQ ID NO: 48953 - DNA, 1614 bp, Homo sapiens
tggtccggatcaggagtgctgggttggtcaaaattgtgcactgatgggccagaacacaggtgtcgtgaaaactacccctaaaagccaaaatgggaaaggaaaagactcatatcaacattgtcgtcattggacacgtagattcgggcaagtccaccactactggccatctgatctataaatgcggtggcatcgacaaaagaaccattgaaaaatttgagaaggaggctgctgagatgggaaagggctccttcaagtatgcctgggtcttggataaactgaaagctgagcgtgaacgtggtatcaccattgatatctcctaatgggcagacccgagagcatgcccttctggcttacacactgggtgtgaaacaactaattgtcggtgttaacaaaatggattccactgagccaccctacagccagaagagatatgaggaaattgttaaggaagtcagcacttacattaagaaaattggctacaaccccgacacagtagcatttgtgccaatttctggttggaatggtgacaacatgctggagccaagtgctaacatgccttggttcaagggatggaaagtcacccgtaaggatggcaatgccagtggaaccacgctgcttgaggctctggactgcatcctaccaccaactcgtccaactgacaagcccttgcgcctgctctccaggatgtctacaaaattggtggtattggtactgttcctgttggccgagtggagactggtgttctcaaacccggtatggtggtcacctttgctccagtcaacgttacaacggaagtaaaatctgtcgaaatgcaccatgaagctttgagtgaagctcttcctggggacaatgtgggcttcaatgtcaagaatgtgtctgtcaaggatgttcgtcgtggcaacgttgctggtgacagcaaaaatgacccaccaatggaagcagctggcttcactgctcaggtgattatcctgaaccatccaggccaaataagcgccggctatgcccctgtattggattgccacacggctcacattgcatgcaagtttgctgagctgaaggaaaagattgatcgccgttctggtaaaaagctggaagatggccctaaattcttgaagtctggtgatgctgccattgttgatatggttcctggcaagcccatgtgtgttgagagcttctcagactatccacctttgggtcgctttgctgttcgtgatatgagacagacagttgcggtgggtgtcatcaaagcagtggacaagaaggctgctggagctggcaaggtcaccaagtctgcccagaaagctcagaaggctaaatgaatattatccctaatacctgccaccccactcttaatcagtggtggaagaacggtctcagaactgtttgtttcaattggccatttaagtttagtagtaaaagactggttaatgataacaatgcatcgtaaaaccttcagaaggaaaggagaatgttttgtggaccactttggttttcttttttgcgtgtggcagttttaagttattagtttttaaaatcagtactttttaatggaaacaacttgaccaaaaatttgtcacagaattttgagacccattaaaaaagttaaatgagaaa

SEQ ID NO: 48954 - DNA, 1725 bp, Homo sapiens
ggacgcgtgggtccggacgcgtgggtcgacccacgcgtcgcggggtttgccgccagaacacaggtgtcgtgaaaactacccctaaaagccaaaatgggaaaggaaaagactcatatcaacattgtcgtcattggacacgtagattcgggcaagtccaccactactggccatctgatctataaatgcggtggcatcgacaaaagaaccattgaaaaatttgagaaggaggctgctgagatgggaaagggctccttcaagtatgcctgggtcttggataaactgaaagctgagcgtgaacgtggtatcaccattgatatctccttgtggaaatttgagaccagcaagtactatgtgactatcattgatgccccaggacacagagactttatcaaaaacatgattacagggacatctcaggctgactgtgctgtcctgattgttgctgctggtgttggtgaatttgaagctggtatctccaagaatgggcagacccgagagcatgcccttctggcttacacactgggtgtgaaacaactaattgtcggtgttaacaaaatggattccactgagccaccctacagccagaagagatatgaggaaattgttaaggaagtcagcacttacattaagaatggtgacaacatgctggagccaagtgctaacatgccttggttcaagggatggaaagtcacccgtaaggatggcaatgccagtggaaccacgctgcttgaggctctggactgcatcctaccaccaactcgtccaactgacaagcccttgcgcctgctctccaggatgtctacaaaattggtggtattggtactgttcctgttggccgagtggagactggtgttctcaaacccggtatggtggtcacctttgctccagtcaacgttacaacggaagtaaaatctgtcgaaatgcaccatgaagctttgagtgaagctcttcctggggacaatgtgggcttcaatgtcaagaatgtgtctgtcaaggatgttcgtcgtggcaacgttgctggtgacagcaaaaatgacccaccaatggaagcagctggcttcactgctcaggtgattatcctgaaccatccaggccaaataagcgccggctatgcccctgtattggattgccacacggctcacattgcatgcaagtttgctgagctgaaggaaaagattgatcgccgttctggtaaaaagctggaagatggccctaaattcttgaagtctggtgatgctgccattgttgatatggttcctggcaagcccatgtgtgttgagagcttctcagactatccacctttgggtcgctttgctgttcgtgatatgagacagacagttgcggtgggtgtcatcaaagcagtggacaagaaggctgctggagctggcaaggtcaccaagtctgcccagaaagctcagaaggctaaatgaatattatccctaatacctgccaccccactcttaatcagtggtggaagaacggtctcagaactgtttgtttcaattggccatttaagtttagtagtaaaagactggttaatgataacaatgcatcgtaaaaccttcagaaggaaaggagaatgttttgtggaccactttggttttcttttttgcgtgtggcagttttaagttattagtttttaaaatcagtactttttaatggaaacaacttgaccaaaaatttgtcacagaattttgagacccattaaaaaagttaaatgagaaa

SEQ ID NO: 48955 - DNA, 1170 bp, Homo sapiens
  misc_feature (862)..(862): n is a, c, g, or t
tggtccggatcaggagtgctgggttggtcaaaattgtgcactgatgggccagaacacaggtgtcgtgaaaactacccctaaaagccaaaatgggaaaggaaaagactcatatcaacattgtcgtcattggacacgtagattcgggcaagtccaccactactggccatctgatctataaatgcggtggcatcgacaaaagaaccattgaaaaatttgagaaggaggctgctgagatgggaaagggctccttcaagtatgcctgggtcttggataaactgaaagctgagcgtgaacgtggtatcaccattgatatctccttgtggaaatttgagaccagcaagtactatgtgactatcattgatgccccaggacacagagactttatcaaaaacatgattacagggacatctcaggctgactgtgctgtcctgattgttgctgctggtgttggtgaatttgaagctggtatctccaagaatgggcagacccgagagcatgcccttctggcttacacactgggtgtgaaacaactaattgtcggtgttaacaaaatggattccactgagccaccctacagccagaagagatatgaggaaattgttaaggaagtcagcacttacattaagaaaattggctacaaccccgacacagtagcatttgtgccaatttctggttggaatggtgacaacatgctggagccaagtgctaacatgccttggttcaagggatggaaagtcacccgtaaggatggcaatgccagtggaaccacgctgcttgaggctctggactgcatcctaccaccaactcgtccaactgacaagcccttgcgcctgctctccaggatgtctacaaaattggtgtnggtactgttctgttgccgatggagactggggtctcaacccggatggtggcaccttgttcagtcacgtcacggagtaaactgcgaatccctgaacttgatgactctctgggcatgggctccaatgcaagaatggctgcaggagttcgcctggacgtgcgggacgcaaaggcccacggggcagggctcccgccgggaccggaaccggcaaaaacgaccgtgtgccaggcattcatgggaacaaagctaagaagcaaaacaggggatcccagacacacctggaggacagcgccgatgaccacaaacacaaa

SEQ ID NO: 48956 - DNA, 889 bp, Homo sapiens
  misc_feature (834)..(834): n is a, c, g, or t
  misc_feature (845)..(845): n is a, c, g, or t
ggacgcgtgggtccggacgcgtgggtcgacccacgcgtcgcggggtttgccgccagaacacaggtgtcgtgaaaactacccctaaaagccaaaatgggaaaggaaaagactcatatcaacattgtcgtcattggacacgtagattcgggcaagtccaccactactggccatctgatctataaatgcggtggcatcgacaaaagaaccattgaaaaatttgagaaggaggctgctgagatgggaaagggctccttcaagtatgcctgggtcttggataaactgaaagctgagcgtgaacgtggtatcaccattgatatctccttgtggaaatttgagaccagcaagtactatgtgactatcattgatgccccaggacacagagactttatcaaaaacatgattacagggacatctcaggctgactgtgctgtcctgattgttgctgctggtgttggtgaatttgaagctggtatctccaagaatgggcagacccgagagcatgcccttctggcttacacactgggtgtgaaacaactaattgtcggtgttaacaaaatggattccactgagccaccctacagccagaagagatatgaggaaattgttaaggaagtcagcacttacattaagaaaattggctacaaccccgacacagtagcatttgtgccaatttctggttggaatggtgacaacatgctggagccaagtgctaacatgccttggttcaagggatggaaagtcacccgtaaggatggcaatgccagtggaaccacgctgcttgaggctctggactgcatcctaccaccaactcgtccatgaaagccttggctgctntcagagttacnaatggggttggcggcggggcgggaagggtttaaccgtggggtca

SEQ ID NO: 48957 - DNA, 958 bp, Homo sapiens
cttgtcagttggacgagttggtggtaggatgcctacaaaattggtggtattggtactgttcctgttggccgagtggagactggtgttctcaaacccggtatggtggtcacctttgctccagtcaacgttacaacggaagtaaaatctgtcgaaatgcaccatgaagctttgagtgaagctcttcctggggacaatgtgggcttcaatgtcaagaatgtgtctgtcaaggatgttcgtcgtggcaacgttgctggtgacagcaaaaatgacccaccaatggaagcagctggcttcactgctcaggtgattatcctgaaccatccaggccaaataagcgccggctatgcccctgtattggattgccacacggctcacattgcatgcaagtttgctgagctgaaggaaaagattgatcgccgttctggtaaaaagctggaagatggccctaaattcttgaagtctggtgatgctgccattgttgatatggttcctggcaagcccatgtgtgttgagagcttctcagactatccacctttgggtcgctttgctgttcgtgatatgagacagacagttgcggtgggtgtcatcaaagcagtggacaagaaggctgctggagctggcaaggtcaccaagtctgcccagaaagctcagaaggctaaatgaatattatccctaatacctgccaccccactcttaatcagtggtggaagaacggtctcagaactgtttgtttcaattggccatttaagtttagtagtaaaagactggttaatgataacaatgcatcgtaaaaccttcagaaggaaaggagaatgttttgtggaccactttggttttcttttttgcgtgtggcagttttaagttattagtttttaaaatcagtactttttaatggaaacaacttgaccaaaaatttgtcacagaattttgagacccattaaaaaagttaaatgagaaa

SEQ ID NO: 48958 - DNA, 801 bp, Homo sapiens
ggacgcgtgggtccggacgcgtgggtcgacccacgcgtcgcggggtttgccgccagaacacaggtgtcgtgaaaactacccctaaaagccaaaatgggaaaggaaaagactcatatcaacattgtcgtcattggacacgtagattcgggcaagtccaccactactggccatctgatctataaatgcggtggcatcgacaaaagaaccattgaaaaatttgagaaggaggctgctgagatgggaaagggctccttcaagtatgcctgggtcttggataaactgaaagctgagcgtgaacgtggtatcaccattgatatctccttgtggaaatttgagaccagcaagtactatgtgactatcattgatgccccaggacacagagactttatcaaaaacatgattacagggacatctcaggctgactgtgctgtcctgattgttgctgctggtgttggtgaatttgaagctggtatctccaagaatgggcagacccgagagcatgcccttctggcttacacactgggtgtgaaacaactaattgtcggtgttaacaaaatggattccactgagccaccctacagccagaagagatatgaggaaattgttaaggaagtcagcacttacattaagaaaattggctacaaccccgacacagtagcatttgtgccaatttctggttggaatggtgacaacatgctggagccaagtgctaacatgcctggtccagggatgaagtccgtaggtggaagccggaccaccgtgagccggaggtctaaccaacgcggccggcgcgccgtcggg

SEQ ID NO: 48959 - DNA, 607 bp, Homo sapiens
ggacgcgtgggtccggacgcgtgggtcgacccacgcgtcgcggggtttgccgccagaacacaggtgtcgtgaaaactacccctaaaagccaaaatgggaaaggaaaagactcatatcaacattgtcgtcattggacacgtagattcgggcaagtccaccactactggccatctgatctataaatgcggtggcatcgacaaaagaaccattgaaaaatttgagaaggaggctgctgagatgggaaagggctccttcaagtatgcctgggtcttggataaactgaaagctgagcgtgaacgtggtatcaccattgatatctccttgtggaaatttgagaccagcaagtactatgtgactatcattgatgccccaggacacagagactttatcaaaaacatgattacagggacatctcaggctgactgtgctgtcctgattgttgctgctggtgttggtgaatttgaagctggtatctccaagaatgggcagacccgagagcatgcccttctggcttacacactgggtgtgaaacaactaattgtcggtgttaacaaaacactagcacctcagcagagggataggatgttaggagtagcctcataggaat

SEQ ID NO: 48960 - DNA, 952 bp, Homo sapiens
ggcattggagtgatgctgggccctgctaactcaccatgtgaccctaggccttagtgtaccctgagcaggctgtgctcttaggcccaggccagcccacagcctgtgactgctctgtcctgcctgtaggtggccctgaatttccagacacctgggccagagatggacgtgtaccagggccgcttccaggacaacggggcctgtgggtacgtgctgaagcccgccttcctgcgagaccccaacggcacctttaacccccgcgccctggctcaggggccctggtgggcacggaagcggctcaacatcagggtcatttcggggcagcagctgccaaaagtcaacaagaataagaattcaattgtggaccccaaagtgacagtggagatccatggcgtgagccgggacgtggccagccgccagactgctgtcatcaccaacaatggtttcaacccatggtgggacacggagtttgcgtttgaggtagttgtgcctgaccttgccctcatccgcttcttggtggaagattatgatgcctcctccaagaatgacttcattggccagagtaccatccccttgaacagcctcaagcaaggataccgccatgtccacctcatgtctaagaacggggaccagcatccatcagccaccctctttgtgaagatctccctccaggactaggctggaggaagccagtggggtcccccctgagtgggctgggccctctgtccacatgtggggacagggctggtgtggctgctcccagcctcttgctcagagctaggcccccaaattgccttcagccctaacatagtgtctgctgctgcctccctggggaccaggagctagcccagtccctggagctgtccttcattccgttaggaataacactgcagccctctccaccctccggccagcgagtggtcaaggatttttataaaaatcacgataagattaa

SEQ ID NO: 48961 - DNA, 2771 bp, Homo sapiens
cgcgtccccagaagggggcggggagagacgagggttggcgggctcagggggcgggggcgcagggcagcgggggcggggcggtgtcccgggaccacccccggcctcctcccaccgcggtccattcaggtccctgcaccgcactccgctcggaccccaggccgccggtgctgtcgctactcaagtgagtcccgcggtgcccctcccgccgcgccgcccgtcgggcatggactcgggccgggacttcctgaccctgcacggcctacaggatgatgaggatctacaggcgctgctgaagggcagccagctcctgaaggtgaagtccagctcatggaggagagagcgcttctacaagttgcaggaggactgcaagaccatctggcaggagtcccgcaaggtcatgcggaccccggagtcccagctgttctccatcgaggacattcaggaggtgcgaatggggcaccgcacggagggtctggagaagttcgcccgtgatgtgcccgaggaccgctgcttctccattgtcttcaaggaccagcgcaatacactagacctcatcgccccatcgccagctgatgcccagcactgggtgctggggctgcacaagatcatccaccactcaggctccatggaccagcgtcagaagctacagcactggattcactcctgcttgcgaaaagctgacaaaaacaaggacaacaagatgagcttcaaggagctgcagaacttcctgaaggagctcaacatccaggtggacgacagctatgcccggaagatcttcagggagtgtgaccactcccagacagactccctggaggacgaggagattgaggccttctacaagatgctgacccagcgggtggagatcgaccgcaccttcgccgaggccgcgggctcaggggagactctgtcggtggatcagttagtgacgttcctgcagcaccagcagcgggaggaggcggcagggcctgcgctggccctctccctcattgagcgctacgagcccagcgagactgccaaggcgcagcggcagatgaccaaggacggcttcctcatgtacttactgtcggctgacggcagcgccttcagcctggcacaccgccgtgtctaccaggacatgggccagccacttagccactacctggtgtcctcttcacacaacacctacctgctggaggaccagctagccgggcccagcagcactgaagcctacatccgggcactgtgcaaaggctgccgatgcctggagcttgactgctgggacgggcccaaccaggaaccaatcatctaccacggctatactttcacttccaagatcctcttctgcgatgtgctcagggccatccgggactatgccttcaaggcgtccccctaccctgtcatcctatccctggagaaccactgcacactggagcagcagcgcgtgatggcgcggcacctgcatgccatcctgggccccatgctgttgaaccgaccactggatggggtcaccaacagcctgccctcccctgagcaactgaaggggaagatcctgctgaaggggaagaagctcggggggctcctgccccctggaggggagggtggccctgaggccactgtggtgtcagacgaagacgaggctgctgagatggaggatgaggcagtgaggagccgtgtgcagcacaagcccaaggaggacaagctcaggctagcacaggagctctctgacatggtcatttactgcaagagtgtccactttgggggcttctccagtcctggcacccctggacaggccttctacgagatggcgtccttctctgagaaccgtgcccttcgactgctccaagaatcaggaaacggctttgtccgccacaacgtggggcacctgagcagaatctacccggctggatggagaacagactcctccaactacagccccgtggagatgtggaatgggggctgccagatcgtggccctgaatttccagacacctgggccagagatggacgtgtaccagggccgcttccaggacaacggggcctgtgggtacgtgctgaagcccgccttcctgcgagaccccaacggcacctttaacccccgcgccctggctcaggggccctggtgggcacggaagcggctcaacatcagggtcatttcggggcagcagctgccaaaagtcaacaagaataagaattcaattgtggaccccaaagtgacagtggagatccatggcgtgagccgggacgtggccagccgccagactgctgtcatcaccaacaatggtttcaacccatggtgggacacggagtttgcgtttgaggtagttgtgcctgaccttgccctcatccgcttcttggtggaagattatgatgcctcctccaagaatgacttcattggccagagtaccatccccttgaacagcctcaagcaaggataccgccatgtccacctcatgtctaagaacggggaccagcatccatcagccaccctctttgtgaagatctccctccaggactaggctggaggaagccagtggggtcccccctgagtgggctgggccctctgtccacatgtggggacagggctggtgtggctgctcccagcctcttgctcagagctaggcccccaaattgccttcagccctaacatagtgtctgctgctgcctccctggggaccaggagctagcccagtccctggagctgtccttcattccgttaggaataacactgcagccctctccaccctccggccagcgagtggtcaaggatttttataaaaatcacgataagattaa

SEQ ID NO: 48962 - DNA, 2731 bp, Homo sapiens
ccctccaagggcgacagttccgccccccggaccagagcagagggtgttgtgagcataaaacactggaggcggcactgccccggacccggctccgcgcaggcaggggcactgtggagggccatgcagtgcctggggatccggagccggagccgctccagggagctctacctgcaggagcggagccttaaggtggcggcgctcaatggacggaggctgggcctacaggatgatgaggatctacaggcgctgctgaagggcagccagctcctgaaggtgaagtccagctcatggaggagagagcgcttctacaagttgcaggaggactgcaagaccatctggcaggagtcccgcaaggtcatgcggaccccggagtcccagctgttctccatcgaggacattcaggaggtgcgaatggggcaccgcacggagggtctggagaagttcgcccgtgatgtgcccgaggaccgctgcttctccattgtcttcaaggaccagcgcaatacactagacctcatcgccccatcgccagctgatgcccagcactgggtgctggggctgcacaagatcatccaccactcaggctccatggaccagcgtcagaagctacagcactggattcactcctgcttgcgaaaagctgacaaaaacaaggacaacaagatgagcttcaaggagctgcagaacttcctgaaggagctcaacatccaggtggacgacagctatgcccggaagatcttcagggagtgtgaccactcccagacagactccctggaggacgaggagattgaggccttctacaagatgctgacccagcgggtggagatcgaccgcaccttcgccgaggccgcgggctcaggggagactctgtcggtggatcagttagtgacgttcctgcagcaccagcagcgggaggaggcggcagggcctgcgctggccctctccctcattgagcgctacgagcccagcgagactgccaaggcgcagcggcagatgaccaaggacggcttcctcatgtacttactgtcggctgacggcagcgccttcagcctggcacaccgccgtgtctaccaggacatgggccagccacttagccactacctggtgtcctcttcacacaacacctacctgctggaggaccagctagccgggcccagcagcactgaagcctacatccgggcactgtgcaaaggctgccgatgcctggagcttgactgctgggacgggcccaaccaggaaccaatcatctaccacggctatactttcacttccaagatcctcttctgcgatgtgctcagggccatccgggactatgccttcaaggcgtccccctaccctgtcatcctatccctggagaaccactgcacactggagcagcagcgcgtgatggcgcggcacctgcatgccatcctgggccccatgctgttgaaccgaccactggatggggtcaccaacagcctgccctcccctgagcaactgaaggggaagatcctgctgaaggggaagaagctcggggggctcctgccccctggaggggagggtggccctgaggccactgtggtgtcagacgaagacgaggctgctgagatggaggatgaggcagtgaggagccgtgtgcagcacaagcccaaggaggacaagctcaggctagcacaggagctctctgacatggtcatttactgcaagagtgtccactttgggggcttctccagtcctggcacccctggacaggccttctacgagatggcgtccttctctgagaaccgtgcccttcgactgctccaagaatcaggaaacggctttgtccgccacaacgtggggcacctgagcagaatctacccggctggatggagaacagactcctccaactacagccccgtggagatgtggaatgggggctgccagatcgtggccctgaatttccagacacctgggccagagatggacgtgtaccagggccgcttccaggacaacggggcctgtgggtacgtgctgaagcccgccttcctgcgagaccccaacggcacctttaacccccgcgccctggctcaggggccctggtgggcacggaagcggctcaacatcagggtcatttcggggcagcagctgccaaaagtcaacaagaataagaattcaattgtggaccccaaagtgacagtggagatccatggcgtgagccgggacgtggccagccgccagactgctgtcatcaccaacaatggtttcaacccatggtgggacacggagtttgcgtttgaggtagttgtgcctgaccttgccctcatccgcttcttggtggaagattatgatgcctcctccaagaatgacttcattggccagagtaccatccccttgaacagcctcaagcaaggataccgccatgtccacctcatgtctaagaacggggaccagcatccatcagccaccctctttgtgaagatctccctccaggactaggctggaggaagccagtggggtcccccctgagtgggctgggccctctgtccacatgtggggacagggctggtgtggctgctcccagcctcttgctcagagctaggcccccaaattgccttcagccctaacatagtgtctgctgctgcctccctggggaccaggagctagcccagtccctggagctgtccttcattccgttaggaataacactgcagccctctccaccctccggccagcgagtggtcaaggatttttataaaaatcacgataagattaa

SEQ ID NO: 48963 - DNA, 2807 bp, Homo sapiens
ccctccaagggcgacagttccgccccccggaccagagcagagggtgttgtgagcataaaacactggaggcggcactgccccggacccggctccgcgcaggcaggggcactgtggagggccatgcagtgcctggggatccggagccggagccgctccagggagctctacctgcaggagcggagccttaaggtggcggcgctcaatggacggaggctgggcctacaggatgatgaggatctacaggcgctgctgaagggcagccagctcctgaaggtgaagtccagctcatggaggagagagcgcttctacaagttgcaggaggactgcaagaccatctggcaggagtcccgcaaggtcatgcggaccccggagtcccagctgttctccatcgaggacattcaggaggtgcgaatggggcaccgcacggagggtctggagaagttcgcccgtgatgtgcccgaggaccgctgcttctccattgtcttcaaggaccagcgcaatacactagacctcatcgccccatcgccagctgatgcccagcactgggtgctggggctgcacaagatcatccaccactcaggctccatggaccagcgtcagaagctacagcactggattcactcctgcttgcgaaaagctgacaaaaacaaggacaacaagatgagcttcaaggagctgcagaacttcctgaaggagctcaacatccaggtggacgacagctatgcccggaagatcttcagggagtgtgaccactcccagacagactccctggaggacgaggagattgaggccttctacaagatgctgacccagcgggtggagatcgaccgcaccttcgccgaggccgcgggctcaggggagactctgtcggtggatcagttagtgacgttcctgcagcaccagcagcgggaggaggcggcagggcctgcgctggccctctccctcattgagcgctacgagcccagcgagactgccaaggcgcagcggcagatgaccaaggacggcttcctcatgtacttactgtcggctgacggcagcgccttcagcctggcacaccgccgtgtctaccaggacatgggccagccacttagccactacctggtgtcctcttcacacaacacctacctgctggaggaccagctagccgggcccagcagcactgaagcctacatccgggcactgtgcaaaggctgccgatgcctggagcttgactgctgggacgggcccaaccaggaaccaatcatctaccacggctatactttcacttccaagatcctcttctgcgatgtgctcagggccatccgggactatgccttcaaggtgggagtcccctggcaggtgaggagtgggatgctaggggtggcccaccactcctaaatgtcccttgggcctccaggcgtccccctaccctgtcatcctatccctggagaaccactgcacactggagcagcagcgcgtgatggcgcggcacctgcatgccatcctgggccccatgctgttgaaccgaccactggatggggtcaccaacagcctgccctcccctgagcaactgaaggggaagatcctgctgaaggggaagaagctcggggggctcctgccccctggaggggagggtggccctgaggccactgtggtgtcagacgaagacgaggctgctgagatggaggatgaggcagtgaggagccgtgtgcagcacaagcccaaggaggacaagctcaggctagcacaggagctctctgacatggtcatttactgcaagagtgtccactttgggggcttctccagtcctggcacccctggacaggccttctacgagatggcgtccttctctgagaaccgtgcccttcgactgctccaagaatcaggaaacggctttgtccgccacaacgtggggcacctgagcagaatctacccggctggatggagaacagactcctccaactacagccccgtggagatgtggaatgggggctgccagatcgtggccctgaatttccagacacctgggccagagatggacgtgtaccagggccgcttccaggacaacggggcctgtgggtacgtgctgaagcccgccttcctgcgagaccccaacggcacctttaacccccgcgccctggctcaggggccctggtgggcacggaagcggctcaacatcagggtcatttcggggcagcagctgccaaaagtcaacaagaataagaattcaattgtggaccccaaagtgacagtggagatccatggcgtgagccgggacgtggccagccgccagactgctgtcatcaccaacaatggtttcaacccatggtgggacacggagtttgcgtttgaggtagttgtgcctgaccttgccctcatccgcttcttggtggaagattatgatgcctcctccaagaatgacttcattggccagagtaccatccccttgaacagcctcaagcaaggataccgccatgtccacctcatgtctaagaacggggaccagcatccatcagccaccctctttgtgaagatctccctccaggactaggctggaggaagccagtggggtcccccctgagtgggctgggccctctgtccacatgtggggacagggctggtgtggctgctcccagcctcttgctcagagctaggcccccaaattgccttcagccctaacatagtgtctgctgctgcctccctggggaccaggagctagcccagtccctggagctgtccttcattccgttaggaataacactgcagccctctccaccctccggccagcgagtggtcaaggatttttataaaaatcacgataagattaa

SEQ ID NO: 48964 - DNA, 282 bp, Homo sapiens
gagatccatggcgtgagccgggacgtggccagccgccagactgctgtcatcaccaacaatggtaggtgctgggcctgggctgggctactagggctggtgtccatgctgctgatatggtgcctgtccccctaggtttcaacccatggtgggacacggagtttgcgtttgaggtagttgtgcctgaccttgccctcatccgcttcttggtggaagattatgatgcctcctccaagaatgacttcattggccagagtaccatccccttgaacagcctcaagcaag

SEQ ID NO: 48965 - DNA, 457 bp, Homo sapiens
actccgcggtatctgcatcgggcctcactggcttcaggagctgaataccctcccaggcacacacaggtgggacacaaataagggttttggaaccactattttctcatcacgacagcaacttaaaatgcctgggaagatggtcgtgatccttggagcctcaaatatactttggataatgtttgcagcttctcaagcttttaaaatcgagaccaccccagaatctagatatcttgctcagattggtgactccgtctcattgacttgcagcaccacaggctgtgagtccccatttttctctgtatagtactggcatggtacggagatgtttcacgaagtttgttcatcagactcctgtgcaactttcccaatgtggcctaaaaatgcaacttctttttattttcttttgtaaatgtttaggtttttttgtatagtaaagtgataatttctggaattagaa

SEQ ID NO: 48966 - DNA, 3159 bp, Homo sapiens
  misc_feature (3117)..(3117): n is a, c, g, or t
  misc_feature (3124)..(3125): n is a, c, g, or t
  misc_feature (3130)..(3130): n is a, c, g, or t
actccgcggtatctgcatcgggcctcactggcttcaggagctgaataccctcccaggcacacacaggtgggacacaaataagggttttggaaccactattttctcatcacgacagcaacttaaaatgcctgggaagatggtcgtgatccttggagcctcaaatatactttggataatgtttgcagcttctcaagcttttaaaatcgagaccaccccagaatctagatatcttgctcagattggtgactccgtctcattgacttgcagcaccacaggctgtgagtccccatttttctcttggagaacccagatagatagtccactgaatgggaaggtgacgaatgaggggaccacatctacgctgacaatgaatcctgttagttttgggaacgaacactcttacctgtgcacagcaacttgtgaatctaggaaattggaaaaaggaatccaggtggagatctactcttttcctaaggatccagagattcatttgagtggccctctggaggctgggaagccgatcacagtcaagtgttcagttgctgatgtatacccatttgacaggctggagatagacttactgaaaggagatcatctcatgaagagtcaggaatttctggaggatgcagacaggaagtccctggaaaccaagagtttggaagtaacctttactcctgtcattgaggatattggaaaagttcttgtttgccgagctaaattacacattgatgaaatggattctgtgcccacagtaaggcaggctgtaaaagaattgcaagtctacatatcacccaagaatacagttatttctgtgaatccatccacaaagctgcaagaaggtggctctgtgaccatgacctgttccagcgagggtctaccagctccagagattttctggagtaagaaattagataatgggaatctacagcacctttctggaaatgcaactctcaccttaattgctatgaggatggaagattctggaatttatgtgtgtgaaggagttaatttgattgggaaaaacagaaaagaggtggaattaattgttcaagagaaaccatttactgttgagatctcccctggaccccggattgctgctcagattggagactcagtcatgttgacatgtagtgtcatgggctgtgaatccccatctttctcctggagaacccagatagacagccctctgagcgggaaggtgaggagtgaggggaccaattccacgctgaccctgagccctgtgagttttgagaacgaacactcttatctgtgcacagtgacttgtggacataagaaactggaaaagggaatccaggtggagctctactcattccctagagatccagaaatcgagatgagtggtggcctcgtgaatgggagctctgtcactgtaagctgcaaggttcctagcgtgtacccccttgaccggctggagattgaattacttaagggggagactattctggagaatatagagtttttggaggatacggatatgaaatctctagagaacaaaagtttggaaatgaccttcatccctaccattgaagatactggaaaagctcttgtttgtcaggctaagttacatattgatgacatggaattcgaacccaaacaaaggcagagtacgcaaacactttatgtcaatgttgcccccagagatacaaccgtcttggtcagcccttcctccatcctggaggaaggcagttctgtgaatatgacatgcttgagccagggctttcctgctccgaaaatcctgtggagcaggcagctccctaacggggagctacagcctctttctgagaatgcaactctcaccttaatttctacaaaaatggaagattctggggtttatttatgtgaaggaattaaccaggctggaagaagcagaaaggaagtggaattaattatccaagttactccaaaagacataaaacttacagcttttccttctgagagtgtcaaagaaggagacactgtcatcatctcttgtacatgtggaaatgttccagaaacatggataatcctgaagaaaaaagcggagacaggagacacagtactaaaatctatagatggcgcctataccatccgaaaggcccagttgaaggatgcgggagtatatgaatgtgaatctaaaaacaaagttggctcacaattaagaagtttaacacttgatgttcaaggaagagaaaacaacaaagactatttttctcctgagcttctcgtgctctattttgcatcctccttaataatacctgccattggaatgataatttactttgcaagaaaagccaacatgaaggggtcatatagtcttgtagaagcacagaaatcaaaagtgtagctaatgcttgatatgttcaactggagacactatttatctgtgcaaatccttgatactgctcatcattccttgagaaaaacaatgagctgagaggcagacttccctgaatgtattgaacttggaaagaaatgcccatctatgtcccttgctgtgagcaagaagtcaaagtaaaacttgctgcctgaagaacagtaactgccatcaagatgagagaactggaggagttccttgatctgtatatacaataacataatttgtacatatgtaaaataaaattatgccatagcaagattgcttaaaatagcaacactctatatttagattgttaaaataactagtgttgcttggactattataatttaatgcatgttaggaaaatttcacattaatatttgctgacagctgacctttgtcatctttcttctattttattccctttcacaaaattttattcctatatagtttattgacaataatttcaggttttgtaaagatgccgggttttatatttttatagacaaataataagcaaagggagcactgggttgactttcaggtactaaatacctcaacctatggtataatggttgactgggtttctctgtatagtactggcatggtacggagatgtttcacgaagtttgttcatcagactcctgtgcaactttcccaatgtggcctaaaaatgcaacttctttttattttcttttgtaaatgtttaggtttttttgtatagtaaagtgataatttctggaattagaaaaaaaaacaanaacaaannaaacnacaaagaaccaacaaaacaaaaagggggg

SEQ ID NO: 48967 - DNA, 3106 bp, Homo sapiens
actccgcggtatctgcatcgggcctcactggcttcaggagctgaataccctcccaggcacacacaggtgggacacaaataagggttttggaaccactattttctcatcacgacagcaacttaaaatgcctgggaagatggtcgtgatccttggagcctcaaatatactttggataatgtttgcagcttctcaagcttttaaaatcgagaccaccccagaatctagatatcttgctcagattggtgactccgtctcattgacttgcagcaccacaggctgtgagtccccatttttctcttggagaacccagatagatagtccactgaatgggaaggtgacgaatgaggggaccacatctacgctgacaatgaatcctgttagttttgggaacgaacactcttacctgtgcacagcaacttgtgaatctaggaaattggaaaaaggaatccaggtggagatctactcttttcctaaggatccagagattcatttgagtggccctctggaggctgggaagccgatcacagtcaagtgttcagttgctgatgtatacccatttgacaggctggagatagacttactgaaaggagatcatctcatgaagagtcaggaatttctggaggatgcagacaggaagtccctggaaaccaagagtttggaagtaacctttactcctgtcattgaggatattggaaaagttcttgtttgccgagctaaattacacattgatgaaatggattctgtgcccacagtaaggcaggctgtaaaagaattgcaagtctacatatcacccaagaatacagttatttctgtgaatccatccacaaagctgcaagaaggtggctctgtgaccatgacctgttccagcgagggtctaccagctccagagattttctggagtaagaaattagataatgggaatctacagcacctttctggaaatgcaactctcaccttaattgctatgaggatggaagattctggaatttatgtgtgtgaaggagttaatttgattgggaaaaacagaaaagaggtggaattaattgttcaagagaaaccatttactgttgagatctcccctggaccccggattgctgctcagattggagactcagtcatgttgacatgtagtgtcatgggctgtgaatccccatctttctcctggagaacccagatagacagccctctgagcgggaaggtgaggagtgaggggaccaattccacgctgaccctgagccctgtgagttttgagaacgaacactcttatctgtgcacagtgacttgtggacataagaaactggaaaagggaatccaggtggagctctactcattccctagagatccagaaatcgagatgagtggtggcctcgtgaatgggagctctgtcactgtaagctgcaaggttcctagcgtgtacccccttgaccggctggagattgaattacttaagggggagactattctggagaatatagagtttttggaggatacggatatgaaatctctagagaacaaaagtttggaaatgaccttcatccctaccattgaagatactggaaaagctcttgtttgtcaggctaagttacatattgatgacatggaattcgaacccaaacaaaggcagagtacgcaaacactttatgtcaatgttgcccccagagatacaaccgtcttggtcagcccttcctccatcctggaggaaggcagttctgtgaatatgacatgcttgagccagggctttcctgctccgaaaatcctgtggagcaggcagctccctaacggggagctacagcctctttctgagaatgcaactctcaccttaatttctacaaaaatggaagattctggggtttatttatgtgaaggaattaaccaggctggaagaagcagaaaggaagtggaattaattatccaagttactccaaaagacataaaacttacagcttttccttctgagagtgtcaaagaaggagacactgtcatcatctcttgtacatgtggaaatgttccagaaacatggataatcctgaagaaaaaagcggagacaggagacacagtactaaaatctatagatggcgcctataccatccgaaaggcccagttgaaggatgcgggagtatatgaatgtgaatctaaaaacaaagttggctcacaattaagaagtttaacacttgatgttcaaggaagagaaaacaacaaagactatttttctcctgagcttctcgtgctctattttgcatcctccttaataatacctgccattggaatgataatttactttgcaagaaaagccaacatgaaggggtcatatagtcttgtagaagcacagaaatcaaaagtgtagctaatgcttgatatgttcaactggagacactatttatctgtgcaaatccttgatactgctcatcattccttgagaaaaacaatgagctgagaggcagacttccctgaatgtattgaacttggaaagaaatgcccatctatgtcccttgctgtgagcaagaagtcaaagtaaaacttgctgcctgaagaacagtaactgccatcaagatgagagaactggaggagttccttgatctgtatatacaataacataatttgtacatatgtaaaataaaattatgccatagcaagattgcttaaaatagcaacactctatatttagattgttaaaataactagtgttgcttggactattataatttaatgcatgttaggaaaatttcacattaatatttgctgacagctgacctttgtcatctttcttctattttattccctttcacaaaattttattcctatatagtttattgacaataatttcaggttttgtaaagatgccgggttttatatttttatagacaaataataagcaaagggagcactgggttgactttcaggtactaaatacctcaacctatggtataatggttgactgggtttctctgtatagtactggcatggtacggagatgtttcacgaagtttgttcatcagactcctgtgcaactttcccaatgtggcctaaaaatgcaacttctttttattttcttttgtaaatgtttaggtttttttgtatagtaaagtgataatttctggaattagaa

SEQ ID NO: 48968 - DNA, 2830 bp, Homo sapiens
actccgcggtatctgcatcgggcctcactggcttcaggagctgaataccctcccaggcacacacaggtgggacacaaataagggttttggaaccactattttctcatcacgacagcaacttaaaatgcctgggaagatggtcgtgatccttggagcctcaaatatactttggataatgtttgcagcttctcaagcttttaaaatcgagaccaccccagaatctagatatcttgctcagattggtgactccgtctcattgacttgcagcaccacaggctgtgagtccccatttttctcttggagaacccagatagatagtccactgaatgggaaggtgacgaatgaggggaccacatctacgctgacaatgaatcctgttagttttgggaacgaacactcttacctgtgcacagcaacttgtgaatctaggaaattggaaaaaggaatccaggtggagatctactcttttcctaaggatccagagattcatttgagtggccctctggaggctgggaagccgatcacagtcaagtgttcagttgctgatgtatacccatttgacaggctggagatagacttactgaaaggagatcatctcatgaagagtcaggaatttctggaggatgcagacaggaagtccctggaaaccaagagtttggaagtaacctttactcctgtcattgaggatattggaaaagttcttgtttgccgagctaaattacacattgatgaaatggattctgtgcccacagtaaggcaggctgtaaaagaattgcaagtctacatatcacccaagaatacagttatttctgtgaatccatccacaaagctgcaagaaggtggctctgtgaccatgacctgttccagcgagggtctaccagctccagagattttctggagtaagaaattagataatgggaatctacagcacctttctggaaatgcaactctcaccttaattgctatgaggatggaagattctggaatttatgtgtgtgaaggagttaatttgattgggaaaaacagaaaagaggtggaattaattgttcaagcattccctagagatccagaaatcgagatgagtggtggcctcgtgaatgggagctctgtcactgtaagctgcaaggttcctagcgtgtacccccttgaccggctggagattgaattacttaagggggagactattctggagaatatagagtttttggaggatacggatatgaaatctctagagaacaaaagtttggaaatgaccttcatccctaccattgaagatactggaaaagctcttgtttgtcaggctaagttacatattgatgacatggaattcgaacccaaacaaaggcagagtacgcaaacactttatgtcaatgttgcccccagagatacaaccgtcttggtcagcccttcctccatcctggaggaaggcagttctgtgaatatgacatgcttgagccagggctttcctgctccgaaaatcctgtggagcaggcagctccctaacggggagctacagcctctttctgagaatgcaactctcaccttaatttctacaaaaatggaagattctggggtttatttatgtgaaggaattaaccaggctggaagaagcagaaaggaagtggaattaattatccaagttactccaaaagacataaaacttacagcttttccttctgagagtgtcaaagaaggagacactgtcatcatctcttgtacatgtggaaatgttccagaaacatggataatcctgaagaaaaaagcggagacaggagacacagtactaaaatctatagatggcgcctataccatccgaaaggcccagttgaaggatgcgggagtatatgaatgtgaatctaaaaacaaagttggctcacaattaagaagtttaacacttgatgttcaaggaagagaaaacaacaaagactatttttctcctgagcttctcgtgctctattttgcatcctccttaataatacctgccattggaatgataatttactttgcaagaaaagccaacatgaaggggtcatatagtcttgtagaagcacagaaatcaaaagtgtagctaatgcttgatatgttcaactggagacactatttatctgtgcaaatccttgatactgctcatcattccttgagaaaaacaatgagctgagaggcagacttccctgaatgtattgaacttggaaagaaatgcccatctatgtcccttgctgtgagcaagaagtcaaagtaaaacttgctgcctgaagaacagtaactgccatcaagatgagagaactggaggagttccttgatctgtatatacaataacataatttgtacatatgtaaaataaaattatgccatagcaagattgcttaaaatagcaacactctatatttagattgttaaaataactagtgttgcttggactattataatttaatgcatgttaggaaaatttcacattaatatttgctgacagctgacctttgtcatctttcttctattttattccctttcacaaaattttattcctatatagtttattgacaataatttcaggttttgtaaagatgccgggttttatatttttatagacaaataataagcaaagggagcactgggttgactttcaggtactaaatacctcaacctatggtataatggttgactgggtttctctgtatagtactggcatggtacggagatgtttcacgaagtttgttcatcagactcctgtgcaactttcccaatgtggcctaaaaatgcaacttctttttattttcttttgtaaatgtttaggtttttttgtatagtaaagtgataatttctggaattagaa

SEQ ID NO: 48969 - DNA, 2416 bp, Homo sapiens
actccgcggtatctgcatcgggcctcactggcttcaggagctgaataccctcccaggcacacacaggtgggacacaaataagggttttggaaccactattttctcatcacgacagcaacttaaaatgcctgggaagatggtcgtgatccttggagcctcaaatatactttggataatgtttgcagcttctcaagcttttaaaatcgagaccaccccagaatctagatatcttgctcagattggtgactccgtctcattgacttgcagcaccacaggctgtgagtccccatttttctcttggagaacccagatagatagtccactgaatgggaaggtgacgaatgaggggaccacatctacgctgacaatgaatcctgttagttttgggaacgaacactcttacctgtgcacagcaacttgtgaatctaggaaattggaaaaaggaatccaggtggagatctactcttttcctaaggatccagagattcatttgagtggccctctggaggctgggaagccgatcacagtcaagtgttcagttgctgatgtatacccatttgacaggctggagatagacttactgaaaggagatcatctcatgaagagtcaggaatttctggaggatgcagacaggaagtccctggaaaccaagagtttggaagtaacctttactcctgtcattgaggatattggaaaagttcttgtttgccgagctaaattacacattgatgaaatggattctgtgcccacagtaaggcaggctgtaaaagaattgcaagtctacatatcacccaagaatacagttatttctgtgaatccatccacaaagctgcaagaaggtggctctgtgaccatgacctgttccagcgagggtctaccagctccagagattttctggagtaagaaattagataatgggaatctacagcacctttctggaaatgcaactctcaccttaattgctatgaggatggaagattctggaatttatgtgtgtgaaggagttaatttgattgggaaaaacagaaaagaggtggaattaattgttcaagagaaaccatttactgttgagatctcccctggaccccggattgctgctcagattggagactcagtcatgttgacatgtagtgtcatgggctgtgaatccccatctttctcctggagaacccagatagacagccctctgagcgggaaggtgaggagtgaggggaccaattccacgctgaccctgagccctgtgagttttgagaacgaacactcttatctgtgcacagtgacttgtggacataagaaactggaaaagggaatccaggtggagctctactcattccctagagatccagaaatcgagatgagtggtggcctcgtgaatgggagctctgtcactgtaagctgcaaggttcctagcgtgtacccccttgaccggctggagattgaattacttaagggggagactattctggagaatatagagtttttggaggatacggatatgaaatctctagagaacaaaagtttggaaatgaccttcatccctaccattgaagatactggaaaagctcttgtttgtcaggctaagttacatattgatgacatggaattcgaacccaaacaaaggcagagtacgcaaacactttatgtcaatgttgcccccagagatacaaccgtcttggtcagcccttcctccatcctggaggaaggcagttctgtgaatatgacatgcttgagccagggctttcctgctccgaaaatcctgtggagcaggcagctccctaacggggagctacagcctctttctgagaatgcaactctcaccttaatttctacaaaaatggaagattctggggtttatttatgtgaaggaattaaccaggctggaagaagcagaaaggaagtggaattaattatccaagttactccaaaagacataaaacttacagcttttccttctgagagtgtcaaagaaggagacactgtcatcatctcttgtacatgtggaaatgttccagaaacatggataatcctgaagaaaaaagcggagacaggagacacagtactaaaatctatagatggcgcctataccatccgaaaggcccagttgaaggatgcgggagtatatgaatgtgaatctaaaaacaaagttggctcacacctgtaatcccagcacattgggaggctgaggtgggtggatcatgaggtcaggagttcgagaccagcctaaccaacatggtgaaaccccgtctctactaaaaatacaaaaattagccaggcacagtggcgggcacctgtaatccctagctactcgggaggctgaggcaggagaattgcttgaacgcaggaggcagaggttgcagtgagtctgagatcatgccatctgcactctagccaggatgacagtctctcgggtggatcc

SEQ ID NO: 48970 - DNA, 622 bp, Homo sapiens
  misc_feature (1)..(1): n is a, c, g, or t
  misc_feature (32)..(32): n is a, c, g, or t
  misc_feature (34)..(34): n is a, c, g, or t
  misc_feature (36)..(36): n is a, c, g, or t
  misc_feature (38)..(38): n is a, c, g, or t
nggcgcaatgaaggtgaaggccggcgcgcccngngntnggcgattcccgaggcctctccagtccagagcctcctcagcagcctccgtaacagctgccctgcctacacctgcagagctggaggttctgtcctccctgctgctctcaggagtgttcaagggtggagggcagggaatggggcctgaggtattaaggctaagaggtgggggacagggcccatctaccagccttcatcaggaagggaaagggctttggggtcaggtggcagctattccccaccaagagattcagggtcacaggtttttccccacacctctgaactcagggcctagccacccccaaacttccaaatcccacttttgtgatatgtgaagctactcatttcttacccttggaggctgtgtggggaatttccagcccttttatgcctgtgtgatcccaccccacccccatagttgtataaaggtcatagtgaagaagctgggggaagactgcttcagccagatcctggggtggggtctttaggttttctcactttgacaacccccgaatgtttttatagtagtttttttgtatttttttgtaatgacagtattatgtaaaaaataaagtattttaaaaata

SEQ ID NO: 48971 - DNA, 2378 bp, Homo sapiens
tcccggtcccgctatcggcggccggcgggcaggcgactcctgtcccgggtggaggcggcggagccggagccgggggagggggcagcggctgtctcacggaccacggcggcgcccgcagctcctcaccgaaacaaggagaccagtgctggtccagtggctgtgatgggaaaagattattacaagattcttgggatcccatcgggggccaacgaggatgagatcaagaaagcctaccggaagatggccttgaagtaccacccagacaagaataaagaacccaacgctgaggagaagtttaaggagattgcagaggcctatgatgtgctaagtgaccccaagaaacggggcctgtatgaccagtatggggaggaaggcctgaagaccggcggtggcacatcaggtggctccagtggctcctttcactacacctttcatggggacccccatgccacctttgcctccttctttggtggctccaaccccttcgatatcttctttgccagcagccgctccactcggcccttcagtggctttgacccagatgacatggatgtggatgaagatgaggacccatttggcgctttcggccgttttggcttcaatgggctgagtaggggtccaaggcgagccccagaaccactgtaccctcggcgcaaggtgcaggaccccccagtggtgcacgagctgcgggtgtccctggaggagatctaccatggctccaccaagcgcatgaagatcacaaggcgtcgcctcaaccctgatgggcgaactgtgcgcaccgaggacaagatcctgcacatagtcatcaagcgtggctggaaggaaggcaccaagatcaccttccccaaagaaggcgacgccacacctgacaacatccctgctgacatcgtctttgtgctcaaagacaagccccatgcacacttccgccgagatggcaccaacgtgctctacagtgccctgatcagcctcaaggaggcgctgtgtggctgcactgtgaacattcccactatcgacggccgagtgatccctttgccctgcaatgatgtcatcaagccaggcaccgtgaagagactccgtggggagggccttcccttccccaaagtgccaactcagcgaggagacctcattgttgagttcaaagttcgcttcccagacagattaacaccacagacaagacagatccttaagcagcacctaccctgttcctaggctctgccccagccagtccagagcctaccacagcaatacccccaacactcactccactcaatgtgcacccagcttgatgtccactggacactggcaactttttctaaaatgcaaaaaaaagccactggttttcaggaaaatgttcctgtccctgaccccttttagagctgggctgcctggggggagtgggagggaggtggggagagctagcccaggccaggggtcaatgttcatgtcactagctttcaatccagtttccactgcagtggctggagagtgacctgagtgctacttgaagatatgtagagattccttatccatgcctgtacatagcatgtcctcctcccctcagctttgctaataccagtcccctcccttccctttggcttcctgctgttgggggtggaaaagactagaaaggacattgctttctcagccccacccccaggtccacagtgtccaaggtaatggcacacatattcatgcacaagaagcactcacctagagctgtctgtgcctctctgggagaaaggagagaggataagaagggaaagttcacaacctgtgaacagggacttgagcacgagacacttttcatctggagcaggggggtgagctcctcagcagcctccgtaacagctgccctgcctacacctgcagagctggaggttctgtcctccctgctgctctcaggagtgttcaagggtggagggcagggaatggggcctgaggtattaaggctaagaggtgggggacagggcccatctaccagccttcatcaggaagggaaagggctttggggtcaggtggcagctattccccaccaagagattcagggtcacaggtttttccccacacctctgaactcagggcctagccacccccaaacttccaaatcccacttttgtgatatgtgaagctactcatttcttacccttggaggctgtgtggggaatttccagcccttttatgcctgtgtgatcccaccccacccccatagttgtataaaggtcatagtgaagaagctgggggaagactgcttcagccagatcctggggtggggtctttaggttttctcactttgacaacccccgaatgtttttatagtagtttttttgtatttttttgtaatgacagtattatgtaaaaaataaagtattttaaaaata

SEQ ID NO: 48972 - DNA, 2326 bp, Homo sapiens
tcccggtcccgctatcggcggccggcgggcaggcgactcctgtcccgggtggaggcggcggagccggagccgggggagggggcagcggctgtctcacggaccacggcggcgcccgcagctcctcaccgaaacaaggagaccagtgctggtccagtggctgtgatgggaaaagattattacaagattcttgggatcccatcgggggccaacgaggatgagatcaagaaagcctaccggaagatggccttgaagtaccacccagacaagaataaagaacccaacgctgaggagaagtttaaggagattgcagaggcctatgatgtgctaagtgaccccaagaaacggggcctgtatgaccagtatggggaggaaggcctgaagaccggcggtggcacatcaggtggctccagtggctcctttcactacacctttcatggggacccccatgccacctttgcctccttctttggtggctccaaccccttcgatatcttctttgccagcagccgctccactcggcccttcagtggctttgacccagatgacatggatgtggatgaagatgaggacccatttggcgctttcggccgttttggcttcaatgggctgagtaggggtccaaggcgagccccagaaccactgtaccctcggcgcaaggtgcaggaccccccagtggtgcacgagctgcgggtgtccctggaggagatctaccatggctccaccaagcgcatgaagatcacaaggcgtcgcctcaaccctgatgggcgaactgtgcgcaccgaggacaagatcctgcacatagtcatcaagcgtggctggaaggaaggcaccaagatcaccttccccaaagaaggcgacgccacacctgacaacatccctgctgacatcgtctttgtgctcaaagacaagccccatgcacacttccgccgagatggcaccaacgtgctctacagtgccctgatcagcctcaaggaggcgctgtgtggctgcactgtgaacattcccactatcgacggccgagtgatccctttgccctgcaatgatgtcatcaagccaggcaccgtgaagagactccgtggggagggccttcccttccccaaagtgccaactcagcgaggagacctcattgttgagttcaaagttcgcttcccagacagattaacaccacagacaagacagatccttaagcacaatacccccaacactcactccactcaatgtgcacccagcttgatgtccactggacactggcaactttttctaaaatgcaaaaaaaagccactggttttcaggaaaatgttcctgtccctgaccccttttagagctgggctgcctggggggagtgggagggaggtggggagagctagcccaggccaggggtcaatgttcatgtcactagctttcaatccagtttccactgcagtggctggagagtgacctgagtgctacttgaagatatgtagagattccttatccatgcctgtacatagcatgtcctcctcccctcagctttgctaataccagtcccctcccttccctttggcttcctgctgttgggggtggaaaagactagaaaggacattgctttctcagccccacccccaggtccacagtgtccaaggtaatggcacacatattcatgcacaagaagcactcacctagagctgtctgtgcctctctgggagaaaggagagaggataagaagggaaagttcacaacctgtgaacagggacttgagcacgagacacttttcatctggagcaggggggtgagctcctcagcagcctccgtaacagctgccctgcctacacctgcagagctggaggttctgtcctccctgctgctctcaggagtgttcaagggtggagggcagggaatggggcctgaggtattaaggctaagaggtgggggacagggcccatctaccagccttcatcaggaagggaaagggctttggggtcaggtggcagctattccccaccaagagattcagggtcacaggtttttccccacacctctgaactcagggcctagccacccccaaacttccaaatcccacttttgtgatatgtgaagctactcatttcttacccttggaggctgtgtggggaatttccagcccttttatgcctgtgtgatcccaccccacccccatagttgtataaaggtcatagtgaagaagctgggggaagactgcttcagccagatcctggggtggggtctttaggttttctcactttgacaacccccgaatgtttttatagtagtttttttgtatttttttgtaatgacagtattatgtaaaaaataaagtattttaaaaata

SEQ ID NO: 48973 - DNA, 2523 bp, Homo sapiens
tcccggtcccgctatcggcggccggcgggcaggcgactcctgtcccgggtggaggcggcggagccggagccgggggagggggcagcggctgtctcacggaccacggcggcgcccgcagctcctcaccgcagcacccccactgcaggcccgaggagctttccggagcttcccacactcctggggagaagacttcttagccagcttgatgtttaaaattcagctggagcccttaaaacttcgagcgtggacgctgaatgggtttgtaaagtttcgaaacaaggagaccagtgctggtccagtggctgtgatgggaaaagattattacaagattcttgggatcccatcgggggccaacgaggatgagatcaagaaagcctaccggaagatggccttgaagtaccacccagacaagaataaagaacccaacgctgaggagaagtttaaggagattgcagaggcctatgatgtgctaagtgaccccaagaaacggggcctgtatgaccagtatggggaggaaggcctgaagaccggcggtggcacatcaggtggctccagtggctcctttcactacacctttcatggggacccccatgccacctttgcctccttctttggtggctccaaccccttcgatatcttctttgccagcagccgctccactcggcccttcagtggctttgacccagatgacatggatgtggatgaagatgaggacccatttggcgctttcggccgttttggcttcaatgggctgagtaggggtccaaggcgagccccagaaccactgtaccctcggcgcaaggtgcaggaccccccagtggtgcacgagctgcgggtgtccctggaggagatctaccatggctccaccaagcgcatgaagatcacaaggcgtcgcctcaaccctgatgggcgaactgtgcgcaccgaggacaagatcctgcacatagtcatcaagcgtggctggaaggaaggcaccaagatcaccttccccaaagaaggcgacgccacacctgacaacatccctgctgacatcgtctttgtgctcaaagacaagccccatgcacacttccgccgagatggcaccaacgtgctctacagtgccctgatcagcctcaaggaggcgctgtgtggctgcactgtgaacattcccactatcgacggccgagtgatccctttgccctgcaatgatgtcatcaagccaggcaccgtgaagagactccgtggggagggccttcccttccccaaagtgccaactcagcgaggagacctcattgttgagttcaaagttcgcttcccagacagattaacaccacagacaagacagatccttaagcagcacctaccctgttcctaggctctgccccagccagtccagagcctaccacagcaatacccccaacactcactccactcaatgtgcacccagcttgatgtccactggacactggcaactttttctaaaatgcaaaaaaaagccactggttttcaggaaaatgttcctgtccctgaccccttttagagctgggctgcctggggggagtgggagggaggtggggagagctagcccaggccaggggtcaatgttcatgtcactagctttcaatccagtttccactgcagtggctggagagtgacctgagtgctacttgaagatatgtagagattccttatccatgcctgtacatagcatgtcctcctcccctcagctttgctaataccagtcccctcccttccctttggcttcctgctgttgggggtggaaaagactagaaaggacattgctttctcagccccacccccaggtccacagtgtccaaggtaatggcacacatattcatgcacaagaagcactcacctagagctgtctgtgcctctctgggagaaaggagagaggataagaagggaaagttcacaacctgtgaacagggacttgagcacgagacacttttcatctggagcaggggggtgagctcctcagcagcctccgtaacagctgccctgcctacacctgcagagctggaggttctgtcctccctgctgctctcaggagtgttcaagggtggagggcagggaatggggcctgaggtattaaggctaagaggtgggggacagggcccatctaccagccttcatcaggaagggaaagggctttggggtcaggtggcagctattccccaccaagagattcagggtcacaggtttttccccacacctctgaactcagggcctagccacccccaaacttccaaatcccacttttgtgatatgtgaagctactcatttcttacccttggaggctgtgtggggaatttccagcccttttatgcctgtgtgatcccaccccacccccatagttgtataaaggtcatagtgaagaagctgggggaagactgcttcagccagatcctggggtggggtctttaggttttctcactttgacaacccccgaatgtttttatagtagtttttttgtatttttttgtaatgacagtattatgtaaaaaataaagtattttaaaaata

SEQ ID NO: 48974 - DNA, 2745 bp, Homo sapiens
ctcgggccctcacaatcacacctgtcacaggtatacacgctgccactcacaaacacacgcttgcactcccagcctcactgacacgctgccatacagccgctcacagccagccagacactgctgcacctgagagcaggtggccgcgggtcttctcccttcactctccacatttggggatcaggtccggcacctgctgcgccagacaggccttgctgggcacgcgcctctgagagtccaaggaggtggcttccagagctgcagcacttcaggccggctccggtggagcgatcagaggtgaggggcttggctgggcatgtttaagcgcacagtgctctcctgcccacccccagcagcacccccactgcaggcccgaggagctttccggagcttcccacactcctggggagaagacttcttagccagcttgatgtttaaaattcagctggagcccttaaaacttcgagcgtggacgctgaatgggtttgtaaagtttcgaaacaaggagaccagtgctggtccagtggctgtgatgggaaaagattattacaagattcttgggatcccatcgggggccaacgaggatgagatcaagaaagcctaccggaagatggccttgaagtaccacccagacaagaataaagaacccaacgctgaggagaagtttaaggagattgcagaggcctatgatgtgctaagtgaccccaagaaacggggcctgtatgaccagtatggggaggaaggcctgaagaccggcggtggcacatcaggtggctccagtggctcctttcactacacctttcatggggacccccatgccacctttgcctccttctttggtggctccaaccccttcgatatcttctttgccagcagccgctccactcggcccttcagtggctttgacccagatgacatggatgtggatgaagatgaggacccatttggcgctttcggccgttttggcttcaatgggctgagtaggggtccaaggcgagccccagaaccactgtaccctcggcgcaaggtgcaggaccccccagtggtgcacgagctgcgggtgtccctggaggagatctaccatggctccaccaagcgcatgaagatcacaaggcgtcgcctcaaccctgatgggcgaactgtgcgcaccgaggacaagatcctgcacatagtcatcaagcgtggctggaaggaaggcaccaagatcaccttccccaaagaaggcgacgccacacctgacaacatccctgctgacatcgtctttgtgctcaaagacaagccccatgcacacttccgccgagatggcaccaacgtgctctacagtgccctgatcagcctcaaggaggcgctgtgtggctgcactgtgaacattcccactatcgacggccgagtgatccctttgccctgcaatgatgtcatcaagccaggcaccgtgaagagactccgtggggagggccttcccttccccaaagtgccaactcagcgaggagacctcattgttgagttcaaagttcgcttcccagacagattaacaccacagacaagacagatccttaagcagcacctaccctgttcctaggctctgccccagccagtccagagcctaccacagcaatacccccaacactcactccactcaatgtgcacccagcttgatgtccactggacactggcaactttttctaaaatgcaaaaaaaagccactggttttcaggaaaatgttcctgtccctgaccccttttagagctgggctgcctggggggagtgggagggaggtggggagagctagcccaggccaggggtcaatgttcatgtcactagctttcaatccagtttccactgcagtggctggagagtgacctgagtgctacttgaagatatgtagagattccttatccatgcctgtacatagcatgtcctcctcccctcagctttgctaataccagtcccctcccttccctttggcttcctgctgttgggggtggaaaagactagaaaggacattgctttctcagccccacccccaggtccacagtgtccaaggtaatggcacacatattcatgcacaagaagcactcacctagagctgtctgtgcctctctgggagaaaggagagaggataagaagggaaagttcacaacctgtgaacagggacttgagcacgagacacttttcatctggagcaggggggtgagctcctcagcagcctccgtaacagctgccctgcctacacctgcagagctggaggttctgtcctccctgctgctctcaggagtgttcaagggtggagggcagggaatggggcctgaggtattaaggctaagaggtgggggacagggcccatctaccagccttcatcaggaagggaaagggctttggggtcaggtggcagctattccccaccaagagattcagggtcacaggtttttccccacacctctgaactcagggcctagccacccccaaacttccaaatcccacttttgtgatatgtgaagctactcatttcttacccttggaggctgtgtggggaatttccagcccttttatgcctgtgtgatcccaccccacccccatagttgtataaaggtcatagtgaagaagctgggggaagactgcttcagccagatcctggggtggggtctttaggttttctcactttgacaacccccgaatgtttttatagtagtttttttgtatttttttgtaatgacagtattatgtaaaaaataaagtattttaaaaata

SEQ ID NO: 48975 - DNA, 2953 bp, Homo sapiens
tcccggtcccgctatcggcggccggcgggcaggcgactcctgtcccgggtggaggcggcggagccggagccgggggagggggcagcggctgtctcacggaccacggcggcgcccgcagctcctcaccgcagcacccccactgcaggcccgaggagctttccggagcttcccacactcctggggagaagacttcttagccagcttgatgtttaaaattcagctggagcccttaaaacttcgagcgtggacgctgaatgggtttgtaaagtttcgaaacaaggagaccagtgctggtccagtggctgtgatgggaaaagattattacaagattcttgggatcccatcgggggccaacgaggatgagatcaagaaagcctaccggaagatggccttgaagtaccacccagacaagaataaagaacccaacgctgaggagaagtttaaggagattgcagaggcctatgatgtgctaagtgaccccaagaaacggggcctgtatgaccagtatggggaggaaggcctgaagaccggcggtggcacatcaggtggctccagtggctcctttcactacacctttcatggggacccccatgccacctttgcctccttctttggtggctccaaccccttcgatatcttctttgccagcagccgctccactcggcccttcagtggctttgacccagatgacatggatgtggatgaagatgaggacccatttggcgctttcggccgttttggcttcaatgggctgagtaggggtccaaggcgagccccagaaccactgtaccctcggcgcaaggtgcaggaccccccagtggtgcacgagctgcgggtgtccctggaggagatctaccatggctccaccaagcgcatgaagatcacaaggcgtcgcctcaaccctgatgggcgaactgtgcgcaccgaggacaagatcctgcacatagtcatcaagcgtggctggaaggaaggcaccaagatcaccttccccaaagaaggcgacgccacacctgacaacatccctgctgacatcgtctttgtgctcaaagacaagccccatgcacacttccgccgagatggcaccaacgtgctctacagtgccctgatcagcctcaaggaggcgctgtgtggctgcactgtgaacattcccactatcgacggccgagtgatccctttgccctgcaatgatgtcatcaagccaggcaccgtgaagagactccgtggggagggccttcccttccccaaagtgccaactcagcgaggagacctcattgttgagttcaaagttcgcttcccagacagattaacaccacagacaagacagatccttaagcagcacctaccctgttcctaggctctgccccagccagtccagagcctaccacagcaatacccccaacactcactccactcaatgtgcacccagcttgatgtccactggacactggcaactttttctaaaatgcaaaaaaaagccactggttttcaggaaaatgttcctgtccctgaccccttttagagctgggctgcctggggggagtgggagggaggtggggagagctagcccaggccaggggtcaatgttcatgtcactagctttcaatccagtttccactgcagtggctggagagtgacctgagtgctacttgaagatatgtagagattccttatccatgcctgtacatagcatgtcctcctcccctcagctttgctaataccagtcccctcccttccctttggcttcctgctgttgggggtggaaaagactagaaaggacattgctttctcagccccacccccaggtccacagtgtccaaggtaatggcacacatattcatgcacaagaagcactcacctagagctgtctgtgcctctctgggagaaaggagagaggataagaagggaaagttcacaacctgtgaacagggacttgagcacgagacacttttcatctggagcaggggggtgagctcctcagcagcctccgtaacagctgccctgcctacacctgcagagctggaggttctgtcctccctgctgctctcaggagtgttcaagggtggagggcagggaatggggcctgaggtattaaggctaagaggtgggggacagggcccatctaccagccttcatcaggaagggaaagggctttggggtcaggtggcagctattccccaccaagagattcagggtcacaggtttttccccacacctctgaactcagggcctagccacccccaaacttccaaatcccacttttgtgatatgtgaagctactcatttcttacccttggaggctgtgtggggaatttccagcccttttatgcctgtgtgatcccaccccacccccatagttgtataaaggtcatagtgaagaagctgggggaagactgcttcagccagatcctggggtggggtctttaggttttctcactttgacaacccccgaatgtttttatagtagtttttttgtatttttttgtaatgacagtattatgtaaaaaataaagtattttaaaaataaaaacaacacacacaaaaaaaaaaaaaaaaaaaaacaacaacaacaacacccccacccccacaaaccaaacaaaaagaggggggggcggacagaaaatatcccccgcaggggacgaacaaaagagcacaccacagaattgtgcacacgagggcgcccaaaagaggagcgcaataaaacacaacaccgcgcgcacataaacaaaagacgaagaagaggaaaactcgccccaggagaaactggagaagaagacaacatccggggggagcgaaacatggggcaacactatccccggagaagttaaaccgcctggggccaccatacaatccagaggacataggcggataacagcgtacttgtccgaaaaagagtgtccagcggatatttgaaactagcggcatcagcaacacgcaatgagtacaaagagtcacg

SEQ ID NO: 48976 - DNA, 2491 bp, Homo sapiens
tcccggtcccgctatcggcggccggcgggcaggcgactcctgtcccgggtggaggcggcggagccggagccgggggagggggcagcggctgtctcacggaccacggcggcgcccgcagctcctcaccggtccggcacctgctgcgccagacaggccttgctgggcacgcgcctctgagagtccaaggaggtggcttccagagctgcagcacttcaggccggctccggtggagcgatcagagaaacaaggagaccagtgctggtccagtggctgtgatgggaaaagattattacaagattcttgggatcccatcgggggccaacgaggatgagatcaagaaagcctaccggaagatggccttgaagtaccacccagacaagaataaagaacccaacgctgaggagaagtttaaggagattgcagaggcctatgatgtgctaagtgaccccaagaaacggggcctgtatgaccagtatggggaggaaggcctgaagaccggcggtggcacatcaggtggctccagtggctcctttcactacacctttcatggggacccccatgccacctttgcctccttctttggtggctccaaccccttcgatatcttctttgccagcagccgctccactcggcccttcagtggctttgacccagatgacatggatgtggatgaagatgaggacccatttggcgctttcggccgttttggcttcaatgggctgagtaggggtccaaggcgagccccagaaccactgtaccctcggcgcaaggtgcaggaccccccagtggtgcacgagctgcgggtgtccctggaggagatctaccatggctccaccaagcgcatgaagatcacaaggcgtcgcctcaaccctgatgggcgaactgtgcgcaccgaggacaagatcctgcacatagtcatcaagcgtggctggaaggaaggcaccaagatcaccttccccaaagaaggcgacgccacacctgacaacatccctgctgacatcgtctttgtgctcaaagacaagccccatgcacacttccgccgagatggcaccaacgtgctctacagtgccctgatcagcctcaaggaggcgctgtgtggctgcactgtgaacattcccactatcgacggccgagtgatccctttgccctgcaatgatgtcatcaagccaggcaccgtgaagagactccgtggggagggccttcccttccccaaagtgccaactcagcgaggagacctcattgttgagttcaaagttcgcttcccagacagattaacaccacagacaagacagatccttaagcagcacctaccctgttcctaggctctgccccagccagtccagagcctaccacagcaatacccccaacactcactccactcaatgtgcacccagcttgatgtccactggacactggcaactttttctaaaatgcaaaaaaaagccactggttttcaggaaaatgttcctgtccctgaccccttttagagctgggctgcctggggggagtgggagggaggtggggagagctagcccaggccaggggtcaatgttcatgtcactagctttcaatccagtttccactgcagtggctggagagtgacctgagtgctacttgaagatatgtagagattccttatccatgcctgtacatagcatgtcctcctcccctcagctttgctaataccagtcccctcccttccctttggcttcctgctgttgggggtggaaaagactagaaaggacattgctttctcagccccacccccaggtccacagtgtccaaggtaatggcacacatattcatgcacaagaagcactcacctagagctgtctgtgcctctctgggagaaaggagagaggataagaagggaaagttcacaacctgtgaacagggacttgagcacgagacacttttcatctggagcaggggggtgagctcctcagcagcctccgtaacagctgccctgcctacacctgcagagctggaggttctgtcctccctgctgctctcaggagtgttcaagggtggagggcagggaatggggcctgaggtattaaggctaagaggtgggggacagggcccatctaccagccttcatcaggaagggaaagggctttggggtcaggtggcagctattccccaccaagagattcagggtcacaggtttttccccacacctctgaactcagggcctagccacccccaaacttccaaatcccacttttgtgatatgtgaagctactcatttcttacccttggaggctgtgtggggaatttccagcccttttatgcctgtgtgatcccaccccacccccatagttgtataaaggtcatagtgaagaagctgggggaagactgcttcagccagatcctggggtggggtctttaggttttctcactttgacaacccccgaatgtttttatagtagtttttttgtatttttttgtaatgacagtattatgtaaaaaataaagtattttaaaaata

SEQ ID NO: 48977 - DNA, 2367 bp, Homo sapiens
gccacctcgctcagcagggcctctcaggggtcctcagtctggcccaaggaccagggcctcagcctagccccaagagtgggccacaaccttcagcttcctgctgggaaaacccaggagaaacaaggagaccagtgctggtccagtggctgtgatgggaaaagattattacaagattcttgggatcccatcgggggccaacgaggatgagatcaagaaagcctaccggaagatggccttgaagtaccacccagacaagaataaagaacccaacgctgaggagaagtttaaggagattgcagaggcctatgatgtgctaagtgaccccaagaaacggggcctgtatgaccagtatggggaggaaggcctgaagaccggcggtggcacatcaggtggctccagtggctcctttcactacacctttcatggggacccccatgccacctttgcctccttctttggtggctccaaccccttcgatatcttctttgccagcagccgctccactcggcccttcagtggctttgacccagatgacatggatgtggatgaagatgaggacccatttggcgctttcggccgttttggcttcaatgggctgagtaggggtccaaggcgagccccagaaccactgtaccctcggcgcaaggtgcaggaccccccagtggtgcacgagctgcgggtgtccctggaggagatctaccatggctccaccaagcgcatgaagatcacaaggcgtcgcctcaaccctgatgggcgaactgtgcgcaccgaggacaagatcctgcacatagtcatcaagcgtggctggaaggaaggcaccaagatcaccttccccaaagaaggcgacgccacacctgacaacatccctgctgacatcgtctttgtgctcaaagacaagccccatgcacacttccgccgagatggcaccaacgtgctctacagtgccctgatcagcctcaaggaggcgctgtgtggctgcactgtgaacattcccactatcgacggccgagtgatccctttgccctgcaatgatgtcatcaagccaggcaccgtgaagagactccgtggggagggccttcccttccccaaagtgccaactcagcgaggagacctcattgttgagttcaaagttcgcttcccagacagattaacaccacagacaagacagatccttaagcagcacctaccctgttcctaggctctgccccagccagtccagagcctaccacagcaatacccccaacactcactccactcaatgtgcacccagcttgatgtccactggacactggcaactttttctaaaatgcaaaaaaaagccactggttttcaggaaaatgttcctgtccctgaccccttttagagctgggctgcctggggggagtgggagggaggtggggagagctagcccaggccaggggtcaatgttcatgtcactagctttcaatccagtttccactgcagtggctggagagtgacctgagtgctacttgaagatatgtagagattccttatccatgcctgtacatagcatgtcctcctcccctcagctttgctaataccagtcccctcccttccctttggcttcctgctgttgggggtggaaaagactagaaaggacattgctttctcagccccacccccaggtccacagtgtccaaggtaatggcacacatattcatgcacaagaagcactcacctagagctgtctgtgcctctctgggagaaaggagagaggataagaagggaaagttcacaacctgtgaacagggacttgagcacgagacacttttcatctggagcaggggggtgagctcctcagcagcctccgtaacagctgccctgcctacacctgcagagctggaggttctgtcctccctgctgctctcaggagtgttcaagggtggagggcagggaatggggcctgaggtattaaggctaagaggtgggggacagggcccatctaccagccttcatcaggaagggaaagggctttggggtcaggtggcagctattccccaccaagagattcagggtcacaggtttttccccacacctctgaactcagggcctagccacccccaaacttccaaatcccacttttgtgatatgtgaagctactcatttcttacccttggaggctgtgtggggaatttccagcccttttatgcctgtgtgatcccaccccacccccatagttgtataaaggtcatagtgaagaagctgggggaagactgcttcagccagatcctggggtggggtctttaggttttctcactttgacaacccccgaatgtttttatagtagtttttttgtatttttttgtaatgacagtattatgtaaaaaataaagtattttaaaaata

SEQ ID NO: 48978 - DNA, 2248 bp, Homo sapiens
tcccggtcccgctatcggcggccggcgggcaggcgactcctgtcccgggtggaggcggcggagccggagccgggggagggggcagcggctgtctcacggaccacggcggcgcccgcagctcctcaccgaaacaaggagaccagtgctggtccagtggctgtgatgggaaaagattattacaagattcttgggatcccatcgggggccaacgaggatgagatcaagaaagcctaccggaagatggccttgaagtaccacccagacaagaataaagaacccaacgctgaggagaagtttaaggagattgcagaggcctatgatgtgctaagtgaccccaagaaacggggcctgtatgaccagtatggggaggaagcagccgctccactcggcccttcagtggctttgacccagatgacatggatgtggatgaagatgaggacccatttggcgctttcggccgttttggcttcaatgggctgagtaggggtccaaggcgagccccagaaccactgtaccctcggcgcaaggtgcaggaccccccagtggtgcacgagctgcgggtgtccctggaggagatctaccatggctccaccaagcgcatgaagatcacaaggcgtcgcctcaaccctgatgggcgaactgtgcgcaccgaggacaagatcctgcacatagtcatcaagcgtggctggaaggaaggcaccaagatcaccttccccaaagaaggcgacgccacacctgacaacatccctgctgacatcgtctttgtgctcaaagacaagccccatgcacacttccgccgagatggcaccaacgtgctctacagtgccctgatcagcctcaaggaggcgctgtgtggctgcactgtgaacattcccactatcgacggccgagtgatccctttgccctgcaatgatgtcatcaagccaggcaccgtgaagagactccgtggggagggccttcccttccccaaagtgccaactcagcgaggagacctcattgttgagttcaaagttcgcttcccagacagattaacaccacagacaagacagatccttaagcagcacctaccctgttcctaggctctgccccagccagtccagagcctaccacagcaatacccccaacactcactccactcaatgtgcacccagcttgatgtccactggacactggcaactttttctaaaatgcaaaaaaaagccactggttttcaggaaaatgttcctgtccctgaccccttttagagctgggctgcctggggggagtgggagggaggtggggagagctagcccaggccaggggtcaatgttcatgtcactagctttcaatccagtttccactgcagtggctggagagtgacctgagtgctacttgaagatatgtagagattccttatccatgcctgtacatagcatgtcctcctcccctcagctttgctaataccagtcccctcccttccctttggcttcctgctgttgggggtggaaaagactagaaaggacattgctttctcagccccacccccaggtccacagtgtccaaggtaatggcacacatattcatgcacaagaagcactcacctagagctgtctgtgcctctctgggagaaaggagagaggataagaagggaaagttcacaacctgtgaacagggacttgagcacgagacacttttcatctggagcaggggggtgagctcctcagcagcctccgtaacagctgccctgcctacacctgcagagctggaggttctgtcctccctgctgctctcaggagtgttcaagggtggagggcagggaatggggcctgaggtattaaggctaagaggtgggggacagggcccatctaccagccttcatcaggaagggaaagggctttggggtcaggtggcagctattccccaccaagagattcagggtcacaggtttttccccacacctctgaactcagggcctagccacccccaaacttccaaatcccacttttgtgatatgtgaagctactcatttcttacccttggaggctgtgtggggaatttccagcccttttatgcctgtgtgatcccaccccacccccatagttgtataaaggtcatagtgaagaagctgggggaagactgcttcagccagatcctggggtggggtctttaggttttctcactttgacaacccccgaatgtttttatagtagtttttttgtatttttttgtaatgacagtattatgtaaaaaataaagtattttaaaaata

SEQ ID NO: 48979 - DNA, 968 bp, Homo sapiens
tcccggtcccgctatcggcggccggcgggcaggcgactcctgtcccgggtggaggcggcggagccggagccgggggagggggcagcggctgtctcacggaccacggcggcgcccgcagctcctcaccgaaacaaggagaccagtgctggtccagtggctgtgatgggaaaagattattacaagattcttgggatcccatcgggggccaacgaggatgagatcaagaaagcctaccggaagatggccttgaagtaccacccagacaagaataaagaacccaacgctgaggagaagtttaaggagattgcagaggcctatgatgtgctaagtgaccccaagaaacggggcctgtatgaccagtatggggaggaaggcctgaagaccggcggtggcacatcaggtggctccagtggctcctttcactacacctttcatggggacccccatgccacctttgcctccttctttggtggctccaaccccttcgatatcttctttgccagcagccgctccactcggcccttcagtggctttgacccagatgacatggatgtggatgaagatgaggacccatttggcgctttcggccgttttggcttcaatgggctgagtaggggtccaaggcgagccccagaaccactgtaccctcggcgcaaggtgcaggaccccccagtggtgcacgagctgcgggtgtccctggaggagatctaccatggctccaccaagcgcatgaagatcacaaggcgtcgcctcaaccctgatgggcgaactgtgcgcaccgaggacaagatcctgcacatagtcatcaagcgtggctggaaggaaggcaccaagatcaccttccccaaagaaggcgacgccacacaccaaccacctagattcagcccccctcccgaaccccgagatggggtaggagtggaggtactcttttatgccctgaatgagcccccagcctgatggagccccaa

SEQ ID NO: 48980 - DNA, 285 bp, Homo sapiens
aggacagcctactgggattagaaactaaatatcttggggggttattacttagcctactatagagaataatagtgtttatggaaagaaaatttccttttccagcaccttccccaaagccaagtaagagagatctccataaaattacttgttgtggaaggcactgttgactgcctctccccagccccaaaccactgttcttttgcctgttctactacacagactacaaaagctaaatccttactatcccagctgcccctatagctaatgatagccatgtggtagcat

SEQ ID NO: 48981 - DNA, 490 bp, Homo sapiens
aattttaaaacttcttaatgttgcctggaatacatgagtcttcctgatctcttcaaacggggtttgttttgttttgctttggggagaattcttttgacgtttttgaataagctgttaacaactttaatacctgtcttgtttgttttcttcagaaatttgttaattctccatgattagcacctttatgtggttatctcattattttcattcctttttaattctctgttttaggaatgcttgtcaaattcgtcactaaaattgatttactttcttgaaaacctgtttctgctgctcccaacatgatttaatcttggctactgagcttttggttacgttgcactccctttaaaattactccgtttaagtacagtgttcactctttgggtaatgtgtacaatagaagcccaatccccacctatacccaatatatccatgggacaagcatgtacatgcaccccctgagtctaaaataaaaattttaaaaaaacta

SEQ ID NO: 48982 - DNA, 441 bp, Homo sapiens
ggacattccatttgacttccagagccaaccctctcagcctagtgccagggagggaagggctctcttcatatgcgcccacgctgcatgaggccgggggcagctgggcctggcagacccccagaagtacatggggggcagaagacagtccccagaggcaagggtgctggacagaggggaggagggatgctgagccaaccccagggcagtgtccccacttggcatatgacttggcaacatctacaaaggtggccgtgggacatggccctggcccatgggtcactaggcacagcgccccaccccactcccccgcatccagtgcagcaatgtccggtcgctgagaaatgctgatggaaccctggacagcaggggtcacagaagtcaggctgggggtcacctttcttccagcaccgtcttctggttttacgtgtgaggaaagggaga

SEQ ID NO: 48983 - DNA, 722 bp, Homo sapiens
  misc_feature (590)..(590): n is a, c, g, or t
  misc_feature (716)..(716): n is a, c, g, or t
ggtggggtctcgatgtgttgcccagaccagtcttgaatgcctggccataagcagtcctcccaccttggcctcccaaagtgctgggattacagatgtgggccaccactcccagccgggatttttttaattatctaaaatagttttgaatatatttagggccttttagaattttaaggtatctctatttcttgcaggagtaactattataaattatgatgaccttctacattatgtattgtcaatatggactcgccatatggttctgtaacaccttcttcaacacatttgggaaactttgcttcaaacatttcaggaggtcagatgtacggacctggggcaccccttggaggagcacccgcagctgctaactttaacagacaacatttttccccgcttagtttgttgactccgtgttcatcagcatcaaatggggtggcactgaatcaacaagacaagcaactcaattgattaatgctttgatcaaggatccagacaaagaaattgatgaacttattccaaagaatcgtttgaaaagctcctcagcaaattccaaaatagggtcatcagcacctaccaccactgctgctaanacttccttaatgggaattaaaatgacaactgtagctctgtcatcaacatctcaaactgccacagcactcactgtgcctgcaatttcttctgcatcccacccccaagaagaactgaataccccattnctgagc

SEQ ID NO: 48984 - DNA, 319 bp, Homo sapiens
cccccgggctgcaggaattcggcacgttgttaatttgagccaagtaataaaagaaattctgcatttgtcacgaagacaatttatggtagacagataaatacacagattacagtgtaaagtctccatttaacctgtttataaaagatacaaggccacactaaactactcagtgggatttatatattccatccacttgaaacaataaacagtaatgtatccaagaagattatgtgtcctaccctgtctcatggaaaaattaattatatggttgaaatgtaaaagaaagtaagcataaaaatcgagtaatgtataaaaaaat

SEQ ID NO: 48985 - DNA, 4359 bp, Homo sapiens
gacaatcattcaccagctgtggtcactaccactgtgagcagcaaaaagcagccatcagttcttgttacatttccaaaggaagagagaaaatctgtttctggcaaggcttcaataaaattgtcagaaactatcagtgaagggaccagtaattctctatctacttgtacaaaatctggtccatctcccctttcttctccaaatgggaagttaacagtagcaagtcctaagcgtgggcaaaagagggaagaaggatggaaagaagttgtaagaaggtcaaagaaagtatctgttccatcaactgtgatatccagagtgattggaagaggaggctgtaatatcaatgctattcgggagtttactggtgcacacatagatattgataaacagaaagacaagactggagaccggataatcactataaggggtggcactgaatcaacaagacaagcaactcaattgattaatgctttgatcaaggatccagacaaagaaattgatgaacttattccaaagaatcgtttgaaaagctcctcagcaaattccaaaatagggtcatcagcacctaccaccactgctgctacacttccttaatgggaattaaaatgacaactgtagctctgtcatcaacatctcaaactgccacagcactcactgtgcctgcaatttcttctgcatccactcacaaaaccattaagaacccagtgaataatgtgaggcctggttttccagtttctcttccattagcatatcctcctccacagtttgcacatgctttgcttgctgctcagactttccagcagatccgtccaccaaggttgcccatgacccactttggaggtacttttccaccagctcaatccacttggggtccgtttcctgtcaggcctttgagccctgccagagctactaactcgcctaagcctcacatggtgcctcgccatagcaatcagaatagcagtggttctcaggtgaattcagcaggttctttaacttcaagcccaacaactacaaccagttcatcagcttcaacggtgcctggtacatctacaaatggcagtccaagttcaccttctgtccgaaggcagctttttgtcacagttgtgaagacatccaatgccaccacaacaacagtcacaaccacggcaagcaacaacaacactgcacccacaaatgccacatatcctatgcctactgccaaagaacactatccagtatcatccccatcttccccatcaccaccagcccagccaggaggggtttctagaaacagccctttggattgtggatcagcatctccaaataaagtggcatcttcctccgaacaggaagcaggtagtccaccagtagtagaaacaacaaacactagacctccaaacagcagcagttcttctgggagttcatcagctcattctaatcagcaacaacctccgggatctgtttctcaggaaccaagaccacctcttcagcagtctcaggttcctcccccggaagttagaatgactgttcctcctttagcaacaagttctgctccagtggcggtgccttctactgccccagtgacttaccctatgcctcagacaccaatgggatgcccccagcctactcctaaaatggaaacccctgctattagaccaccccctcatggcacaactgcccctcacaagaattcagcttcagtgcaaaattcatctgttgcagtcctcagtgtcaatcacattaaaagacctcacagtgttccctcttctgtccagctaccttcgaccttaagtacacaaagtgcttgtcagaattcagtacatccagcaaataagcctattgctcccaatttcagtgcccccttaccatttgggccctttagcacattgtttgaaaacagccctacttctgctcatgccttctggggaggatctgttgtttcatctcagtcaacaccagaatctatgctatcaggaaaatcctcatatttgccaaattcagatcctttacatcagtctgatacttccaaagctccaggttttagaccaccattacagagacctgctccaagtccctcaggtattgtcaatatggactcgccatatggttctgtaacaccttcttcaacacatttgggaaactttgcttcaaacatttcaggaggtcagatgtacggacctggggcaccccttggaggagcacccgcagctgctaactttaacagacaacatttttccccgcttagtttgttgactccgtgttcatcagcatcaaatgattcttctgcacagtcagtatcctcgggagttcgtgcaccatctcctgccccatcatcagtaccgttagggtcagaaaagcccagcaatgtgtctcaggacaggaaagttccagtccctattgggactgaacgttctgcacgtatcaggcaaactggaacgtcagctccatctgttattgggagcaatttgtctacatcagtaggacatagtggcatctggtcctttgaagggattggtggcaatcaagacaaagtagactggtgtaaccctgggatgggaaatcctatgatccacagaccgatgtctgacccaggagtattttcacaacatcaagcaatggagcgagatagtacaggaattgtaactccttctggtacattccatcagcatgttcctgcaggctacatggactttcctaaagttgggggtatgcctttttctgtgtatgggaatgcaatgattcctccagtagcacctatccctgatggtgctggaggacccatatttaatggccctcatgctgcagacccttcttggaactcactgataaagatggtttccagctccacggaaaataatggccctcaaacggtgtggactggaccctgggcacctcacatgaacagtgtgcatatgaaccagcttggctgatgaggatcagcttgttagcctgcagattccttttcatttggaggaaatcacaagtggccgaaaaaaaaaattatgctcccaaatcattctactgatgtgcttgactgaagtgtgtaggctttttgcagaagatcttactaactgacctattttctgtgaacatttgtgactgcccattccccatcatcatccgttttaccttagttagcatttttcttatcatttttctttttttctttccctcttcccctttggacataactttctgttgaagctgttctttggctggttggttttagtactgtaaactgcttctgagcaaacacggaaatttagcaaaattatgtaaacttgatcctgaagttttagaatggcaaataaatgtacaattgtttacataacagaaaaggctaagcagaaagtaaatttcaatatgtcagtatagaggctctactttatgtagacttaaattaatgtgagatatgtaccttcatattcagaaatctggatgtttccttcatacattaaactattaataagcataacttttctactggtgtaatttaagtataaagtaaaataatgggcattatcattggatgtttccccacattggcttttaaaatacccatcttgctttctttttggtttatttgtagcaaggcacatatagaagaagaaatttctggcttttccatgttgttttattaccttttctcacttttaaaactaatacagacttatctcctcactcctttttctctccttacctttaccactaataccagtaaaattatctttctgatagtgaaaaggttctgtcaagattttcactgtaatggctgctacagagatggaccatcttcatcatcaccagtggtttcttctaattataaaatgtttaaactttctgagaatttaaaaagccaccactgttcccagtcagcatatacaagctcttaatattctgtttattaaataattcaatgtactattttatattggatgatattgattcttaacattggcttttcagtcatcaacagtcaacataaaaatttcaattttcagtaatttagtggaaaatatcttatttcttttttcaattttaaaggcttcctgcttttttacccttgtatattatcagtgaaaaggatcaacagttaatttgagccaagtaataaaagaaattctgcatttgtcacgaagacaatttatggtagacagataaatacacagattacagtgtaaagtctccatttaacctgtttataaaagatacaaggccacactaaactactcagtgggatttatatattccatccacttgaaacaataaacagtaatgtatccaagaagattatgtgtcctaccctgtctcatggaaaaattaattatatggttgaaatgtaaaagaaagtaagcataaaaatcgagtaatgtataaaaaaat

SEQ ID NO: 48986 - DNA, 3724 bp, Homo sapiens
gacaatcattcaccagctgtggtcactaccactgtgagcagcaaaaagcagccatcagttcttgttacatttccaaaggaagagagaaaatctgtttctggcaaggcttcaataaaattgtcagaaactatcagtgaagggaccagtaattctctatctacttgtacaaaatctggtccatctcccctttcttctccaaatgggaagttaacagtagcaagtcctaagcgtgggcaaaagagggaagaaggatggaaagaagttgtaagaaggtcaaagaaagtatctgttccatcaactgtgatatccagagtgattggaagaggaggctgtaatatcaatgctattcgggagtttactggtgcacacatagatattgataaacagaaagacaagactggagaccggataatcactataaggggtggcactgaatcaacaagacaagcaactcaattgattaatgctttgatcaaggatccagacaaagaaattgatgaacttattccaaagaatcgtttgaaaagctcctcagcaaattccaaaatagggtcatcagcacctaccaccactgctgctacacttccttaatgggaattaaaatgacaactgtagctctgtcatcaacatctcaaactgccacagcactcactgtgcctgcaatttcttctgcatccactcacaaaaccattaagaacccagtgaataatgtgaggcctggttttccagtttctcttccattagcatatcctcctccacagtttgcacatgctttgcttgctgctcagactttccagcagatccgtccaccaaggttgcccatgacccactttggaggtacttttccaccagctcaatccacttggggtccgtttcctgtcaggcctttgagccctgccagagctactaactcgcctaagcctcacatggtgcctcgccatagcaatcagaatagcagtggttctcaggtgaattcagcaggttctttaacttcaagcccaacaactacaaccagttcatcagcttcaacggtgcctggtacatctacaaatggcagtccaagttcaccttctgtccgaaggcagctttttgtcacagttgtgaagacatccaatgccaccacaacaacagtcacaaccacggcaagcaacaacaacactgcacccacaaatgccacatatcctatgcctactgccaaagaacactatccagtatcatccccatcttccccatcaccaccagcccagccaggaggggtttctagaaacagccctttggattgtggatcagcatctccaaataaagtggcatcttcctccgaacaggaagcaggtagtccaccagtagtagaaacaacaaacactagacctccaaacagcagcagttcttctgggagttcatcagctcattctaatcagcaacaacctccgggatctgtttctcaggaaccaagaccacctcttcagcagtctcaggttcctcccccggaagttagaatgactgttcctcctttagcaacaagttctgctccagtggcggtgccttctactgccccagtgacttaccctatgcctcagacaccaatgggatgcccccagcctactcctaaaatggaaacccctgctattagaccaccccctcatggcacaactgcccctcacaagaattcagcttcagtgcaaaattcatctgttgcagtcctcagtgtcaatcacattaaaagacctcacagtgttccctcttctgtccagctaccttcgaccttaagtacacaaagtgcttgtcagaattcagtacatccacaatttgtctacatcagtaggacatagtggcatctggtcctttgaagggattggtggcaatcaagacaaagtagactggtgtaaccctgggatgggaaatcctatgatccacagaccgatgtctgacccaggagtattttcacaacatcaagcaatggagcgagatagtacaggaattgtaactccttctggtacattccatcagcatgttcctgcaggctacatggactttcctaaagttgggggtatgcctttttctgtgtatgggaatgcaatgattcctccagtagcacctatccctgatggtgctggaggacccatatttaatggccctcatgctgcagacccttcttggaactcactgataaagatggtttccagctccacggaaaataatggccctcaaacggtgtggactggaccctgggcacctcacatgaacagtgtgcatatgaaccagcttggctgatgaggatcagcttgttagcctgcagattccttttcatttggaggaaatcacaagtggccgaaaaaaaaaattatgctcccaaatcattctactgatgtgcttgactgaagtgtgtaggctttttgcagaagatcttactaactgacctattttctgtgaacatttgtgactgcccattccccatcatcatccgttttaccttagttagcatttttcttatcatttttctttttttctttccctcttcccctttggacataactttctgttgaagctgttctttggctggttggttttagtactgtaaactgcttctgagcaaacacggaaatttagcaaaattatgtaaacttgatcctgaagttttagaatggcaaataaatgtacaattgtttacataacagaaaaggctaagcagaaagtaaatttcaatatgtcagtatagaggctctactttatgtagacttaaattaatgtgagatatgtaccttcatattcagaaatctggatgtttccttcatacattaaactattaataagcataacttttctactggtgtaatttaagtataaagtaaaataatgggcattatcattggatgtttccccacattggcttttaaaatacccatcttgctttctttttggtttatttgtagcaaggcacatatagaagaagaaatttctggcttttccatgttgttttattaccttttctcacttttaaaactaatacagacttatctcctcactcctttttctctccttacctttaccactaataccagtaaaattatctttctgatagtgaaaaggttctgtcaagattttcactgtaatggctgctacagagatggaccatcttcatcatcaccagtggtttcttctaattataaaatgtttaaactttctgagaatttaaaaagccaccactgttcccagtcagcatatacaagctcttaatattctgtttattaaataattcaatgtactattttatattggatgatattgattcttaacattggcttttcagtcatcaacagtcaacataaaaatttcaattttcagtaatttagtggaaaatatcttatttcttttttcaattttaaaggcttcctgcttttttacccttgtatattatcagtgaaaaggatcaacagttaatttgagccaagtaataaaagaaattctgcatttgtcacgaagacaatttatggtagacagataaatacacagattacagtgtaaagtctccatttaacctgtttataaaagatacaaggccacactaaactactcagtgggatttatatattccatccacttgaaacaataaacagtaatgtatccaagaagattatgtgtcctaccctgtctcatggaaaaattaattatatggttgaaatgtaaaagaaagtaagcataaaaatcgagtaatgtataaaaaaat

SEQ ID NO: 48987 - DNA, 2380 bp, Homo sapiens
atctagaacatttctattatccaaaattctactgggcaacactgatatatgtagaagatacaaagatctcctgattgtattgtcaatatggactcgccatatggttctgtaacaccttcttcaacacatttgggaaactttgcttcaaacatttcaggaggtcagatgtacggacctggggcaccccttggaggagcacccgcagctgctaactttaacagacaacatttttccccgcttagtttgttgactccgtgttcatcagcatcaaatgattcttctgcacagtcagtatcctcgggagttcgtgcaccatctcctgccccatcatcagtaccgttagggtcagaaaagcccagcaatgtgtctcaggacaggaaagttccagtccctattgggactgaacgttctgcacgtatcaggcaaactggaacgtcagctccatctgttattgggagcaatttgtctacatcagtaggacatagtggcatctggtcctttgaagggattggtggcaatcaagacaaagtagactggtgtaaccctgggatgggaaatcctatgatccacagaccgatgtctgacccaggagtattttcacaacatcaagcaatggagcgagatagtacaggaattgtaactccttctggtacattccatcagcatgttcctgcaggctacatggactttcctaaagttgggggtatgcctttttctgtgtatgggaatgcaatgattcctccagtagcacctatccctgatggtgctggaggacccatatttaatggccctcatgctgcagacccttcttggaactcactgataaagatggtttccagctccacggaaaataatggccctcaaacggtgtggactggaccctgggcacctcacatgaacagtgtgcatatgaaccagcttggctgatgaggatcagcttgttagcctgcagattccttttcatttggaggaaatcacaagtggccgaaaaaaaaaattatgctcccaaatcattctactgatgtgcttgactgaagtgtgtaggctttttgcagaagatcttactaactgacctattttctgtgaacatttgtgactgcccattccccatcatcatccgttttaccttagttagcatttttcttatcatttttctttttttctttccctcttcccctttggacataactttctgttgaagctgttctttggctggttggttttagtactgtaaactgcttctgagcaaacacggaaatttagcaaaattatgtaaacttgatcctgaagttttagaatggcaaataaatgtacaattgtttacataacagaaaaggctaagcagaaagtaaatttcaatatgtcagtatagaggctctactttatgtagacttaaattaatgtgagatatgtaccttcatattcagaaatctggatgtttccttcatacattaaactattaataagcataacttttctactggtgtaatttaagtataaagtaaaataatgggcattatcattggatgtttccccacattggcttttaaaatacccatcttgctttctttttggtttatttgtagcaaggcacatatagaagaagaaatttctggcttttccatgttgttttattaccttttctcacttttaaaactaatacagacttatctcctcactcctttttctctccttacctttaccactaataccagtaaaattatctttctgatagtgaaaaggttctgtcaagattttcactgtaatggctgctacagagatggaccatcttcatcatcaccagtggtttcttctaattataaaatgtttaaactttctgagaatttaaaaagccaccactgttcccagtcagcatatacaagctcttaatattctgtttattaaataattcaatgtactattttatattggatgatattgattcttaacattggcttttcagtcatcaacagtcaacataaaaatttcaattttcagtaatttagtggaaaatatcttatttcttttttcaattttaaaggcttcctgcttttttacccttgtatattatcagtgaaaaggatcaacagttaatttgagccaagtaataaaagaaattctgcatttgtcacgaagacaatttatggtagacagataaatacacagattacagtgtaaagtctccatttaacctgtttataaaagatacaaggccacactaaactactcagtgggatttatatattccatccacttgaaacaataaacagtaatgtatccaagaagattatgtgtcctaccctgtctcatggaaaaattaattatatggttgaaatgtaaaagaaagtaagcataaaaatcgagtaatgtataaaaaaat

SEQ ID NO: 48988 - DNA, 2718 bp, Homo sapiens
gacaatcattcaccagctgtggtcactaccactgtgagcagcaaaaagcagccatcagttcttgttacatttccaaaggaagagagaaaatctgtttctggcaaggcttcaataaaattgtcagaaactatcagtgaagggaccagtaattctctatctacttgtacaaaatctggtccatctcccctttcttctccaaatgggaagttaacagtagcaagtcctaagcgtgggcaaaagagggaagaaggatggaaagaagttgtaagaaggtcaaagaaagtatctgttccatcaactgtgatatccagagtgattggaagaggaggctgtaatatcaatgctattcgggagtttactggtgcacacatagatattgataaacagaaagacaagactggagaccggataatcgtattgtcaatatggactcgccatatggttctgtaacaccttcttcaacacatttgggaaactttgcttcaaacatttcaggaggtcagatgtacggacctggggcaccccttggaggagcacccgcagctgctaactttaacagacaacatttttccccgcttagtttgttgactccgtgttcatcagcatcaaatgattcttctgcacagtcagtatcctcgggagttcgtgcaccatctcctgccccatcatcagtaccgttagggtcagaaaagcccagcaatgtgtctcaggacaggaaagttccagtccctattgggactgaacgttctgcacgtatcaggcaaactggaacgtcagctccatctgttattgggagcaatttgtctacatcagtaggacatagtggcatctggtcctttgaagggattggtggcaatcaagacaaagtagactggtgtaaccctgggatgggaaatcctatgatccacagaccgatgtctgacccaggagtattttcacaacatcaagcaatggagcgagatagtacaggaattgtaactccttctggtacattccatcagcatgttcctgcaggctacatggactttcctaaagttgggggtatgcctttttctgtgtatgggaatgcaatgattcctccagtagcacctatccctgatggtgctggaggacccatatttaatggccctcatgctgcagacccttcttggaactcactgataaagatggtttccagctccacggaaaataatggccctcaaacggtgtggactggaccctgggcacctcacatgaacagtgtgcatatgaaccagcttggctgatgaggatcagcttgttagcctgcagattccttttcatttggaggaaatcacaagtggccgaaaaaaaaaattatgctcccaaatcattctactgatgtgcttgactgaagtgtgtaggctttttgcagaagatcttactaactgacctattttctgtgaacatttgtgactgcccattccccatcatcatccgttttaccttagttagcatttttcttatcatttttctttttttctttccctcttcccctttggacataactttctgttgaagctgttctttggctggttggttttagtactgtaaactgcttctgagcaaacacggaaatttagcaaaattatgtaaacttgatcctgaagttttagaatggcaaataaatgtacaattgtttacataacagaaaaggctaagcagaaagtaaatttcaatatgtcagtatagaggctctactttatgtagacttaaattaatgtgagatatgtaccttcatattcagaaatctggatgtttccttcatacattaaactattaataagcataacttttctactggtgtaatttaagtataaagtaaaataatgggcattatcattggatgtttccccacattggcttttaaaatacccatcttgctttctttttggtttatttgtagcaaggcacatatagaagaagaaatttctggcttttccatgttgttttattaccttttctcacttttaaaactaatacagacttatctcctcactcctttttctctccttacctttaccactaataccagtaaaattatctttctgatagtgaaaaggttctgtcaagattttcactgtaatggctgctacagagatggaccatcttcatcatcaccagtggtttcttctaattataaaatgtttaaactttctgagaatttaaaaagccaccactgttcccagtcagcatatacaagctcttaatattctgtttattaaataattcaatgtactattttatattggatgatattgattcttaacattggcttttcagtcatcaacagtcaacataaaaatttcaattttcagtaatttagtggaaaatatcttatttcttttttcaattttaaaggcttcctgcttttttacccttgtatattatcagtgaaaaggatcaacagttaatttgagccaagtaataaaagaaattctgcatttgtcacgaagacaatttatggtagacagataaatacacagattacagtgtaaagtctccatttaacctgtttataaaagatacaaggccacactaaactactcagtgggatttatatattccatccacttgaaacaataaacagtaatgtatccaagaagattatgtgtcctaccctgtctcatggaaaaattaattatatggttgaaatgtaaaagaaagtaagcataaaaatcgagtaatgtataaaaaaat

SEQ ID NO: 48989 - DNA, 2333 bp, Homo sapiens
ccaaagtgctggcattacaggcatgagccaccacgcccagcctcgtagtcatttctaaaagatctgtattcctattttttttgttatgtgaatatttaatcacttctttatgagctctgtccccatgtgacctttctcattacatgtatttattactgctttcagaaaatatctaatgcaagcatgttcttttcttcctttcatcatattaaggacataataatatttcctttcagtccctttaggttgtacttaggtttttttcttttgttttataacaccaagtttttagattatttcattaagctattatgtcactacttacaaaccatggaaatattgctgtaaatatataaaagtaggtcattatattgaaataatttacggttcaatgtggaaaatattagaaaaacaaaatatttgattttgattttaaatattatctatttttgttttgcctctttgtttgccctcagacaaagtagactggtgtaaccctgggatgggaaatcctatgatccacagaccgatgtctgacccaggagtattttcacaacatcaagcaatggagcgagatagtacaggaattgtaactccttctggtacattccatcagcatgttcctgcaggctacatggactttcctaaagttgggggtatgcctttttctgtgtatgggaatgcaatgattcctccagtagcacctatccctgatggtgctggaggacccatatttaatggccctcatgctgcagacccttcttggaactcactgataaagatggtttccagctccacggaaaataatggccctcaaacggtgtggactggaccctgggcacctcacatgaacagtgtgcatatgaaccagcttggctgatgaggatcagcttgttagcctgcagattccttttcatttggaggaaatcacaagtggccgaaaaaaaaaattatgctcccaaatcattctactgatgtgcttgactgaagtgtgtaggctttttgcagaagatcttactaactgacctattttctgtgaacatttgtgactgcccattccccatcatcatccgttttaccttagttagcatttttcttatcatttttctttttttctttccctcttcccctttggacataactttctgttgaagctgttctttggctggttggttttagtactgtaaactgcttctgagcaaacacggaaatttagcaaaattatgtaaacttgatcctgaagttttagaatggcaaataaatgtacaattgtttacataacagaaaaggctaagcagaaagtaaatttcaatatgtcagtatagaggctctactttatgtagacttaaattaatgtgagatatgtaccttcatattcagaaatctggatgtttccttcatacattaaactattaataagcataacttttctactggtgtaatttaagtataaagtaaaataatgggcattatcattggatgtttccccacattggcttttaaaatacccatcttgctttctttttggtttatttgtagcaaggcacatatagaagaagaaatttctggcttttccatgttgttttattaccttttctcacttttaaaactaatacagacttatctcctcactcctttttctctccttacctttaccactaataccagtaaaattatctttctgatagtgaaaaggttctgtcaagattttcactgtaatggctgctacagagatggaccatcttcatcatcaccagtggtttcttctaattataaaatgtttaaactttctgagaatttaaaaagccaccactgttcccagtcagcatatacaagctcttaatattctgtttattaaataattcaatgtactattttatattggatgatattgattcttaacattggcttttcagtcatcaacagtcaacataaaaatttcaattttcagtaatttagtggaaaatatcttatttcttttttcaattttaaaggcttcctgcttttttacccttgtatattatcagtgaaaaggatcaacagttaatttgagccaagtaataaaagaaattctgcatttgtcacgaagacaatttatggtagacagataaatacacagattacagtgtaaagtctccatttaacctgtttataaaagatacaaggccacactaaactactcagtgggatttatatattccatccacttgaaacaataaacagtaatgtatccaagaagattatgtgtcctaccctgtctcatggaaaaattaattatatggttgaaatgtaaaagaaagtaagcataaaaatcgagtaatgtataaaaaaat

SEQ ID NO: 48990 - DNA, 1791 bp, Homo sapiens
tacacattcccaggatgaggtgaactttcaaatatcaattttaaggctattgattatattgggaaaaatgaacaatgacttggatgttaatgtgtgtgttttccttttttaagggtatgcctttttctgtgtatgggaatgcaatgattcctccagtagcacctatccctgatggtgctggaggacccatatttaatggccctcatgctgcagacccttcttggaactcactgataaagatggtttccagctccacggaaaataatggccctcaaacggtgtggactggaccctgggcacctcacatgaacagtgtgcatatgaaccagcttggctgatgaggatcagcttgttagcctgcagattccttttcatttggaggaaatcacaagtggccgaaaaaaaaaattatgctcccaaatcattctactgatgtgcttgactgaagtgtgtaggctttttgcagaagatcttactaactgacctattttctgtgaacatttgtgactgcccattccccatcatcatccgttttaccttagttagcatttttcttatcatttttctttttttctttccctcttcccctttggacataactttctgttgaagctgttctttggctggttggttttagtactgtaaactgcttctgagcaaacacggaaatttagcaaaattatgtaaacttgatcctgaagttttagaatggcaaataaatgtacaattgtttacataacagaaaaggctaagcagaaagtaaatttcaatatgtcagtatagaggctctactttatgtagacttaaattaatgtgagatatgtaccttcatattcagaaatctggatgtttccttcatacattaaactattaataagcataacttttctactggtgtaatttaagtataaagtaaaataatgggcattatcattggatgtttccccacattggcttttaaaatacccatcttgctttctttttggtttatttgtagcaaggcacatatagaagaagaaatttctggcttttccatgttgttttattaccttttctcacttttaaaactaatacagacttatctcctcactcctttttctctccttacctttaccactaataccagtaaaattatctttctgatagtgaaaaggttctgtcaagattttcactgtaatggctgctacagagatggaccatcttcatcatcaccagtggtttcttctaattataaaatgtttaaactttctgagaatttaaaaagccaccactgttcccagtcagcatatacaagctcttaatattctgtttattaaataattcaatgtactattttatattggatgatattgattcttaacattggcttttcagtcatcaacagtcaacataaaaatttcaattttcagtaatttagtggaaaatatcttatttcttttttcaattttaaaggcttcctgcttttttacccttgtatattatcagtgaaaaggatcaacagttaatttgagccaagtaataaaagaaattctgcatttgtcacgaagacaatttatggtagacagataaatacacagattacagtgtaaagtctccatttaacctgtttataaaagatacaaggccacactaaactactcagtgggatttatatattccatccacttgaaacaataaacagtaatgtatccaagaagattatgtgtcctaccctgtctcatggaaaaattaattatatggttgaaatgtaaaagaaagtaagcataaaaatcgagtaatgtataaaaaaat

SEQ ID NO: 48991 - DNA, 1728 bp, Homo sapiens
  misc_feature (18)..(18): n is a, c, g, or t
  misc_feature (27)..(28): n is a, c, g, or t
ccccccccttgggggggncaaggctanncatggactttcctaaagttgggggtatgcctttttctgtgtatgggaatgcaatgattcctccagtagcacctatccctgatggtgctggaggacccatatttaatggccctcatgctgcagacccttcttggaactcactgataaagatggtttccagctccacggaaaataatggccctcaaacggtgtggactggaccctgggcacctcacatgaacagtgtgcatatgaaccagcttggctgatgaggatcagcttgttagcctgcagattccttttcatttggaggaaatcacaagtggccgaaaaaaaaaattatgctcccaaatcattctactgatgtgcttgactgaagtgtgtaggctttttgcagaagatcttactaactgacctattttctgtgaacatttgtgactgcccattccccatcatcatccgttttaccttagttagcatttttcttatcatttttctttttttctttccctcttcccctttggacataactttctgttgaagctgttctttggctggttggttttagtactgtaaactgcttctgagcaaacacggaaatttagcaaaattatgtaaacttgatcctgaagttttagaatggcaaataaatgtacaattgtttacataacagaaaaggctaagcagaaagtaaatttcaatatgtcagtatagaggctctactttatgtagacttaaattaatgtgagatatgtaccttcatattcagaaatctggatgtttccttcatacattaaactattaataagcataacttttctactggtgtaatttaagtataaagtaaaataatgggcattatcattggatgtttccccacattggcttttaaaatacccatcttgctttctttttggtttatttgtagcaaggcacatatagaagaagaaatttctggcttttccatgttgttttattaccttttctcacttttaaaactaatacagacttatctcctcactcctttttctctccttacctttaccactaataccagtaaaattatctttctgatagtgaaaaggttctgtcaagattttcactgtaatggctgctacagagatggaccatcttcatcatcaccagtggtttcttctaattataaaatgtttaaactttctgagaatttaaaaagccaccactgttcccagtcagcatatacaagctcttaatattctgtttattaaataattcaatgtactattttatattggatgatattgattcttaacattggcttttcagtcatcaacagtcaacataaaaatttcaattttcagtaatttagtggaaaatatcttatttcttttttcaattttaaaggcttcctgcttttttacccttgtatattatcagtgaaaaggatcaacagttaatttgagccaagtaataaaagaaattctgcatttgtcacgaagacaatttatggtagacagataaatacacagattacagtgtaaagtctccatttaacctgtttataaaagatacaaggccacactaaactactcagtgggatttatatattccatccacttgaaacaataaacagtaatgtatccaagaagattatgtgtcctaccctgtctcatggaaaaattaattatatggttgaaatgtaaaagaaagtaagcataaaaatcgagtaatgtataaaaaaat

SEQ ID NO: 48992 - DNA, 2545 bp, Homo sapiens
  misc_feature (2413)..(2413): n is a, c, g, or t
  misc_feature (2539)..(2539): n is a, c, g, or t
gacaatcattcaccagctgtggtcactaccactgtgagcagcaaaaagcagccatcagttcttgttacatttccaaaggaagagagaaaatctgtttctggcaaggcttcaataaaattgtcagaaactatcagtgaagggaccagtaattctctatctacttgtacaaaatctggtccatctcccctttcttctccaaatgggaagttaacagtagcaagtcctaagcgtgggcaaaagagggaagaaggatggaaagaagttgtaagaaggtcaaagaaagtatctgttccatcaactgtgatatccagagtgattggaagaggaggctgtaatatcaatgctattcgggagtttactggtgcacacatagatattgataaacagaaagacaagactggagaccggataatcactataaggggtggcactgaatcaacaagacaagcaactcaattgattaatgctttgatcaaggatccagacaaagaaattgatgaacttattccaaagaatcgtttgaaaagctcctcagcaaattccaaaatagggtcatcagcacctaccaccactgctgctacacttccttaatgggaattaaaatgacaactgtagctctgtcatcaacatctcaaactgccacagcactcactgtgcctgcaatttcttctgcatccactcacaaaaccattaagaacccagtgaataatgtgaggcctggttttccagtttctcttccattagcatatcctcctccacagtttgcacatgctttgcttgctgctcagactttccagcagatccgtccaccaaggttgcccatgacccactttggaggtacttttccaccagctcaatccacttggggtccgtttcctgtcaggcctttgagccctgccagagctactaactcgcctaagcctcacatggtgcctcgccatagcaatcagaatagcagtggttctcaggtgaattcagcaggttctttaacttcaagcccaacaactacaaccagttcatcagcttcaacggtgcctggtacatctacaaatggcagtccaagttcaccttctgtccgaaggcagctttttgtcacagttgtgaagacatccaatgccaccacaacaacagtcacaaccacggcaagcaacaacaacactgcacccacaaatgccacatatcctatgcctactgccaaagaacactatccagtatcatccccatcttccccatcaccaccagcccagccaggaggggtttctagaaacagccctttggattgtggatcagcatctccaaataaagtggcatcttcctccgaacaggaagcaggtagtccaccagtagtagaaacaacaaacactagacctccaaacagcagcagttcttctgggagttcatcagctcattctaatcagcaacaacctccgggatctgtttctcaggaaccaagaccacctcttcagcagtctcaggttcctcccccggaagttagaatgactgttcctcctttagcaacaagttctgctccagtggcggtgccttctactgccccagtgacttaccctatgcctcagacaccaatgggatgcccccagcctactcctaaaatggaaacccctgctattagaccaccccctcatggcacaactgcccctcacaagaattcagcttcagtgcaaaattcatctgttgcagtcctcagtgtcaatcacattaaaagacctcacagtgttccctcttctgtccagctaccttcgaccttaagtacacaaagtgcttgtcagaattcagtacatccagcaaataagcctattgctcccaatttcagtgcccccttaccatttgggccctttagcacattgtttgaaaacagccctacttctgctcatgccttctggggaggatctgttgtttcatctcagtcaacaccagaatctatgctatcaggaaaatcctcatatttgccaaattcagatcctttacatcagtctgatacttccaaagctccaggttttagaccaccattacagagacctgctccaagtccctcaggtattgtcaatatggactcgccatatggttctgtaacaccttcttcaacacatttgggaaactttgcttcaaacatttcaggaggtcagatgtacggacctggggcaccccttggaggagcacccgcagctgctaactttaacagacaacatttttccccgcttagtttgttgactccgtgttcatcagcatcaaatggggtggcactgaatcaacaagacaagcaactcaattgattaatgctttgatcaaggatccagacaaagaaattgatgaacttattccaaagaatcgtttgaaaagctcctcagcaaattccaaaatagggtcatcagcacctaccaccactgctgctaanacttccttaatgggaattaaaatgacaactgtagctctgtcatcaacatctcaaactgccacagcactcactgtgcctgcaatttcttctgcatcccacccccaagaagaactgaataccccattnctgagc

SEQ ID NO: 48993 - DNA, 2117 bp, Homo sapiens
gacaatcattcaccagctgtggtcactaccactgtgagcagcaaaaagcagccatcagttcttgttacatttccaaaggaagagagaaaatctgtttctggcaaggcttcaataaaattgtcagaaactatcagtgaagggaccagtaattctctatctacttgtacaaaatctggtccatctcccctttcttctccaaatgggaagttaacagtagcaagtcctaagcgtgggcaaaagagggaagaaggatggaaagaagttgtaagaaggtcaaagaaagtatctgttccatcaactgtgatatccagagtgattggaagaggaggctgtaatatcaatgctattcgggagtttactggtgcacacatagatattgataaacagaaagacaagactggagaccggataatcactataaggggtggcactgaatcaacaagacaagcaactcaattgattaatgctttgatcaaggatccagacaaagaaattgatgaacttattccaaagaatcgtttgaaaagctcctcagcaaattccaaaatagggtcatcagcacctaccaccactgctgctacacttccttaatgggaattaaaatgacaactgtagctctgtcatcaacatctcaaactgccacagcactcactgtgcctgcaatttcttctgcatccactcacaaaaccattaagaacccagtgaataatgtgaggcctggttttccagtttctcttccattagcatatcctcctccacagtttgcacatgctttgcttgctgctcagactttccagcagatccgtccaccaaggttgcccatgacccactttggaggtacttttccaccagctcaatccacttggggtccgtttcctgtcaggcctttgagccctgccagagctactaactcgcctaagcctcacatggtgcctcgccatagcaatcagaatagcagtggttctcaggtgaattcagcaggttctttaacttcaagcccaacaactacaaccagttcatcagcttcaacggtgcctggtacatctacaaatggcagtccaagttcaccttctgtccgaaggcagctttttgtcacagttgtgaagacatccaatgccaccacaacaacagtcacaaccacggcaagcaacaacaacactgcacccacaaatgccacatatcctatgcctactgccaaagaacactatccagtatcatccccatcttccccatcaccaccagcccagccaggaggggtttctagaaacagccctttggattgtggatcagcatctccaaataaagtggcatcttcctccgaacaggaagcaggtagtccaccagtagtagaaacaacaaacactagacctccaaacagcagcagttcttctgggagttcatcagctcattctaatcagcaacaacctccgggatctgtttctcaggaaccaagaccacctcttcagcagtctcaggttcctcccccggaagttagaatgactgttcctcctttagcaacaagttctgctccagtggcggtgccttctactgccccagtgacttaccctatgcctcagacaccaatgggatgcccccagcctactcctaaaatggaaacccctgctattagaccaccccctcatggcacaactgcccctcacaagaattcagcttcagtgcaaaattcatctgttgcagtcctcagtgtcaatcacattaaaagacctcacagtgttccctcttctgtccagctaccttcgaccttaagtacacaaagtgcttgtcagaattcagtacatccagcaaataagcctattgctcccaatttcagtgcccccttaccatttgggccctttagcacattgtttgaaaacagccctacttctgctcatgccttctggggaggatctgttgtttcatctcagtcaacaccagaatctatgctatcaggaaaatcctcatatttgccaaattcagatcctttacatcagtctgatacttccaaagctccaggttttagaccaccattacagagacctgctccaagtccctcagagttcagatgtacggactggctaccttggaaaggcgccgcaaaaggtatactctagagtcac

SEQ ID NO: 48994 - DNA, 3450 bp, Homo sapiens
gacaatcattcaccagctgtggtcactaccactgtgagcagcaaaaagcagccatcagttcttgttacatttccaaaggaagagagaaaatctgtttctggcaaggcttcaataaaattgtcagaaactatcagtgaagggaccagtaattctctatctacttgtacaaaatctggtccatctcccctttcttctccaaatgggaagttaacagtagcaagtcctaagcgtgggcaaaagagggaagaaggatggaaagaagttgtaagaaggtcaaagaaagtatctgttccatcaactgtgatatccagagtgattggaagaggaggctgtaatatcaatgctattcgggagtttactggtgcacacatagatattgataaacagaaagacaagactggagaccggataatcactataaggggtggcactgaatcaacaagacaagcaactcaattgattaatgctttgatcaaggatccagacaaagaaattgatgaacttattccaaagaatcgtttgaaaagctcctcagcaaattccaaaatagggtcatcagcacctaccaccactgctgctacacttccttaatgggaattaaaatgacaactgtagctctgtcatcaacatctcaaactgccacagcactcactgtgcctgcaatttcttctgcatccactcacaaaaccattaagaacccagtgaataatgtgaggcctggttttccagtttctcttccattagcatatcctcctccacagtttgcacatgctttgcttgctgctcagactttccagcagatccgtccaccaaggttgcccatgacccactttggaggtacttttccaccagctcaatccacttggggtccgtttcctgtcaggcctttgagccctgccagagctactaactcgcctaagcctcacatggtgcctcgccatagcaatcagaatagcagtggttctcaggtgaattcagcaggttctttaacttcaagcccaacaactacaaccagttcatcagcttcaacggtgcctggtacatctacaaatggcagtccaagttcaccttctgtccgaaggcagctttttgtcacagttgtgaagacatccaatgccaccacaacaacagtcacaaccacggcaagcaacaacaacactgcacccacaaatgccacatatcctatgcctactgccaaagaacactatccagtatcatccccatcttccccatcaccaccagcccagccaggaggggtttctagaaacagccctttggattgtggatcagcatctccaaataaagtggcatcttcctccgaacaggaagcaggtagtccaccagtagtagaaacaacaaacactagacctccaaacagcagcagttcttctgggagttcatcagctcattctaatcagcaacaacctccgggatctgtttctcaggaaccaagaccacctcttcagcagtctcaggttcctcccccggaagttagaatgactgttcctcctttagcaacaagttctgctccagtggcggtgccttctactgccccagtgacttaccctatgcctcagacaccaatgggatgcccccagcctactcctaaaatggaaacccctgctattagaccaccccctcatggcacaactgcccctcacaagaattcagcttcagtgcaaaattcatctgttgcagtcctcagtgtcaatcacattaaaagacctcacagtgttccctcttctgtccagctaccttcgaccttaagtacacaaagtgcttgtcagaattcagtacatccagcaaataagcctattgctcccaatttcagtgcccccttaccatttgggccctttagcacattgtttgaaaacagccctacttctgctcatgccttctggggaggatctgttgtttcatctcagtcaacaccagaatctatgctatcaggaaaatcctcatatttgccaaattcagatcctttacatcagtctgatacttccaaagctccaggttttagaccaccattacagagacctgctccaagtccctcaggtattgtcaatatggactcgccatatggttctgtaacaccttcttcaacacatttgggaaactttgcttcaaacatttcaggaggtcagatgtacggacctggggcaccccttggaggagcacccgcagctgctaactttaacagacaacatttttccccgcttagtttgttgactccgtgttcatcagcatcaaatgattcttctgcacagtcagtatcctcgggagttcgtgcaccatctcctgccccatcatcagtaccgttagggtcagaaaagcccagcaatgtgtctcaggacaggaaagttccagtccctattgggactgaacgttctgcacgtatcaggcaaactggaacgtcagctccatctgttattgggagcaatttgtctacatcagtaggacatagtggcatctggtcctttgaagggattggtggcaatcaagacaaagtagactggtgtaaccctgggatgggaaatcctatgatccacagaccgatgtctgacccaggagtattttcacaacatcaagcaatggagcgagatagtacaggaattgtaactccttctggtacattccatcagcatgttcctgcaggctacatggactttcctaaagttgggggtatgcctttttctgtgtatgggaatgcaatgattcctccagtagcacctatccctgatggtgctggaggacccatatttaatggccctcatgctgcagacccttcttggaactcactgataaagatggtttccagctccacggaaaataatggccctcaaacggtgtggactggaccctgggcacctcacatgaacagtgtgcatatgaaccagcttggctgatgaggatcagcttgttagcctgcagattccttttcatttggaggaaatcacaagtggccgaaaaaaaaaattatgctcccaaatcattctactgatgtgcttgactgaagtgtgtaggctttttgcagaagatcttactaactgacctattttctgtgaacatttgtgactgcccattccccatcatcatccgttttaccttagttagcatttttcttatcatttttctttttttctttccctcttcccctttggacataactttctgttgaagctgttctttggctggttggttttagtactgtaaactgcttctgagcaaacacggaaatttagcaaaattatgtaaacttgatcctgaagttttagaatggcaaataaatgtacaattgtttacataacagaaaaggctaagcagaaagtaaatttcaatatgtcagtatagaggctctactttatgtagacttaaattaatgtgagatatgtaccttcatattcagaaatctggatgtttccttcatacattaaactattaataagcata

SEQ ID NO: 48995 - DNA, 1275 bp, Homo sapiens
gacaatcattcaccagctgtggtcactaccactgtgagcagcaaaaagcagccatcagttcttgttacatttccaaaggaagagagaaaatctgtttctggcaaggcttcaataaaattgtcagaaactatcagtgaagggaccagtaattctctatctacttgtacaaaatctggtccatctcccctttcttctccaaatgggaagttaacagtagcaagtcctaagcgtgggcaaaagagggaagaaggatggaaagaagttgtaagaaggtcaaagaaagtatctgttccatcaactgtgatatccagagtgattggaagaggaggctgtaatatcaatgctattcgggagtttactggtgcacacatagatattgataaacagaaagacaagactggagaccggataatcactataaggggtggcactgaatcaacaagacaagcaactcaattgattaatgctttgatcaaggatccagacaaagaaattgatgaacttattccaaagaatcgtttgaaaagctcctcagcaaattccaaaatagggtcatcagcacctaccaccactgctgctacacttccttaatgggaattaaaatgacaactgtagctctgtcatcaacatctcaaactgccacagcactcactgtgcctgcaatttcttctgcatccactcacaaaaccattaagaacccagtgaataatgtgaggcctggttttccagtttctcttccattagcatatcctcctccacagtttgcacatgctttgcttgctgctcagactttccagcagatccgtccaccaaggttgcccatgacccactttggaggtacttttccaccagctcaatccacttggggtccgtttcctgtcaggcctttgagccctgccagagctactaactcgcctaagcctcacatggtgcctcgccatagcaatcagaatagcagtggttctcaggtgaattcagcaggttctttaacttcaagcccaacaactacaaccagttcatcagcttcaacggtgcctggtacatctacaaatggcagtccaagttcaccttctgtccgaaggcagctttttgtcacagttgtgaagacatccaatgccaccacaacaacagtcacaaccacggcaagcaacaacaacactgcacccacaaatgccacatatcctatgcctactgccaaagaacactatccagtatcatccccatcttccccatcaatactatgtacagcagggtacagagctcgattctatcatg

SEQ ID NO: 48996 - DNA, 2412 bp, Homo sapiens
agcggaggagcggggaaggctcaggacagggtcttgctctgtcgcttaggagtgcaatggtgtaatcttggctcactgcaacctccacctcctgggcttaagcaattctcctgcctcagcctcccaagtagctgggaccagagagacagggtctctctttgttgtccaggttcagcttcaagtaatcttacagcctcagcatcccaaagtgctaggataacaggcatgagccatgacacccagccaaatattcttactggtactttatattgtgtattttaatcagattgtctagtccttctaacagccgtgaaattagcaaaatggctggccatccaaatgcaaactgatacaattcttttggtgatctggaacctcttgagcagcagaagcagcagatcattaatgaggaaggcactgagttattctcctacaaaggcaatgatgttgagtattttatatcgtctagttccccatccggtttatatcagttggatcttctttcaacagagaaagacacacatttcaaagtatatgccaccacaactccagaatctgatcagccataccctgagttaccctatgacccaagagtagatgtgacctcactggggcgcaccacggtcactttggcctggaaaccaagccccactgcctctttgctgaaacaacccattcagtactgtgtggtcatcaacaaagagcacaatttcaaaagtctctgtgcagtggaagcaaaactgagtgcagatgatgcttttatgatggcaccgaaacctggtctggacttcagcccctttgactttgcccactttggatttccttctgataattcaggtaaagaacgcagtttccaggcaaagccttctccaaaactggggcgtcatgtctactccaggcccaaggttgatattcagaaaatctgcataggaaacaagaacatcttcaccgtctctgatctgaaacccgacacgcagtactactttgatgtatttgtggtcaacatcaacagcaacatgagcaccgcttatgtaggtacctttgccaggaccaaggaagaagccaaacagaagacagtcgagctaaaagatgggaagataacagatgtatttgttaaaaggaagggagcaaagtttctacaggtttgctccagtctcttctcaccaaaaagtcaccttctttattcactcttgtctggatgctgtccaaatccaagtgagaagagatgggaaacttcttctgtctcagaatgtggaaggcattcagcagtttcagcttagaggaaaacctaaagctaaatacctcgttcgactgaaaggaaacaagaaaggagcatctatgttgaaaattctagctaccacaaggcctactaagcagtcatttccctctcttcctgaagacacaagaatcaaagcctttgacaagctccgtacctgttcctcggccaccgtggcttggctaggcactcaggaaaggaacaagttttgcatctacaaaaaagaagtggatgataactacaatgaagaccagaagaaaagagagcaaaaccaatgtctaggaccagatataaggaagaagtcagaaaaggtcctctgtaaatatttccacagtcaaaacctgcagaaagcagtgaccacagaaacaattaaaggtcttcagcctggcaaatcttacctgctggatgtttatgtcataggacatggggggcactctgtaaagtatcagagtaaggttgtgaaaactagaaagttctgttagttaccttcttatagagatatattatgtagaactccaggagggacattaaatcactttaagtataaactgactactcccacagttgagagaagttgtgacctgtacttgtactatggaaggaaggatatcaacgtgtgtatattgatgtttatataagtaactcttgaaggagacttgttctagcgtgccccatggtacctagtgtgtgtctgatgccggttggtgtcaaagatagagggcttcttgaaggaacttgccattccttgctttgaccactgcatgaactgcttctaaattattttattacctaaaaatttaaaatatgccattcattgcacacacccacaaatgcaaatcattcctctctatagatgctaggatatatataaattattttataaattcttgttttaaatgtcagtgtttctatgattgtaaactattaaattcttttcctattaaagtacagatctaatctaagtattattaagttgatagccctctagtcagttatattgctattgtaaattcttgtttgttgagtaaaatgtttaaatactatatgtatctcatgtacaaagttgacatacattatattcatgtacataaaattaaagagattagattatatactgttcatttctcccaagcagc

SEQ ID NO: 48997 - DNA, 2764 bp, Homo sapiens
gaagcccgcgccagccccgcgggtcgctgcggcatcctcccgccgcccagcccccgcacgctccctgcagtttaaaaggacctcccgccgcttctcggcgctgccccgggattccccagccccgcgcggctccctactccacttcgcagcaacttcggcgaccgcgcgccgcccgccctcgcccgcctttgaagtttgctgtgccgaccgcaaagttgggacacttcagcggattgaatttttctcttttatctgcctccgtccccgccctccaggcttctcgttcctggatattggtgcttagcatcttggcagggtccggggacgtggactatttcgcacaccacaccacggggagggatttttttctattttccctacgaaaaacagatctttttaaggatggtgctgctccactggtgcctgctgtggctcctgtttccactcagctcaaggacccagaagttacccacccgggatgaggaactttttcagatgcagatccgggacaaggcattttttcatgattcgtcagtaattccagatggagctgaaattagcagttatctctttagagatacacctaaaaggtatttctttgtggttgaagaagacaatactccattatcagtcacagtgacgccctgtgatgcgcctttggagtggaagctgagcctccaggagctgccagaggacaggagcggggaaggctcaggtgatctggaacctcttgagcagcagaagcagcagatcattaatgaggaaggcactgagttattctcctacaaaggcaatgatgttgagtattttatatcgtctagttccccatccggtttatatcagttggatcttctttcaacagagaaagacacacatttcaaagtatatgccaccacaactccagaatctgatcagccataccctgagttaccctatgacccaagagtagatgtgacctcactggggcgcaccacggtcactttggcctggaaaccaagccccactgcctctttgctgaaacaacccattcagtactgtgtggtcatcaacaaagagcacaatttcaaaagtctctgtgcagtggaagcaaaactgagtgcagatgatgcttttatgatggcaccgaaacctggtctggacttcagcccctttgactttgcccactttggatttccttctgataattcaggtaaagaacgcagtttccaggcaaagccttctccaaaactggggcgtcatgtctactccaggcccaaggttgatattcagaaaatctgcataggaaacaagaacatcttcaccgtctctgatctgaaacccgacacgcagtactactttgatgtatttgtggtcaacatcaacagcaacatgagcaccgcttatgtaggtacctttgccaggaccaaggaagaagccaaacagaagacagtcgagctaaaagatgggaagataacagatgtatttgttaaaaggaagggagcaaagtttctacaggtttgctccagtctcttctcaccaaaaagtcaccttctttattcactcttgtctggatgctgtccaaatccaagtgagaagagatgggaaacttcttctgtctcagaatgtggaaggcattcagcagtttcagcttagaggaaaacctaaagctaaatacctcgttcgactgaaaggaaacaagaaaggagcatctatgttgaaaattctagctaccacaaggcctactaagcagtcatttccctctcttcctgaagacacaagaatcaaagcctttgacaagctccgtacctgttcctcggccaccgtggcttggctaggcactcaggaaaggaacaagttttgcatctacaaaaaagaagtggatgataactacaatgaagaccagaagaaaagagagcaaaaccaatgtctaggaccagatataaggaagaagtcagaaaaggtcctctgtaaatatttccacagtcaaaacctgcagaaagcagtgaccacagaaacaattaaaggtcttcagcctggcaaatcttacctgctggatgtttatgtcataggacatggggggcactctgtaaagtatcagagtaaggttgtgaaaactagaaagttctgttagttaccttcttatagagatatattatgtagaactccaggagggacattaaatcactttaagtataaactgactactcccacagttgagagaagttgtgacctgtacttgtactatggaaggaaggatatcaacgtgtgtatattgatgtttatataagtaactcttgaaggagacttgttctagcgtgccccatggtacctagtgtgtgtctgatgccggttggtgtcaaagatagagggcttcttgaaggaacttgccattccttgctttgaccactgcatgaactgcttctaaattattttattacctaaaaatttaaaatatgccattcattgcacacacccacaaatgcaaatcattcctctctatagatgctaggatatatataaattattttataaattcttgttttaaatgtcagtgtttctatgattgtaaactattaaattcttttcctattaaagtacagatctaatctaagtattattaagttgatagccctctagtcagttatattgctattgtaaattcttgtttgttgagtaaaatgtttaaatactatatgtatctcatgtacaaagttgacatacattatattcatgtacataaaattaaagagattagattatatactgttcatttctcccaagcagc

SEQ ID NO: 48998 - DNA, 2759 bp, Homo sapiens
gaagcccgcgccagccccgcgggtcgctgcggcatcctcccgccgcccagcccccgcacgctccctgcagtttaaaaggacctcccgccgcttctcggcgctgccccgggattccccagccccgcgcggctccctactccacttcgcagcaacttcggcgaccgcgcgccgcccgccctcgcccgcctttgaagtttgctgtgccgaccgcaaagttgggacacttcagcggattgaatttttctcttttatctgcctccgtccccgccctccaggcttctcgttcctggatattggtgcttagcatcttggcagggtccggggacgtggactatttcgcacaccacaccacggggagggatttttttctattttccctacgaaaaacagatctttttaaggatggtgctgctccactggtgcctgctgtggctcctgtttccactcagctcaaggacccagaagttacccacccgggatgaggaactttttcagatgcagatccgggacaaggcattttttcatgattcgtcagtaattccagatggagctgaaattagcagttatctctttagagatacacctaaaaggtatttctttgtggttgaagaagacaatactccattatcagtcacagtgacgccctgtgatgcgcctttggagtggaagctgagcctccaggagctgccagaggacaggagcggggaaggctcaggtgatctggaacctcttgagcagcagaagcagcagatcattaatgaggaaggcactgagttattctcctacaaaggcaatgatgttgagtattttatatcgtctagttccccatccggtttatatcagttggatcttctttcaacagagaaagacacacatttcaaagtatatgccaccacaactccagaatctgatcagccataccctgagttaccctatgacccaagagtagatgtgacctcactggggcgcaccacggtcactttggcctggaaaccaagccccactgcctctttgctgaaacaacccattcagtactgtgtggtcatcaacaaagagcacaatttcaaaagtctctgtgcagtggaagcaaaactgagtgcagatgatgcttttatgatggcaccgaaacctggtctggacttcagcccctttgactttgcccactttggatttccttctgataattcaggtaaagaacgcagtttccaggcaaagccttctccaaaactggggcgtcatgtctactccaggcccaaggttgatattcagaaaatctgcataggaaacaagaacatcttcaccgtctctgatctgaaacccgacacgcagtactactttgatgtatttgtggtcaacatcaacagcaacatgagcaccgcttatgtaggtacctttgccaggaccaaggaagaagccaaacagaagacagtcgagctaaaagatgggaagataacagatgtatttgttaaaaggaagggagcaaagtttctacaggtttgctccagtctcttctcaccaaaaagtcaccttctttattcactcttgtctggatgctgtccaaatccaagtgagaagagatgggaaacttcttctgtctcagaatgtggaaggcattcagcagtttcagcttagaggaaaacctaaagctaaatacctcgttcgactgaaaggaaacaagaaaggagcatctatgttgaaaattctagctaccacaaggcctactaagcagtcatttccctctcttcctgaagacacaagaatcaaagcctttgacaagctccgtacctgttcctcggccaccgtggcttggctaggcactcaggaaaggaacaagttttgcatctacaaaaaagaagtggatgataactacaatgaagaccagaagaaaagagagcaaaaccaatgtctaggaccagatataaggaagaagtcagaaaaggtcctctgtaaatatttccacagtcaaaacctgcagaaagcagtgaccacagaaacaattaaaggtcttcagcctggcaaatcttacctgctggatgtttatgtcataggacatggggggcactctgtaaagtatcagagtaaggttgtgaaaactagaaagttctgttagttaccttcttatagagatatattatgtagaactccaggagggacattaaatcactttaagtataaactgactactcccacagttgagagaagttgtgacctgtacttgtactatggaaggaaggatatcaacgtgtgtatattgatgtttatataagtaactcttgaaggagacttgttctagcgtgccccatggtacctagtgtgtgtctgatgccggttggtgtcaaagatagagggcttcttgaaggaacttgccattccttgctttgaccactgcatgaactgcttctaaattattttattacctaaaaatttaaaatatgccattcattgcacacacccacaaatgcaatctatcctgttctaacaggtgactatatataatatatttataattatgttttacaagatagtattttctgatgatccatactaacttatcttgtcctacagaaggcattactaatcgatattattaaagatgctagagcccctcgatccatttatattgctattgtaaattcttgtttgttgagtaaaatgtttaaatactatatgtatctcatgtacaaagttgacatacattatattcatgtacataaaattaaagagattagattatatactgttcatttctcccaagcagc

SEQ ID NO: 48999 - DNA, 458 bp, Homo sapiens
agagaagggagcaatataagccctgcgcagaaagagtttcaagtatcatcatgaatcacacttacactttggtttacttgaccaaaacaataacataatgttctactaaaatcctcggaagcacaaacatattctcaaattattggtttcttatgaatggagttataagcagagtctggctatcagagcatgtttatacatctccatagggcttaggggaaggacaactgtctaaaggttttagtgtattttaaatctatttagaggtaaatcaaaagattttgaaatgttttgaatggcaatgcttaattctgggagtttgggtataatgttgctcacgtacaaaatgaggtcccttaaaggcagaaacatttctgaagaagaggtagatctcctctgtctacagaataacccatctaggctacttaaaccataagcgttgtaggctctgaagagga

SEQ ID NO: 49000 - DNA, 583 bp, Homo sapiens
gccatctctactaaaaatacaaaacattagccaggcttggtcatgggcacctgtaatcccagctacttggtacgctgaggcaggagaattgcttgaacccgggaggcagaggttgcaatgagccgagatggcgccgtcgcactccatcctgggcaacaaagtgaaactccatcccaaaagaaagagtatcagcgataaaggcaaagctctttccagaaaaaaatggttttatggcctaagttctaaacaatctccgtggttactgttggattttatgtagtaagtatatgtaagcttcaaattcatcacatctttattatttatcctttcataaatattgtgttctacattgacattaatctggagaactcccggttatgcacttggccccaacatgcacagactcaggggcgtgttcttgttgcaagagtaagtgtgcgatggttcagatcccttggacgtccttatgtctccaacctcagtgggcacttattacctgcttctggcatgttaaacagtaggatttgaaacaaaaaatggataggcgtagtgggtttgtaccaaacaaaaaaccagaacttga

SEQ ID NO: 49001 - DNA, 410 bp, Homo sapiens
aaaaggatttgtacaccgaatgacttcaggatttctggtgtgttgtgagaaatatggtataaacactgtactatcactcttagcattcaaataaaatggatttcagcagggcgtggtgtctcacacctgtaatcccagcactttgggtggttgaggcagatcacttcagcccattagttcaagagcagcctgggcaacatagtgagaccatctgttgaaaaaaaaaatagccaggcatggtggcatgcacctgtagtcccagctattcaggaagctgaagcaggaagatcacttgagcccaggaggttgaggctgcagttagctgtgattgcatcacgctgtgattgcatcacactgcgttccagcgacagaatgagaccctgtctcaaaaaataaaataaaatacaatg

SEQ ID NO: 49002 - DNA, 296 bp, Homo sapiens
gaaaactctcctaaaccattactatacctcctttccttagccttacatttacttctcttctgcttagaacccttgttttgcccactagtaatatagggtgagatggatggtagagttcctctaagagttgggaataggagggaagttcctgtatctcttaactcacatttagtctccttatctacctgcaaagctgtcatgctcatcttcaccacaaagtctttttttctgattttttttttttttgagacaggatttggctctgtgactcaggctgtagtgcagtggtgtgatca

SEQ ID NO: 49003 - DNA, 225 bp, Homo sapiens
gtgttatttcctcctatcccaggccttctcaaatacctcccttgactgtgccttatacattgtctgttataattacctttcttgagaatcatagtatttggttggcttttctccagtgaatagaattaacctagtgcaagcagtttttcaaagcatataatgagccttttaaaacttgaattttcatgacaaagtttattttgttgaaatataaaagaaaggcaa

SEQ ID NO: 49004 - DNA, 895 bp, Homo sapiens
gcggtggtgtcccgaaggcctcactgtttctgtcgcgtggcccgctcagctgggcttggctgggctcagctctccgctcccgccgttaccaggacgaccgtctccccgcagcccaggctgcccggactggcgccatgagctcccccgacaaggtgtccgtttgtggggccggtttcgacctggagggtggcaaaaaggctggctcccgcacggccagccccggagccccaggggcccacagccacggcctcgatttgggggtgccgggcagcggcgatggcaagagcgagagcgggttcacagatccagagggcttcagcttcgagtctgagagcgaattgatagagcaaggaagggtggtgctctggggccgggaaggccggccaggcaccccggtggatgaccaaggggacgttgtggactactcattctacctggctgacgaaccagccgccatcgtgccgccgcccagcgtccagggacacccgttcccagaaggtgccgctgccgaagggtcggctgagaattgggcagatgcggaggtcggtcccagtgggagagacgtgctgggccacagccctggaaaatggcagcaggcctctgccggccgtctccacctctgcggtcctgggccagtgcgggcctggaagaacccggaaaggggctcgaagagcagatggagcctccgcgtggatccccagcagccctctgcgaaaggccccaccaggctgcctacccacgactctgattccgcagatgagagcagcgacttaccactgatgaaggtaggcatttgccgcaacgaaggaagccaggccaagcccggcagccccaagaagcgagcagacacatccagacaggcaagcttccactgcaaggagagttacctgcctgt

SEQ ID NO: 49005 - DNA, 371 bp, Homo sapiens
ccccgctgagctctggtgagacaacaggaacgcagtcgaggaactttctgcatgacgcctgcctgtaaccaccttgcccccacaactgcagagttctggagcctgcagcgccgagtgttaggaaattctcacagcacaggaagggtgctaattggccacacttgtgcttagtttgttgttgttatcggatgacagttatctttctcttctgccaaacacatatgcaataaactgaaacaaggttcaattcccatggtatattctgaagctaaaatctagatagtgtaaatagttgcccttaggtgtaactccaactaagttaaattaagaactcaatgatagggctgggtgcagtgtctcactcctgtaat

SEQ ID NO: 49006 - DNA, 336 bp, Homo sapiens
aggccatcccacctgggctaatttaaaaaagatgtttttgtagagacaggggtcttccctatgttgtccaggctggtcttgaacttctgggttcaaaggatccacctgcctcagcctcccaaagtgctgggattacatcgtggcatgagccaccatgcctggctgctaggtgagtcttaaagcttttaggacttatttccttctccccagcagtaccccatcccctttcagcatcacacagggttttctagtccagccctttggtgtcatttggagttagctgtggagtcaggagtaggtgaggggctggacagaacacctacctgtagggaacct

SEQ ID NO: 49007 - DNA, 860 bp, Homo sapiens
ggacacagtctccctctgtctcccgggctggagtgcagtggcgccatcatggcttgctacagcctcgagcttcaggactcaaacgattctcccacctttgcctcctgagtagctagggctacaggcatgtggcaccacgcgcaggcagagcactttctatctctttttcagaaaaatcccaaggaacaattgttttggattacttagtggactcagcatggaaactgcttgtgtggcccagctaggtaggggcgttcagacaaggagacctgacctggagcctctgggatgattccaagacagtcttgctctgtcaaccatgctggagtgcagtggtgcaatcttggcttctgcaagccttcgccttccaggttcaagcggttcttttgcctcagcttccggagtggctaggattacaggagacagattcctgaaattcaccccactgaaattgagtcagtaggttgggggcaagcctgggactctcgaagctcccccaggtgattctgatgatcagccagatttgggaacctttgatccagttcaccctcccacccagtgctccagcatccctgccgagaggttgactcagcttttccaagaagcattccctgacttgccttgccaaggtgggagctccacccaagtgcttcgaaaatgctgtgctcatcatcaaccccaatcttagtgtgaatcatgtattgtcatcgcctgtttaaatgtctcactcccccactagactctttgaagaaggggactgtgtcttagttaatgtattacccccaatacctgacttgtagtaaggacttcgtgtatttatcaagtgagtgagtgaataaatgaacaccactagaaatcta

SEQ ID NO: 49008 - DNA, 289 bp, Homo sapiens
ctttaatcaaagtactgtgagaagcagaaaagaaaagatcttagtaagtttgtcttagttgttgaagctaagcgagatgcagaatgtaagcaaaacaaatggtgtaggagaaaagtaccccccaaacacatgtaactgaatatccacccaatgatcactttttcttagataacttggtaatatttaacagaaatataacatttctataagaaatataatacttagttctatagacatagcaacacttacatattataacacgaacgtcagaaaacctcctttaattatg

SEQ ID NO: 49009 - DNA, 299 bp, Homo sapiens
tgggttgggtggcagcatcaacatcatagtaaaagagttgtctgtcatcggtgacttgcctgagtccagctaatagaaggcagggaaggtaggggtgaggggtacagaatctgtcatgtgtgagctgggaaggcagcccatcctggctgcctgctgctagcctctccatactccagcgtcgtaactaaacagtacttagtgtcttgcttctctgtataatggggatgtgcaaacctattttaaggtaccagaagcttaattgaaatagtacacataaagcatatgagacaaatacttgg

SEQ ID NO: 49010 - DNA, 524 bp, Homo sapiens
tgaggctctgattagccagccaactttctcttaagcctagtgagtttggggttccaagattatatttttctttcacattatattgagcgtttgctctgtgattgctgcctcaaaactagggtgcttcaaatgtaatttactcatctatcataaccagttttgcaggagtccctgacaagtgagtcgtagactctgaaaaggcaggatcaagacactgggtcttcttattgttgatttttgtttttctttttagaatcagggtctcactctgtcactcaggttggagtgcagttgcatgatcacagcctactacagccttgaactcctgggctcaggtgattctcccacctcagcctcctgagtagctaggactacagacatcacatccctggctagttggctaggtttttttcccccccgccagagatggagtcttactatgttgctcaggctcttattgttgaattttaacagctctttgtatattttggatataagtccttaactatgtatgtgatcggcaa

SEQ ID NO: 49011 - DNA, 634 bp, Homo sapiens
ctcttgactataaatgcgcatcatttgatgagatacattcagggaatctcagtatgtaacacaggtcatctgcgagtccctaaatttatgttacatctacctcctatctgtggtaaggacctacattgccatgccatacccagaaaggtgcctactgtaggaaatgcttaattgcatccccaagtggagcatttaggaggttatgtagcctatttgccaggactggccagaatctggtgtcctgagtttatatgtgccctggagttttctttgccccttgactgacaggctcatttaccaagacttcggtggcttcctgtgctggagtcattcatctttgctttgggtcccagtcctgcactgtagacagaatgtcgtggcctctatgatgatgtattcagttgtccttacctggaaggcacaagtctgattgggttttgaattccactcatgctatttctatggacatccacatccataaaacagagggcagtggtgtagtattaataaaatctgaggctgggtgcggtggctcatgcctgtaatcccagcatgggaggctgaggcggtggatcacttgaggtcaggagttcgaaaccagcctggtcaacatggcaaaaatctcatctctaat

SEQ ID NO: 49012 - DNA, 397 bp, Homo sapiens
ctcaacatgatttttttaatgtctaggtactctctctatttgttgaaaagcttattatttcacactttaaaaaaataaaatttatgtaaaacagaggaaataaatgaattctctgacatcttgtcacacagaaagacatcttttctgaaacactgttttcatgcaattattatacaaaccacctgtaacatgagatatggtgataactggaagtagcttaaataattcacaccctgtgctgttcgaaagaattctcgtctacccaagaacatgcagacttgtgctctaaaccaaacattgtcatgacaaccatattctctcaactgtaagacaaatatattttgcaagatatactatctttatgcaatgttataatctttaataaagaagcttacct

SEQ ID NO: 49013 - DNA, 291 bp, Homo sapiens
aaaagaggaagagagagtggcaatggtaccaagactagctttcattcttttcgttcttgccagggattacaatgtcacaagcctggggcaggatcttaattggaagtatgaagctaaggattatagaaaaacaggtgaactgaagaatattggagagtgtggccgatcttataagttcctctcaagaaatcaagactggaatacaaggtattcacaccctaacaggcctgctaagtactcaggaatagatgagatgtgcaaggcccaggagtctggactctcaccggtaag

SEQ ID NO: 49014 - DNA, 1443 bp, Homo sapiens
cttgccatgccccctcttcctctcatactttatcatctctgctgcctctccctccacctccatccttgctttcttctgagggtgggcaggtaggtctccctgctagatcaggctgctacatctccctggagtttttggccacctcctctcctgagctgccggtgttggggtgggtggcaggaaccgatagaacatccaaggtgaacatcggccaccctttccattagcaagggcctgcaccgggtatttggccagagttcctctgaattcacttggtctctggcagttgaccttgggttgaaaatgcagttttttgagtgggctttagagatcatgctgaggaagaaagaaaatagcgtgcacggatgtgttgctgtggttggatttcactggctgtttttcatatacctgtcttttccctgtgagagaaaacagccatgacagtaagcaggggaagctcatttgagagtaggggacgtggagggatgagggcagttctccggggcacccctgaaaatgaatttcctcctccagagccagggtgaccgggtccctcacagggccaccgtctgcaggcatcaacactcttttgggtctaaatccaattattcctcaagttcttcttggtggcttccttcactctctggccagggggagttttgcagaaatactgttctaacagcagagcatgtctgtgaccaaaccttgggcaaatacatatttaaagaaatcttattattaaaatagtcaaccttatggtttatgtagacaatctgataaacacagacaagggtaaagacagtacaaattgctccataatctcacaagctggaaattaccaacaccatttagtacttttgtgtatttcctcacagcctttttcattgcatatatgtaaatacactgtattttaaacatggttacaagcacattgaactttatatcatttttctttttcatttgacataacattatggcaaacaaaaactttaaaaaagcacatgggctttacaagtgagcatatgctttgcaaacatttctgtcagctaccagtaaccaactgcaaaaactcatattctacccaaaacagaaattgtgccagtcggggagtcctttgatcaccatgcagtaaacctcgccaaaatattgtaaatttaaacaaactaaaacccaaccacttgaaaaaatttaaagcacttaaattgctattggttcaaggaagaaataaagaatgtactgacaaatatttagaaagcattgaaaactagaatgccacatacccaaacctatgggagacagctggcactattctcatagccttaaatgcttttattattaaaaagggagagagaaaaggcaaataaactaagcattcagcctgagtgcttaggaaaaaaaaagaatataaagataaaggcagaaatcaatgaattaagaaacgga

SEQ ID NO: 49015 - DNA, 385 bp, Homo sapiens
aagggattaagtgctatatcaagaaagctggttacaaagaaagttattaatgtccattaggtgagcttaaaaagcacaagtctactgaagttcaaccagtcatcaaactgacaagtggcataaaactaaagctgaagttttgtttatgggtttgcaaaaccatctctaaatataacacactgccttgatttaaagcctctgtgtgcttacattcacaaaaagattatattgttcctacccagccctggaagaaaactgaagaggccattctatgaatgcttaagtccaaactttcttcttctggagaattttttttttttttaacagaagcttgctctgtagtccaggctggagtgcagtggcgcaatctcggttcactgcaacc

SEQ ID NO: 49016 - DNA, 434 bp, Homo sapiens
acctcactgtgctttaatttccaacttcatgtaaaataaataatacgctttgagtatttacagcaaatactcaaaaaatgttagatatttttcttagtgtgtgttattattgttcgtgcaataataagaatcataagacagaaggatgaagctgaagtagtgagacacataatgatgttaacaataaaaacaatttttgatacatttctcaaaactatctgatgggaaggatgtggtcaagtgaatccataccgatccatgttgaaaccatcaagcactgtgttgtgttgggattagatctaggagacactctatatttattcacccctcctttcttgttagtgctcagattgtcatacttgaccattaaaagtcttctaaatcatgggttttttttttttttcagaacttttgaaagaatcctgctcactgtc

SEQ ID NO: 49017 - DNA, 403 bp, Homo sapiens
ctagaaagataatccaagtagagatgtcaaataggctgttgaatttaaatcccaatgttataaatatggatgtgcccaaatgagctgagagaaaagtccacccagatcctaacagagggtttctctaagttgtcagagatttttattatcttttagtatagaattttatatttcctaaattttctataatgttgatgtgttatttttataatcaaatttaaatgttgctaacatatattcatcatagcattctttatactggtttaaaaatgggaaacaacctaaatgcataacaatgaggcaagactggttaaaagaaaatgggataggattgaaaacctttagccacctttaaaaaaatattttgagtgttactcaaaaaggaaaagttggttcagtttaa

SEQ ID NO: 49018 - DNA, 387 bp, Homo sapiens
ggagactgaggtcttctgagacagaaaaccaaccccatagcaggcctggtgtgtgccctagaatggcagaggccccacacgttgccccggctcctctggaagaccctccagcctgtctgctggattccttgtacttatgaggattgttaaaccatctcataggattcctttccagactcagcccttcacttgtggcagcatttcttactctgaggttctgggcctagaaacccagtgtccataggcaaggtctagggacagagagagtttgtagaaagtgggaatgcatcagtggaaggctaaatccaaacaggaactgagctggcctgggtggctttgtccttttgccatcttcgtaaccctttaaaggctttaagacacttcttt

SEQ ID NO: 49019 - DNA, 836 bp, Homo sapiens
  misc_feature (61)..(61): n is a, c, g, or t
  misc_feature (67)..(67): n is a, c, g, or t
  misc_feature (74)..(74): n is a, c, g, or t
  misc_feature (88)..(88): n is a, c, g, or t
  misc_feature (108)..(108): n is a, c, g, or t
  misc_feature (117)..(117): n is a, c, g, or t
  misc_feature (120)..(120): n is a, c, g, or t
  misc_feature (133)..(133): n is a, c, g, or t
  misc_feature (136)..(136): n is a, c, g, or t
  misc_feature (147)..(148): n is a, c, g, or t
  misc_feature (162)..(162): n is a, c, g, or t
  misc_feature (164)..(166): n is a, c, g, or t
  misc_feature (170)..(170): n is a, c, g, or t
  misc_feature (195)..(195): n is a, c, g, or t
  misc_feature (197)..(197): n is a, c, g, or t
  misc_feature (247)..(247): n is a, c, g, or t
  misc_feature (250)..(250): n is a, c, g, or t
  misc_feature (260)..(264): n is a, c, g, or t
  misc_feature (275)..(275): n is a, c, g, or t
  misc_feature (291)..(291): n is a, c, g, or t
  misc_feature (326)..(326): n is a, c, g, or t
  misc_feature (341)..(341): n is a, c, g, or t
  misc_feature (347)..(347): n is a, c, g, or t
  misc_feature (353)..(353): n is a, c, g, or t
  misc_feature (357)..(358): n is a, c, g, or t
  misc_feature (360)..(360): n is a, c, g, or t
  misc_feature (386)..(387): n is a, c, g, or t
  misc_feature (401)..(401): n is a, c, g, or t
  misc_feature (404)..(404): n is a, c, g, or t
  misc_feature (415)..(415): n is a, c, g, or t
  misc_feature (469)..(469): n is a, c, g, or t
  misc_feature (505)..(505): n is a, c, g, or t
  misc_feature (510)..(510): n is a, c, g, or t
  misc_feature (524)..(524): n is a, c, g, or t
  misc_feature (665)..(665): n is a, c, g, or t
  misc_feature (690)..(690): n is a, c, g, or t
  misc_feature (709)..(709): n is a, c, g, or t
  misc_feature (746)..(746): n is a, c, g, or t
  misc_feature (751)..(751): n is a, c, g, or t
  misc_feature (780)..(780): n is a, c, g, or t
ctcttattgaagatatgtctgcccaataaacaaaacatcagcagaactatcatatactggncaaaanatcaggntgataacaaaagcnacatgcaacataaaatatanacaatatanagntagacaatctgcnganttttaaaaacnntctaattttcattncnnngccnccagcacagaacgaatcggccaccncnccccaaccccaccaaggccaagcccggccgacgccggccaggcgccaacnccnggggaaaaannnnngcagcgcaagngagcgggggggggggngggggggggcggggggggggacaagcgggaggagngaaggggggggggangggagngagagngatnnanaggggaggggacaggggggggggagnnaacggggggagggnggngaaagggatgngggaagggggggggggggagggggaaaacagtagggggggggggcgcaaaaaanactcaaaacaattgagttaaaggttgcacaagagcnatgtncaggcatttacgcntatgggaagtaaaattaaaagaggatacttttttcccaaggagaatttctttaaaaccaagcacattgctaaatagcaacattatactcggtaaacaataattggcaacaaaataagtttaatattctgcccaaaccagtnccagatactgtttaataaccaaganacaaactaattttgttgtnacaagcctagaccaattttatcaaacatgtccttggntaganatccaatttcatttaacgttttgaaagcncatttgacagccagtaaagtgcttcatacagaccagttccttgtgttgcacaagtt

SEQ ID NO: 49020 - DNA, 850 bp, Homo sapiens
atttcttccactctctctttactctttttcctcctttactctctctattccctgaggcttcattgaaagatgatatagaattaacttttccaagatatatttgtttttaaaagggatttttatcaacaaaaataaaactcgaatttagaataataatctgtaccctacttctgggaagttaccagtggtggtctggcaaaaaacaaaaatactggtagacttaggataggggaggtggtttagcaagaaggtggcacaggaatatttttaaaatttaaccctgtattatttttacattttaaggcccccatccagttctgtttaacagtcctttttaccaaggcatcatttttatttgacgtgttaaacaaagaaaagttattctagctttggcatcctttaaaataaatagaattttggctttacctttgatctgcctttgagtgtgatgttatatgaagatagtaactcactatgaaaagattagttttgtctttgttctgaaaagacattcctgaagtaattcatattccttaaaatttgccactttgtataacatattcatgtcagaaattgcttttttcctttttagcgtggttctgaaatcttggatataaagcttctctgagttagataagctggaacaactgatacctcagtatcagttgttactgattacagtacattaaatacaaaaattagacaggcatggtggtgcatccttgtaatcccaacttcttgggaggctgaggcacaagaattgcttgaacctgggaggtagaggttgcaatgagccaagatcacaccactgcattccagcctcggtgacagagcaagactttgtcaaaaa

SEQ ID NO: 49021 - DNA, 340 bp, Homo sapiens
atcgtgccactgcactccagcctgggtgacagagggagactcagtctcaagaaaaaaaaaaaaaaattactatagcagtttccccctcctaagtgtagttttcctttctgagctaaccattgttttcatcgttccaatacactacattccaaaacttaaaacatacaagaacaggatatctcagaagaaccctgagaattgaagtcctttctatcttcaatctataaggactggctactccacatcaggccttgaattagggtttaccctaatgttgataacttttaaaaattcttaaatccttcatcttgaacttactattaggctaaatcttctctct

SEQ ID NO: 49022 - DNA, 1125 bp, Homo sapiens
gaaaggggaacttcagatgccggccagaaacctgagcaagaagtgacaatctgacctctaagagaagtataggaaagccctgcctaccagctataagaactcaaactggggcagaatggaaccatggcatagggtagggctgattgtccagacatgtttgtagctcccaagggcacacatagtgctgttggcagcttagtgagatttaatgctacatagtgcctataccaggcatcaggccaaggttgggaatacataattaaccgggatcattaagaaaaatttagaatatatttattatagattacaagatcagggaagtatcttttcacttagttaaaactaaatatacccgcaatagaaacagctctttaaaaaaaaaaaaaaaaaacctaaaaaagtcacttaaacggaacctgagtgattgggacatcactgtttatagttttccatttccttcacatgaagtttttaatgcacttgggcaggcttttcagtctaattcctctgttcctatttttttcttatccatcataatgattgttgaagatttccaataatgtattgaaaattgaactcctttgatagcatatacacacatgtatgtatacatgcacacacctttctgctgggtacaagtcatcattggagcagacttgcctgttacctccactctgttccccttctcggcatgctcttagacgctctttacgcaggctggtggagagaaatctttctaaatacctttggctcactttcttggacatccttaccatctcattagtcagacaaacatttgtcagacgtggtttatatctgtaaggcatggtggggaaagaatgagaagtgtaagtcatggcctctgcactctaggagtttatcatttcaggatggggaggtaaactagtgtttgcttgctgtgtgtcaggcactgttccaagctttttttttggctgcaccatctcctttgaccctacagtagccctcagtagctgccatttttttctaacttcgtaacgatgaagacatcgagacttggagaagataaccaacatcgtctgtgcttaggaagtgacagcatttgtgggtgaagctgggattctcctaatgccctctctgcctttg

SEQ ID NO: 49023 - DNA, 1280 bp, Homo sapiens
gtgaacctcagagctccatggagggggctccaggtggctggagctggcatccttgagggagcaccatgtgggggtgctgcaggaatcagtaaaactgcaaactcggttctttcactgctgagggagggaactgctactgcctgggtgaagcagtgggccacggtgctgctcatagaaacaagaaacagaccggaaggagtgtgtctggcctctggcccctcctggcagagcttcttgaagagcagttggcaaagcagaaatggggcttgcagagtcccccaacatctgaatgtgggggatttggagatgacaagcaataactaataaccggcccagcctctcacgagcagagggctggatatgtcagtcctgtgtctgatcactgggtcatgagagcagggactctctaaggttttcccagccctgatgttctacaagattggaattttctacatcaaaatttctaggtggcctccaaggtggaggaaaggaagaaaacagcaggctaaggggagagtgtgaaggaagagtcatcatttcactcaaaccccacagagcagccaggtgcttggtgctgtgaaggtctcctgccagagcagaaggcaagcaacctctctaacaaatctctttcctgggctacggctgtttgtttgtattaaaacgggaacatgataacagagctattagtagctccatgctcagctgtgcaaggtagggagttagagcactgaattcagtcactggagaaagaagctgaggtctcctgatggccctaggatgagggctgggctatctgtgaatagcaatgggcttaggtcgctgggtttgtcaagcagccacgggagctgctgggtcaggtgaacctgagctccccctcgatgagcaaacacaacttggaccatgtcctccactgacgcagaacccgactgcccgagccctctgtggctggggagcaatgccatggcagaaaacgcagttctgatctgagcttgctggtctggtctggagaagcaattcagagcctgtagggccctggtcgagatgagagaaggcaagcctgtgtgaagccagttctggttccagccttggaactggaagactgtgggatgttgggtaaatcatttccaacctctaggcctcagcttcctcatctgtaaaaagaggctttggagagggtggtcttcaagtttcttccagcactaacaatctaaattattctatgtaggagaaaaatcagaatttattaaacttataaaacagatacatttctatcatgctgc

SEQ ID NO: 49024 - DNA, 118 bp, Homo sapiens
taaatctgttgtgttgaatgccaagaggcttggggtgctctggaaggacagagcccgacacagtaaaagtccaagaaatattttataaattagtgaatgatgaaaaggttttcttttt

SEQ ID NO: 49025 - DNA, 346 bp, Homo sapiens
tgtgactgtcactcaggctgaaatgaaatgcagtggtgctatctcggctcactgcagcctcaacctcctgggctcaagcacaatcctcctacctcggcctcctgactagctaggactacaggtgtgcaccaccatgcccagctaatttgtgtttattttttgtagaggtgaggtctcactatgttgcccaggctagtctcaaactcctgaactcaagggatctacccccctcagcttcccaaatttctgagaaagtgtaaccaaggcctcccctcagaagtctccctggagaagcttcagttggagtgaggtggttgggggtggagatgggggcagagtttcttat

SEQ ID NO: 49026 - DNA, 321 bp, Homo sapiens
caacaacaacaacaaaaaagcacctgtaattccaccagcacttgctttaatctttgcttttcacagccaagctatttgaaagcctacttttgtctctctattcttactttctatttacaattatattttaaatgggggaaggtatagggacatgaagggagataagtttacttcacttgagttggtaaaattatgacaccgggaaattgtgatacagacacacacacacatacacacaataatgtatacctagagcagccactatagaagctgtaaaaagagataactcaaaaacaccatagataaattaaaatgaaattc

SEQ ID NO: 49027 - DNA, 1115 bp, Homo sapiens
actgtgattataagccattttaaagtaagacatttgctatttcacaccaacaagtttttataaaatacatttctatttgtatgtatttaaactgaatatccccccttatgagggggatgtgttctaagatccctagtgggtgcctgaaactgcaggggttttttctcctgtacatacatacataataaagtttataagttaggcacagtaagagattaatgacaataactaataataaaatagaaaattctaacaacatacagttcaacaatttcacaaatagaagattcattcttacagatcttagcaatctcagcatactatttttttccttgttaattccagagctttcacctattaacttaaaaggaagcattttatgacgtcttttcgacatatctgaagtgccagcatcactactcatgagctttgggggccattattcagtaaaataaaagttaccttgaacacaatcattgcaatactgcaggtcaatcttctactaagtgactaacgagcaggcagcatatagagcccagagacagaagatgcacaggccacatgggatggagcaggacagtgtgagatttcatcacgctactcagaggcggcaacgtaaaagttattgtttatttccaaaattttccatacaatatattcaaatggtggttgaccatgggtaactgaatctccagaaagggaaatcttttataagaggagccattatgattatttgtgtatttgtgtatgtgtgtttatgtttttagtttgattcttccactatctctgatttcttattacccatggcttataagaaacaccaatctcctgtatttcagcgtatctcctatatccatgcctaaaaagcaagtaatatttgaataaaagatgtattgcttttacttaaaagaatgatttcccctcctattttgctatattagaagagaatattaaaagtattaagcttaataaaaataagctatatatataattatgggacatttacaatttagaaataactaacatactttttaaactctacaattacatttttcacctctgcttttgctaaaaccagacaagattatattcaagtggccattcacattttattg

SEQ ID NO: 49028 - DNA, 680 bp, Homo sapiens
atattatgcaactttcagtattagtactctcagcaagttggactgttactacatcatagttattgttgctgtaaatattctgtggtaggtaatacactgatactgtgtttttgccaagaagtatagtttttcatttatcagctgatttgtcactgaaagcatgtgcaccatacccataaatactggatgaagtttttcagcccttactatgacccatatttcttttgcacactgattgtctttctccttaagatttgcggaacagctctctgagctcggacgtagttcacagcaacgtggctaaaccaagaagttggaatcgttggtaaatacaggacccgctatggggtctccctccagaaaatggtgaagaaaattgaaatcagccagtacgccaagtacatttgctcttttctgtggcaaaaccaagatgaagagacgagctgtggggatctggtgctgtggttctgcatgaagacagtaacggtgtcttcatccaggaaccacattgtctggacctacaataccacttcagctgtcacggtaaagtccaccatcagaagactgaagcaattgaaagaccagtagacgctcctctactctttgagacatcactagcctataataaatgggttaatttatgtaaccaaaaaaattaaaaaggtttgtggaaaaactga

SEQ ID NO: 49029 - DNA, 689 bp, Homo sapiens
cgcgggggctcccgctgcagcgacatgggcggctcggcgcggctgacctcgcgctgggggagcggcttctcccgcgacgggggctgcgcgtccgagcggggggcaggctcccgcggggccggcggctccgcccgggccggctcgcggtacggctgcggctccagccgggggggctcgcgggggtactcgggctcacgctcgggccccgggtactcggcctcgcgccgccgcaccggtgacaagctaatgaacgctactctgcgcggctccgccatccccactgttctggccctccgcttttgctcgagccggcgctcgcttctacggcgcgctgcgtgcctgcccgcccttcctcttgctctctgtcgcttttcttccctccaccaccctcagccgtctccgccggcgccacgtgatggatgctcggcttgcctccaactacccaccccccaccccaccaccaccacagtgcaactatggacatcctcagtcatgtgctctttgagtctatatgagaatttatttcggacacagacccaggcaagaaccgttggatctttaggcctgcgtacacattaagagactattctccaaaatggtcacaccagtggtgtgagggttgctgtattacctcctcttctcccatcgcattgccaccaataaatacagtttaatttctgcaaaaacat

SEQ ID NO: 49030 - DNA, 841 bp, Homo sapiens
cgcgggggctcccgctgcagcgacatgggcggctcggcgcggctgacctcgcgctgggggagcggcttctcccgcgacgggggctgcgcgtccgagcggggggcaggctcccgcggggccggcggctccgcccgggccggctcgcggtacggctgcggctccagccgggggggctcgcgggggtactcgggctcacgctcgggccccgggtactcggcctcgcgccgccgcaccggtgacaagctaatgaacgctactctgcgcggctccgccatccccactgttctggccctccgcttttgctcgagccggcgctcgcttctacggcgcgctgcgtgcctgcccgcccttcctcttgctctctgtcgcttttcttccctccaccaccctcagccgtctccgccggcgccacgatttgcggaacagctctctgagctcggacgtagttcacagcaacgtggctaaaccaagaagttggaatcgttggtaaatacaggacccgctatggggtctccctccagaaaatggtgaagaaaattgaaatcagccagtacgccaagtacatttgctcttttctgtggcaaaaccaagatgaagagacgagctgtggggatctggtgctgtggttctgcatgaagacagtaacggtgtcttcatccaggaaccacattgtctggacctacaataccacttcagctgtcacggtaaagtccaccatcagaagactgaagcaattgaaagaccagtagacgctcctctactctttgagacatcactagcctataataaatgggttaatttatgtaaccaaaaaaattaaaaaggtttgtggaaaaactga

SEQ ID NO: 49031 - DNA, 468 bp, Homo sapiens
cgcgggggctcccgctgcagcgacatgggcggctcggcgcggctgacctcgcgctgggggagcggcttctcccgcgacgggggctgcgcgtccgagcggggggcaggctcccgcggggccggcggctccgcccgggccggctcgcggtacggctgcggctccagccgggggggctcgcgggggtactcgggctcacgctcgggccccgggtactcggcctcgcgccgccgcaccggtgacaagctaatgaacgctactctgcgcggctccgccatccccactgttctggccctccgcttttgctcgagccggcgctcgcttctacggcgcgctgcgtgcctgcccgcccttcctcttgctctctgtcgcttttcttccctccaccaccctcagccgtctccgccggcgccacggtgagtgcggaccgtgtccccttccccgctactacgttctgatgggcttcaccgc

SEQ ID NO: 49032 - DNA, 488 bp, Homo sapiens
taacagcagacttccagttaaacttcgtgattgaacacatgtttttccatgttccttcctagtaagggactaaaaattttgagcaaaagactaaaaaatatataaatccacaggcataaggaagaggaagcaacatattaaagagacacaacttttggaagatgtaaaggaggaactggcagaaatgggaaagccgaatacatgtgactggagagtgttgtgtcaatgagaaacaagacagttcatactccagaacctgtttaagaattagaggcagtatgtcctgtagaaaacagtagctgaagtagaaataaagtataattaatatactcagagagatagcagaagatactgctactatgaaacatgacaagattatataaaaagaagaaataaccagagaataagcacttttataataactgaaataagcttttatatgatagaaattttcctgaaaatagagcaaaaaaaagtcaaataaatgg

SEQ ID NO: 49033 - DNA, 632 bp, Homo sapiens
  misc_feature (1)..(1): n is a, c, g, or t
  misc_feature (152)..(152): n is a, c, g, or t
  misc_feature (323)..(323): n is a, c, g, or t
  misc_feature (331)..(331): n is a, c, g, or t
  misc_feature (337)..(337): n is a, c, g, or t
  misc_feature (470)..(470): n is a, c, g, or t
  misc_feature (564)..(564): n is a, c, g, or t
nccgggtggcaggaggaagtcagcctggaattaaaatgtttggggactaagacaaattcagacaactgggaggtgagtcaagatggggcaaccatgtaatttatcacacaaatcaggtcacatttcagactgaaagggagagcttgtaatantaatatttacaccaagacaacaggcataatccagactgccctgggcacctgagtgtagataaatatccagctccacacttaggtggacaagggcagaggcaagaactagaaaagaggtgtccaacttccccagtagggccacagcctgacttgtccaccctcttcttcctngataaagntagtancaatacagattttctgttgcatagattagaatatgaggcaaaaatgaatagggtggctggagaaccagaattagggtcccctgggtggagggagttgtggccatgaaggaggaaagccacacgggggaaccanccccaggagaaaggacaaaggaccaagaggttgcagtcagcaagcgtggccctaagggagcaagtgggcactaagtatatgtaaaggtttgcangtggtaagcatttacagggaggggggtgtgttatgtgtttatatattatgtgtgtacattagtttcct

SEQ ID NO: 49034 - DNA, 348 bp, Homo sapiens
aaaatctataacattttataagtaactacattatcaaattccttagagaacagaaacttttctacttccatttctcaagaggaaagaaaacttgagtacagacttgaaaaatgagtctataaaatgagtatgatcttagagcagaatctttgaagtggtcccaggtcccagtgacaatagatttccaatgtctattacttcagtatttagaaaatagatgacaagttttgaggctttatttagtatatttaaaattaaaagaattgattaatacattatattagagaataggaatttttatagtcatcagttaaatggtatacttttggaaagcgttcataatgatat

SEQ ID NO: 49035 - DNA, 315 bp, Homo sapiens
tcggcacgaggaaattagaccaggggtcagaacatagattttagtctcctttagttcatctactaggagactaaattagataatctctaaactcccttttagttctaaaattctgtaattaaactctagcatatcatcattttagactaaaagttttcttcttcttcttctttttttttttgtttttttgagatgaccgaactcgttcatgtttgtttgcaagaactgcagttgaaccttgtttgaggcgattcataaaattgatctactcttatactttaagttttaactgtgcacctttttgctaactctgtc

SEQ ID NO: 49036 - DNA, 612 bp, Homo sapiens
aaaagagttccctaagtaagctcctactgggtgtcctccactcacatggagacagggccctgccttttaggcacttactcttccagtgtctattgcataatatgttcaggaaggatcccagattcaaagatttatagaattagagttaaaagggatagatatcttgtttgaccctgaaaaaattaaggaatatgcttgagatattcaatggcagaggctggaatagattttcccaaatctcctgatgtgaagttctgtgtttgtcaaacatgactgtgtaaaaagattaatttaaacttaatgacatgttgtattcatagaagttctttgggtttctgtggaaacctcctcttgctagcttaagcagaaatgggggatttattggaaggaagctgagatattgcaccaaactgcacaaaattgaatgaagagctgactaagcaaggctgcactgagaaggaaccagggtggtctgggctgtggtagcggcagcagcagcttgcagatctcccagcgctgatgctggctcgactcagacaggtctccactctctgctgtctgtctctggctcagacaggacactttgtgtggctgtttccttccacaaggcct

SEQ ID NO: 49037 - DNA, 329 bp, Homo sapiens
agtgctcaagcatagatgaagcagaattagaaatgcagctaggatcctggaggtatacgtctgtgctaggtgttaacccttcagttgctggtttgtgaataggaggtcccaagggatcccaggggaagggagtggtcaggaggtttgggacagcagctatttaccaggtagtactagagtatttcagtattttaatagtcaatgttataactgataacagtcaattgatacatataagcctaatattagtccttgctatagtctttattatcaatagcctccgcccttccctttctaaagccgttgctatctggcctgtccctaggaga

SEQ ID NO: 49038 - DNA, 1160 bp, Homo sapiens
agagcccaagatggaatggaaggtgaaaattaggagcgacgggacacggtacatcacaaagagacccgtgcgagaccgaatcctgaaggaacgtgccttaaagatcaaggaagagcggagtggcatgaccacagacgatgacaccatgagcgagatgaaaatggggcgctactggagcaaagaggagagaaagcagcacctggttagggccaaagagcagcgccgtcgccgtgagttcatgatgcgaagcaggttagagtgtctcaaggagagccctcagagcggcagtgagggcaagaaggagatcaatatcattgaactgagtcacaaaaagatgatgaaaaagagaaacaagaaaattttggacaactggatgacaatccaagaactgatgacccatggggccaagtctccagatggcacgagagtccataatgccttcttgtcagtgaccactgtatgaccgaatgaatggaatgcatgcgactgattttaggaggatgctaccagtttcggtagagtatgattgcctcgttcaatgtggcgtttttatatatattttgtgactctttatagtttaaattttttgtaagcaaaaaatacctggtaatttttcatttgtttttcatatactggtaccttctttttggctgagatctttcttttacttgtgatatattcatattactcgtttataaaaaatcaaaaacaaaaggaaagaaaacaaaaaaaacttgcacaaaaatactgaggagccaattaatttcctacttcaatgtatctaatgtaagtgaaaatctggatttatttctctagtttacttattttctactttaataataactcaatgccaaaatatttctatgcttgtttcttggcataatacattttaaatcaaacctgttcgtaataaatcatgtgccacatcttgtcttacacataaaagccactgcttttaacatcccattgtacatttaacacataaatggtgttaacatcccattgtacatttaacacataaatggccattgtctttgtctcagtaaagtgtaggtggacaatcttcctgtgatatgtagtgacattggtcatgtagctagataattatggtaattgtgacaattaaagagaaataaattattgattatccttcagaaaaa

SEQ ID NO: 49039 - DNA, 1304 bp, Homo sapiens
agagcccaagatggaatggaaggtgaaaattaggagcgacgggacacggtacatcacaaagagacccgtgcgagaccgaatcctgaaggaacgtgccttaaagatcaaggaagagcggagtggcatgaccacagacgatgacaccatgagcgagatgaaaatggggcgctactggagcaaagaggagagaaagcagcacctggttagggccaaagagcagcgccgtcgccgtgagttcatgatgcgaagcaggttagagtgtctcaaggagagccctcagagcggcagtgagggcaagaaggagatcaatatcattgaactgagtcacaaaaagatgatgaaaaagagaaacaagaaaattttggacaactggatgacaatccaagaactgatgacccatggggccaagtctccagatggcacgagagtccataatgccttcttgtcagtgaccactgtatgaccgaatgaatggaatgcatgcgactgattttaggaggatgctaccagtttcggtagagtatgattgcctcgttcaatgtggcgtttttatatatattttgtgactctttatagtttaaattttttgtaagcaaaaaatacctggtaatttttcatttgtttttcatatactggtaccttctttttggctgagatctttcttttacttgtgatatattcatattactcgtttataaaaaatcaaaaacaaaaggaaagaaaacaaaaaaaacttgcacaaaaatactgaggagccaattaatttcctacttcaatgtatctaatgtaagtgaaaatctggatttatttctctagtttacttattttctactttaataataactcaatgccaaaatatttctatgcttgtttcttggcataatacattttaaatcaaacctgttcgtaataaatcatgtgccacatcttgtcttacacataaaagccactgcttttaacatcccattgtacatttaacacataaatggtgttaacatcccattgtacatttaacacataaatggccattgtctttgtctcagtaaagtgtaggtggacaatcttcctgtgatatgtagtgacattggtcatgtagctagataattatggtaattgtgacaattaaagagaaataaattattgattatccttcagaaaaaaacacacaggatagaggatggtacagttttcttacttcaaccaagtaattctcaaagcatccagctatttccatttggctgttactttttgcacatagcttgcatctgtttgagacttaccatgtacatcaacccaggtctgtg

SEQ ID NO: 49040 - DNA, 294 bp, Homo sapiens
aagctaagatttgagttgcttgggtggagtaggtacaagttggtgattaccattcaggttggctgccatctgggtaggtctcccttcatggaaggccccagcagggaagctgtaatcatgtgctcagtgaaggcaaaagtcgttttgatatctttttagtaaatcattccaccaacgctgtgcaagccataaatgtggcacagattaattgagcaaaaaaagtgacttgcatacagttggcacttctgttcttattaggatcagaaagaacaattgggtgaagatcacttcagg

SEQ ID NO: 49041 - DNA, 724 bp, Homo sapiens
  misc_feature (717)..(718): n is a, c, g, or t
  misc_feature (720)..(722): n is a, c, g, or t
  misc_feature (724)..(724): n is a, c, g, or t
cttacattcactttgccacctgtaggccacaccccatccagctcccagcatcttcatcttaaaacagatcagatcatgtcactcttctctttaaacgcttctacggcctgtgcatttcccttcagatattatccaaactcatcgtcgtgaccttcaaaaccttgtggtctggcctctgttggcctccctgacctcccctcccaattctttctctgcccccggactccagtatcacagtctgtctctcagccacaatttattttgcccctagagtttgctgtgcttataacacttctttttcccatatgtcattcatttctcaagtctaagagtagcagttaccatcttagacgaccgttcccttacccctcccttagtcttgggttaagtcccagaatccttgaatttgccgttcctgatacataaatatgtaatttcttgtgtggcctgagactctctctctaaactaagggctttacaaaagcagagaccacatcattaactcagcacttaacccagagcctcacacacagcaggcaatcaataaatatttgttgactgatcaaatgttttggtgccagtgaagagttgggcttgctgctgctgtcttcagcgtaagtcttgctttttcagctgggtttctaattgagaatttagagagtgcattggtgaggattcttttgactgcaagtaacaaaataaaatggtggcaagaannannnan

SEQ ID NO: 49042 - DNA, 565 bp, Homo sapiens
cttacattcactttgccacctgtaggccacaccccatccagctcccagcatcttcatcttaaaacagatcagatcatgtcactcttctctttaaacgcttctacggcctgtgcatttcccttcagatattatccaaactcatcgtcgtgaccttcaaaaccttgtggtctggcctctgttggcctccctgacctcccctcccaattctttctctgcccccggactccagtatcacagtctgtctctcagccacaatttattttgcccctagagtttgctgtgcttataacacttctttttcccatatgtcattcatttctcaagtctaagagtagcagttaccatcttagacgaccgttcccttacccctcccttagtcttgggttaagtcccagaatccttgaatttgccgttcctgatacataaatatgtaatttcttgtgtggcctgagactctctctctaaactaagggctttacaaaagcagagaccacatcattaactcagcacttaacccagagcctcacacacagcaggcaatcaataaatatttgttgactgatca

SEQ ID NO: 49043 - DNA, 333 bp, Homo sapiens
gaaaaggatctttttcatacctgtcttctcctatgttttattcataacacatcctgtttttgtcggagagttatcagacttatggtgattaggcaccctctgcttatttggagatagagatttttgagggcaggtttaaagtttcactttcaggtaattagccattctcttaactggtctgttgctgtggttgggagatgagtatagtttgctcttttaggctgggcgcagtggctcacatctgtaatgtcatcactttgggaggccgaggtgggagaattgcttgagctcaggagtttgagacctgcctggacaacatagcaagaccttgtc

SEQ ID NO: 49044 - DNA, 704 bp, Homo sapiens
atgacgatcagcttgatggacatggccaaccaggttaacagctgaagggtcactagagaggtaacctggttggccatgacgatcagcttgatggaccaaaatacaaatgcacagtgtctctagacttcatcagagctattgcaaggacggtgaactttgacataataaaatacttgtatgatttcttgtgaaaacaagcttcaaagccatatggacactgtgacaatgactaagccaagctgtgttcatccagctacttagctggccaaggagaggagttctttggctctattggatttgtccaaacaggtgctggcccagcatggaatctgatgaaaatattctgattggtctgggtggatgtgagcagaagactatttaccagggaccctggagtatttggaagcaacgtgttaattataaacagcagggtttgagcacaatctgttctactcttaatgatgttatcttaacactgaaattgcctgaaacccatttacttaggactacattttgctctgtgaactatcccctgcgctttgaacgtgccagcagcccttgtttatatgcccattcttttcacttcctctccacaggagcctctgcagtcgcttgccaaagcagattttcctaaggccactgttttaaaagatcatagttgcaaaatataataaatacaagttctttttaaaatccaaaaaagt

SEQ ID NO: 49045 - DNA, 1937 bp, Homo sapiens
acgctgcgggtccggtttccggcgggagcgtgggccgccagactcgggagaggctgcgtcttgtgcaagggtcctgtgggctggctgcactggcctctgcggtggtgcctgccagaatgccccacttggaaaacgtggtgctttgtcgcgagtctcaagtgtccatcttgcagtccttgtttggagagagacatcatttcagctttccatccatttttatttatggacatactgctagtggaaagacctatgtaacacaaacgttgttgaaaactttagagctcccacatgtgtttgtgaattgtgttgaatgctttacattgaggctgcttttggaacaaattttaaacaaattgaatcatcttagttcttcagaggatggatgttctactgaaataacctgtgaaacatttaatgactttgttcgcttgtttaaacaagtaaccacagctgaaaatcttaaagatcagactgtatatattgttctagataaagcagagtatctaagagatatggaagcaaatcttttgcctggatttcttagattacaagaattggctgacagaaatgtgactgttctctttctcagtgaaattgtttgggaaaagtttcgtccaaatactggatgctttgagccgtttgtcttatatttccctgattacagcataggcaaccttcaaaagatcctgtcccatgatcatcctccagagtattcagctgatttctatgctgcctacattaacattcttcttggagttttctacactgtttgtcgagatttgaaagagctcagacatctggcagtacttaattttcctaaatattgtgaacccgtggttaaaggagaagcaagtgaacgtgatactcgcaaactgtggagaaatattgaacctcatttgaagaaagctatgcagactgtttatctcagggaaatatcaagttcccagtgggaaaagctacagaaagatgacacagatccggggcaactgaaaggcctctcagcgcatactcatgtggaacttccatattactctaagttcattctaattgctgcataccttgcttcatacaatccagcaagaactgacaagaggttttttcttaagcatcatggaaaaatcaagaaaaccaactttctaaaaaaacacgaaaagacaagcaatcatctccttgggccaaaaccatttccactagacagattattagcaatattatatagtatcgtggacagcagagttgctccaacagcaaatattttttcccagattacctctctagtgacccttcagctgttaaccctggttggccatgacgatcagcttgatggaccaaaatacaaatgcacagtgtctctagacttcatcagagctattgcaaggacggtgaactttgacataataaaatacttgtatgatttcttgtgaaaacaagcttcaaagccatatggacactgtgacaatgactaagccaagctgtgttcatccagctacttagctggccaaggagaggagttctttggctctattggatttgtccaaacaggtgctggcccagcatggaatctgatgaaaatattctgattggtctgggtggatgtgagcagaagactatttaccagggaccctggagtatttggaagcaacgtgttaattataaacagcagggtttgagcacaatctgttctactcttaatgatgttatcttaacactgaaattgcctgaaacccatttacttaggactacattttgctctgtgaactatcccctgcgctttgaacgtgccagcagcccttgtttatatgcccattcttttcacttcctctccacaggagcctctgcagtcgcttgccaaagcagattttcctaaggccactgttttaaaagatcatagttgcaaaatataataaatacaagttctttttaaaatccaaaaaagt

SEQ ID NO: 49046 - DNA, 1740 bp, Homo sapiens
acgctgcgggtccggtttccggcgggagcgtgggccgccagactcgggagaggctgcgtcttgtgcaagggtcctgtgggctggctgcactggcctctgcggtggtgcctgccagaatgccccacttggaaaacgtggtgctttgtcgcgagtctcaagtgtccatcttgcagtccttgtttggagagagacatcatttcagctttccatccatttttatttatggacatactgctagtggaaagacctatgtaacacaaacgttgttgaaaactttagagctcccacatgtgtttgtgaattgtgttgaatgctttacattgaggctgcttttggaacaaattttaaacaaattgaatcatcttagttcttcagaggatggatgttctactgaaataacctgtgaaacatttaatgactttgttcgcttgtttaaacaagtaaccacagctgaaaatcttaaagatcagactgtatatattgttctagataaagcagagtatctaagagatatggaagcaaatcttttgcctggatttcttagattacaagaattggctgacagaaatgtgactgttctctttctcagtgaaattgtttgggaaaagtttcgtccaaatactggatgctttgagccgtttgtcttatatttccctgattacagcataggcaaccttcaaaagatcctgtcccatgatcatcctccagagtattcagctgatttctatgctgcctacattaacattcttcttggagttttctacactgtttgtcgagatttgaaagagctcagacatctggcagtacttaattttcctaaatattgtgaacccgtggttaaaggagaagcaagtgaacgtgatactcgcaaactgtggagaaatattgaacctcatttgaagaaagctatgcagactgtttatctcagggaaatatcaagttcccagtgggaaaagctacagaaagatgacacagatccggggcaactgaaaggcctctcagcgcatactcatgtggaacttccatattactctaagttcattctaattgctgcataccttgcttcatacaatccagcaagaactgacaagaggttttttcttaagcatcatggaaaaatcaagaaaaccaactttctaaaaaaacacgaaaagacaagcaatcatctccttgggccaaaaccatttccactagacagattattagcaatattatatagtatcgtggacagcagagttgctccaacagcaaatattttttcccagattacctctctagtgacccttcagctgttaaccctggttggccatgacgatcagcttgatggaccaaaatacaaatgcacagtgtctctagacttcatcagagctattgcaaggacggtgaactttgacataataaaatacttgtatgatttcttgtgaaaacaagcttcaaagccatatggacactgtgacaatgactaagccaagctgtgttcatccagctacttagctggccaaggagaggagttctttggctctattggatttgtccaaacaggtgctggcccagcatggaatctgatgaaaatattctgattggtctgggtggatgtgagcagaagactatttaccagggaccctggagtatggccaaccagggttaacagctgaagggttactagagaggtaatctgagaaaaaatatttgctgttggagcaactctgctgtcctgatgttcctcattttcactttggg

SEQ ID NO: 49047 - DNA, 2158 bp, Homo sapiens
  misc_feature (10)..(11): n is a, c, g, or t
  misc_feature (22)..(22): n is a, c, g, or t
tatggcgggnnttcttaggggntacacccccaaatttttaaaaaaaaaaacccccttttcggggccggtaaggcgcgggagcgtgggccgccagactcgggagaggctgcgtcttgtgcaagggtcctgtgggctggctgcactggcctctgcggtggtgcctgccagaatgccccacttggaaaacgtggtgctttgtcgcgagtctcaagtgtccatcttgcagtccttgtttggagagagacatcatttcagctttccatccatttttatttatggacatactgctagtggaaagacctatgtaacacaaacgttgttgaaaactttagagggactcagacaggcacttagaatatgctgcctttaaaagtcatggatggtacaaatgccgtaagcaagacactattcataacagagatgttgtggacttttgttcttaaaggacagtaaaggagtgagagagaagtgagttagcaaatgctggtgaaactgtccccaactcccacatgtgtttgtgaattgtgttgaatgctttacattgaggctgcttttggaacaaattttaaacaaattgaatcatcttagttcttcagaggatggatgttctactgaaataacctgtgaaacatttaatgactttgttcgcttgtttaaacaagtaaccacagctgaaaatcttaaagatcagactgtatatattgttctagataaagcagagtatctaagagatatggaagcaaatcttttgcctggatttcttagattacaagaattggctgacagaaatgtgactgttctctttctcagtgaaattgtttgggaaaagtttcgtccaaatactggatgctttgagccgtttgtcttatatttccctgattacagcataggcaaccttcaaaagatcctgtcccatgatcatcctccagagtattcagctgatttctatgctgcctacattaacattcttcttggagttttctacactgtttgtcgagatttgaaagagctcagacatctggcagtacttaattttcctaaatattgtgaacccgtggttaaaggagaagcaagtgaacgtgatactcgcaaactgtggagaaatattgaacctcatttgaagaaagctatgcagactgtttatctcagggaaatatcaagttcccagtgggaaaagctacagaaagatgacacagatccggggcaactgaaaggcctctcagcgcatactcatgtggaacttccatattactctaagttcattctaattgctgcataccttgcttcatacaatccagcaagaactgacaagaggttttttcttaagcatcatggaaaaatcaagaaaaccaactttctaaaaaaacacgaaaagacaagcaatcatctccttgggccaaaaccatttccactagacagattattagcaatattatatagtatcgtggacagcagagttgctccaacagcaaatattttttcccagattacctctctagtgacccttcagctgttaaccctggttggccatgacgatcagcttgatggaccaaaatacaaatgcacagtgtctctagacttcatcagagctattgcaaggacggtgaactttgacataataaaatacttgtatgatttcttgtgaaaacaagcttcaaagccatatggacactgtgacaatgactaagccaagctgtgttcatccagctacttagctggccaaggagaggagttctttggctctattggatttgtccaaacaggtgctggcccagcatggaatctgatgaaaatattctgattggtctgggtggatgtgagcagaagactatttaccagggaccctggagtatttggaagcaacgtgttaattataaacagcagggtttgagcacaatctgttctactcttaatgatgttatcttaacactgaaattgcctgaaacccatttacttaggactacattttgctctgtgaactatcccctgcgctttgaacgtgccagcagcccttgtttatatgcccattcttttcacttcctctccacaggagcctctgcagtcgcttgccaaagcagattttcctaaggccactgttttaaaagatcatagttgcaaaatataataaatacaagttctttttaaaatccaaaaaagt

SEQ ID NO: 49048 - DNA, 1803 bp, Homo sapiens
catagctgatctccaggaggatccccagcgtactcacagtccttgtttggagagagacatcatttcagctttccatccatttttatttatggacatactgctagtggaaagacctatgtaacacaaacgttgttgaaaactttagagctcccacatgtgtttgtgaattgtgttgaatgctttacattgaggctgcttttggaacaaattttaaacaaattgaatcatcttagttcttcagaggatggatgttctactgaaataacctgtgaaacatttaatgactttgttcgcttgtttaaacaagtaaccacagctgaaaatcttaaagatcagactgtatatattgttctagataaagcagagtatctaagagatatggaagcaaatcttttgcctggatttcttagattacaagaattggctgacagaaatgtgactgttctctttctcagtgaaattgtttgggaaaagtttcgtccaaatactggatgctttgagccgtttgtcttatatttccctgattacagcataggcaaccttcaaaagatcctgtcccatgatcatcctccagagtattcagctgatttctatgctgcctacattaacattcttcttggagttttctacactgtttgtcgagatttgaaagagctcagacatctggcagtacttaattttcctaaatattgtgaacccgtggttaaaggagaagcaagtgaacgtgatactcgcaaactgtggagaaatattgaacctcatttgaagaaagctatgcagactgtttatctcagggaaatatcaagttcccagtgggaaaagctacagaaagatgacacagatccggggcaactgaaaggcctctcagcgcatactcatgtggaacttccatattactctaagttcattctaattgctgcataccttgcttcatacaatccagcaagaactgacaagaggttttttcttaagcatcatggaaaaatcaagaaaaccaactttctaaaaaaacacgaaaagacaagcaatcatctccttgggccaaaaccatttccactagacagattattagcaatattatatagtatcgtggacagcagagttgctccaacagcaaatattttttcccagattacctctctagtgacccttcagctgttaaccctggttggccatgacgatcagcttgatggaccaaaatacaaatgcacagtgtctctagacttcatcagagctattgcaaggacggtgaactttgacataataaaatacttgtatgatttcttgtgaaaacaagcttcaaagccatatggacactgtgacaatgactaagccaagctgtgttcatccagctacttagctggccaaggagaggagttctttggctctattggatttgtccaaacaggtgctggcccagcatggaatctgatgaaaatattctgattggtctgggtggatgtgagcagaagactatttaccagggaccctggagtatttggaagcaacgtgttaattataaacagcagggtttgagcacaatctgttctactcttaatgatgttatcttaacactgaaattgcctgaaacccatttacttaggactacattttgctctgtgaactatcccctgcgctttgaacgtgccagcagcccttgtttatatgcccattcttttcacttcctctccacaggagcctctgcagtcgcttgccaaagcagattttcctaaggccactgttttaaaagatcatagttgcaaaatataataaatacaagttctttttaaaatccaaaaaagt

SEQ ID NO: 49049 - DNA, 1990 bp, Homo sapiens
  misc_feature (10)..(11): n is a, c, g, or t
  misc_feature (22)..(22): n is a, c, g, or t
tatggcgggnnttcttaggggntacacccccaaatttttaaaaaaaaaaacccccttttcggggccggtaaggcgcgggagcgtgggccgccagactcgggagaggctgcgtcttgtgcaagggtcctgtgggctggctgcactggcctctgcggtggtgcctgccagaatgccccacttggaaaacgtggtgctttgtcgcgagtctcaagtgtccatcttgcagtccttgtttggagagagacatcatttcagctttccatccatttttatttatggacatactgctagtggaaagacctatgtaacacaaacgttgttgaaaactttagagctcccacatgtgtttgtgaattgtgttgaatgctttacattgaggctgcttttggaacaaattttaaacaaattgaatcatcttagttcttcagaggatggatgttctactgaaataacctgtgaaacatttaatgactttgttcgcttgtttaaacaagtaaccacagctgaaaatcttaaagatcagactgtatatattgttctagataaagcagagtatctaagagatatggaagcaaatcttttgcctggatttcttagattacaagaattggctgacagaaatgtgactgttctctttctcagtgaaattgtttgggaaaagtttcgtccaaatactggatgctttgagccgtttgtcttatatttccctgattacagcataggcaaccttcaaaagatcctgtcccatgatcatcctccagagtattcagctgatttctatgctgcctacattaacattcttcttggagttttctacactgtttgtcgagatttgaaagagctcagacatctggcagtacttaattttcctaaatattgtgaacccgtggttaaaggagaagcaagtgaacgtgatactcgcaaactgtggagaaatattgaacctcatttgaagaaagctatgcagactgtttatctcagggaaatatcaagttcccagtgggaaaagctacagaaagatgacacagatccggggcaactgaaaggcctctcagcgcatactcatgtggaacttccatattactctaagttcattctaattgctgcataccttgcttcatacaatccagcaagaactgacaagaggttttttcttaagcatcatggaaaaatcaagaaaaccaactttctaaaaaaacacgaaaagacaagcaatcatctccttgggccaaaaccatttccactagacagattattagcaatattatatagtatcgtggacagcagagttgctccaacagcaaatattttttcccagattacctctctagtgacccttcagctgttaaccctggttggccatgacgatcagcttgatggaccaaaatacaaatgcacagtgtctctagacttcatcagagctattgcaaggacggtgaactttgacataataaaatacttgtatgatttcttgtgaaaacaagcttcaaagccatatggacactgtgacaatgactaagccaagctgtgttcatccagctacttagctggccaaggagaggagttctttggctctattggatttgtccaaacaggtgctggcccagcatggaatctgatgaaaatattctgattggtctgggtggatgtgagcagaagactatttaccagggaccctggagtatttggaagcaacgtgttaattataaacagcagggtttgagcacaatctgttctactcttaatgatgttatcttaacactgaaattgcctgaaacccatttacttaggactacattttgctctgtgaactatcccctgcgctttgaacgtgccagcagcccttgtttatatgcccattcttttcacttcctctccacaggagcctctgcagtcgcttgccaaagcagattttcctaaggccactgttttaaaagatcatagttgcaaaatataataaatacaagttctttttaaaatccaaaaaagt

SEQ ID NO: 49050 - DNA, 1289 bp, Homo sapiens
acgctgcgggtccggtttccggcgggagcgtgggccgccagactcgggagaggctgcgtcttgtgcaagggtcctgtgggctggctgcactggcctctgcggtggtgcctgccagaatgccccacttggaaaacgtggtgctttgtcgcgagtctcaagtgtccatcttgcagtccttgtttggagagagacatcatttcagctttccatccatttttatttatggacatactgctagtggaaagacctatgtaacacaaacgttgttgaaaactttagagctcccacatgtgtttgtgaattgtgttgaatgctttacattgaggctgcttttggaacaaattttaaacaaattgaatcatcttagttcttcagaggatggatgttctactgaaataacctgtgaaacatttaatgactttgttcgcttgtttaaacaagtaaccacagctgaaaatcttaaagatcagactgtatatattgttctagataaagcagagtatctaagagatatggaagcaaatcttttgcctggatttcttagattacaagaattggctgacagaaatgtgactgttctctttctcagtgaaattgtttgggaaaagtttcgtccaaatactggatgctttgagccgtttgtcttatatttccctgattacagcataggcaaccttcaaaagatcctgtcccatgatcatcctccagagtattcagctgatttctatgctgcctacattaacattcttcttggagttttctacactgtttgtcgagatttgaaagagctcagacatctggcagtacttaattttcctaaatattgtgaacccgtggttaaaggagaagcaagtgaacgtgatactcgcaaactgtggagaaatattgaacctcatttgaagaaagctatgcagactgtttatctcagggaaatatcaagttcccagtgggaaaagctacagaaagatgacacagatccggggcaactgaaaggtatcagaggaagtattgagacagttaccggagatacttcttcagctaattatcaagatactaaagttaatactaaagagcattcagtcaggaaatagtgttataaaagagaatttacttttcaagctataatgctattttgattaatgatttttctttaactgaagctctaatttaatgggaggaaataaaagtttgaataccagctttctattttctaaatattggattatatcatgaaaatcaagcagtttctatttctttaaatgcttttattaaagcaatctaattatgtg

SEQ ID NO: 49051 - DNA, 1015 bp, Homo sapiens
acgctgcgggtccggtttccggcgggagcgtgggccgccagactcgggagaggctgcgtcttgtgcaagggtcctgtgggctggctgcactggcctctgcggtggtgcctgccagaatgccccacttggaaaacgtggtgctttgtcgcgagtctcaagtgtccatcttgcagtccttgtttggagagagacatcatttcagctttccatccatttttatttatggacatactgctagtggaaagacctatgtaacacaaacgttgttgaaaactttagagctcccacatgtgtttgtgaattgtgttgaatgctttacattgaggctgcttttggaacaaattttaaacaaattgaatcatcttagttcttcagaggatggatgttctactgaaataacctgtgaaacatttaatgactttgttcgcttgtttaaacaagtaaccacagctgaaaatcttaaagatcagactgtatatattgttctagataaagcagagtatctaagagatatggaagcaaatcttttgcctggatttcttagattacaagaattggctgacagaaatgtgactgttctctttctcagtgaaattgtttgggaaaagtttcgtccaaatactggatgctttgagccgtttgtcttatatttccctgattacagcataggcaaccttcaaaagatcctgtcccatgatcatcctccagagtattcagctgatttctatgctgcctacattaacattcttcttggagttttctacactgtttgtcgagatttgaaagagctcagacatctggcagtacttaattttcctaaatattgtgaacccgtggttaaaggagaagcaagtgaacgtgatactcgcaaactgtggagaaatattgaacctcatttgaagaaagctatgcagactgtttatctcagggaaatatcaaggatcaattacaaggatggcgccagttcagagctggacagggatttgcctggcagatgtcctcatggaggtatttt

SEQ ID NO: 49052 - DNA, 813 bp, Homo sapiens
gtttaatttcagctgcagagggtgttgtgaggaagctggaaaggaaggttggattagagaagcctcgagctccaggtaagcgatttggacatgcccacctttcaagaggggctgcaggcacccacaggcacaagctgaaggcagcagcttggctggcttaatactgagcaggtggtggggtaaatgcctgcccccctccctctggcctctgggccctttgcagtaatcacccagggtctggtaaagccactgagagccctactggcacctcagaatcacagtgttattgatcagggatgtgaggctgctgttgggggttgggggaggcaaatgggcaggcagttttgagaagaaccttctaataagaaatgtgagggaggttacagcagtgtgtgagaaagaccaggaagaaggagacaagtttgggggctgcttcccctaatgggatgatgcaatctgggctcatgctgccaactaattcttccacatgaaaaaaaaaaagttttttggcgggcacggtggttcacacctgtaatcccagcactttgggaggctgaggtaggtggatggcctgaggccaggagtttgagaccagcctggccaacatggtgaaacctcatctctactaaaaatacaaaaaatgagccaggtgtggtggcgcatgcctgaaatcccagctacttgggaggctgaggcggcagaattgcttgaacccgggagacagaggttgcagtgagccaagatcacaccactacactccaacctgggctacagtgagactctgtctcaaaaaaaaaaaaaaaaaaaggccgg

SEQ ID NO: 49053 - DNA, 717 bp, Homo sapiens
gtttaatttcagctgcagagggtgttgtgaggaagctggaaaggaaggttggattagagaagcctcgagctccaggtaagcgatttggacatgccccccctccctctggcctctgggccctttgcagtaatcacccagggtctggtaaagccactgagagccctactggcacctcagaatcacagtgttattgatcagggatgtgaggctgctgttgggggttgggggaggcaaatgggcaggcagttttgagaagaaccttctaataagaaatgtgagggaggttacagcagtgtgtgagaaagaccaggaagaaggagacaagtttgggggctgcttcccctaatgggatgatgcaatctgggctcatgctgccaactaattcttccacatgaaaaaaaaaaagttttttggcgggcacggtggttcacacctgtaatcccagcactttgggaggctgaggtaggtggatggcctgaggccaggagtttgagaccagcctggccaacatggtgaaacctcatctctactaaaaatacaaaaaatgagccaggtgtggtggcgcatgcctgaaatcccagctacttgggaggctgaggcggcagaattgcttgaacccgggagacagaggttgcagtgagccaagatcacaccactacactccaacctgggctacagtgagactctgtctcaaaaaaaaaaaaaaaaaaaggccgg

SEQ ID NO: 49054 - DNA, 837 bp, Homo sapiens
agaacattcagataatagtagatgctgaacttcctgtactatctttctttggctagattccactgtcttctgtgtttctgctacaagacttcttttagactctaccccaccttgctagagtcttggcttagcttctgttcttttttagagaagaaacttagggctttcctcattcctcatattctaagtgctccaacctgaataaccatctctctctctgggattgctctctggtctgggtctgccaccgcctttgcttgaactttagtatctttgactatgagttcttgcctcctttagtctggttcttccagtcttgattgtaactcacgtcatacctttaaccccccacctttaagtttaaaaaaatccttattttctgctctccaaaatataagatattctaatactaatttcagtgaaagacatagttggctactctacctttttccctgcccttgctgcttattttgctgacttatgatcactgcttgtctaaggagaaacctattgtctaatgctgattaggaaatggcatgatgtttggttgtcttacctctctgaaaataatgtttacagaccatgtggcaaaggaataaaaattacctgtggctcaaaagagagtggattgcaaaaacagccaataattcgcaaataatttgatttttcagatgtgtctttatgaatcattgatcatatgtttgacttgataattgttatgtattttagattttattctgatgaattataatacgtttaagtaaaaaggcaaatagttaaattcattcaacaaatattgcatacccactatgtgcgggatactgaattaggtgatac

SEQ ID NO: 49055 - DNA, 307 bp, Homo sapiens
ttctcaagatattttattttgaaaggtgtaacttttatctcattaaatatttgaaatttaaaaattgtcataatctaaaatatcatacctgaaattaagttaaagagaatacccaatatgcttgaaattatgtaaacctatatagttagtaatatctgctgtgagcaggtaagaactaggatattcttttcttttttattgttatattttggcaaagtatatttcatgtcatgatccattaaataagaatattgagtatttctgaaaaagtaaaatgttggtttgtggtatttcaccttatttttaa

SEQ ID NO: 49056 - DNA, 247 bp, Homo sapiens
ggaggttgcagtgagccgagatcgcgccattgcactccagcctggacaacagagcaagactgtctaaacaaaagctcaacaaactacctgccatccccaaaactaatctcacctcctaaagcattaacgacccttcctgaccaaatctaaactagcgcccagattttcttcccatatggctcagcccagctccgctgccccacaggtgtcctgtcaggatccgcttcacatttataatacctagcac

SEQ ID NO: 49057 - DNA, 3061 bp, Homo sapiens
  misc_feature (10)..(10): n is a, c, g, or t
gaggcaattnaggcgcccatttcagaagagttacagccgtgaaaattactcagcagtgcagttggctgagaagaggaaaaaagaatgagagcgctcgctgtgctgtctgtcacgctggttatggcctgcacagaagccttcttccccttcatctcgagagggaaagaactcctttggggaaagcctgaggagtctcgtgtctctagcgtcttggaggaaagcaagcgcctggtggacaccgccatgtacgccacgatgcagagaaacctcaagaaaagaggaatcctttctccagctcagcttctgtctttttccaaacttcctgagccaacaagcggagtgattgcccgagcagcagagataatggaaacatcaatacaagcgatgaaaagaaaagtcaacctgaaaactcaacaatcacagcatccaacggatgctttatcagaagatctgctgagcatcattgcaaacatgtctggatgtctcccttacatgctgcccccaaaatgcccaaacacttgcctggcgaacaaatacaggcccatcacaggagcttgcaacaacagagaccaccccagatggggcgcctccaacacggccctggcacgatggctccctccagtctatgaggacggcttcagtcagccccgaggctggaaccccggcttcttgtacaacgggttcccactgcccccggtccgggaggtgacaagacatgtcattcaagtttcaaatgaggttgtcacagatgatgaccgctattctgacctcctgatggcatggggacaatacatcgaccacgacatcgcgttcacaccacagagcaccagcaaagctgccttcgggggaggggctgactgccagatgacttgtgagaaccaaaacccatgttttcccatacaactcccggaggaggcccggccggccgcgggcaccgcctgtctgcccttctaccgctcttcggccgcctgcggcaccggggaccaaggcgcgctctttgggaacctgtccacggccaacccgcggcagcagatgaacgggttgacctcgttcctggacgcgtccaccgtgtatggcagctccccggccctagagaggcagctgcggaactggaccagtgccgaagggctgctccgcgtccacgcgcgcctccgggactccggccgcgcctacctgcccttcgtgccgccacgcgcgcctgcggcctgtgcgcccgagcccggcatccccggagagacccgcgggccctgcttcctggccggagacggccgcgccagcgaggtcccctccctgacggcactgcacacgctgtggctgcgcgagcacaaccgcctggccgcggcgctcaaggccctcaatgcgcactggagcgcggacgccgtgtaccaggaggcgcgcaaggtcgtgggcgctctgcaccagatcatcaccctgagggattacatccccaggatcctgggacccgaggccttccagcagtacgtgggtccctatgaaggctatgactccaccgccaaccccactgtgtccaacgtgttctccacagccgccttccgcttcggccatgccacgatccacccgctggtgaggaggctggacgccagcttccaggagcaccccgacctgcccgggctgtggctgcaccaggctttcttcagcccatggacattactccgtggaggtggtttggacccactaatacgaggccttcttgcaagaccagccaaactgcaggtgcaggatcagctgatgaacgaggagctgacggaaaggctctttgtgctgtccaattccagcaccttggatctggcgtccatcaacctgcagaggggccgggaccacgggctgccaggttacaatgagtggagggagttctgcggcctgcctcgcctggagacccccgctgacctgagcacagccatcgccagcaggagcgtggccgacaagatcctggacttgtacaagcatcctgacaacatcgatgtctggctgggaggcttagctgaaaacttcctccccagggctcggacagggcccctgtttgcctgtctcattgggaagcagatgaaggctctgcgggacggtgactggttttggtgggagaacagccacgtcttcacggatgcacagaggcgtgagctggagaagcactccctgtctcgggtcatctgtgacaacactggcctcaccagggtgcccatggatgccttccaagtcggcaaattccccgaagactttgagtcttgtgacagcatcactggcatgaacctggaggcctggagggaaacctttcctcaagacgacaagtgtggcttcccagagagcgtggagaatggggactttgtgcactgtgaggagtctgggaggcgcgtgctggtgtattcctgccggcacgggtatgagctccaaggccgggagcagctcacttgcacccaggaaggatgggatttccagcctcccctctgcaaagatgtgaacgagtgtgcagacggtgcccaccccccctgccacgcctctgcgaggtgcagaaacaccaaaggcggcttccagtgtctctgcgcggacccctacgagttaggagacgatgggagaacctgcgtagactccgggaggctccctcgggcgacttggatctccatgtcgctggctgctctgctgatcggaggcttcgcaggtctcacctcgacggtgatttgcaggtggacacgcactggcactaaatccacactgcccatctcggagacaggcggaggaactcccgagctgagatgcggaaagcaccaggccgtagggacctcaccgcagcgggccgcagctcaggactcggagcaggagagtgctgggatggaaggccgggatactcacaggctgccgagagccctctgagggcaaagtggcaggacactgcagaacagcttcatgttcccaaaatcaccgtacgactcttttccaaacacaggcaaatccgaaatcagcaggacgactgttttcccaacacgggtaaatctagtaccatgtcgtagttactctcaggcatggatgaataaatgttatagctgca

SEQ ID NO: 49058 - DNA, 448 bp, Homo sapiens
tgccttgccgtcgctcgtgccgtgctctctaccctccacagtcacggtgccggaccctctcccgataactggacacgtgtctcccacaggacacgcactggcactaaatccacactgcccatctcggagacaggcggaggaactcccgagctgagatgcggaaagcaccaggccgtagggacctcaccgcagcgggccgcagctcaggactcggagcaggagagtgctgggatggaaggccgggatactcacaggctgccgagagccctctgagggcaaagtggcaggacactgcagaacagcttcatgttcccaaaatcaccgtacgactcttttccaaacacaggcaaatccgaaatcagcaggacgactgttttcccaacacgggtaaatctagtaccatgtcgtagttactctcaggcatggatgaataaatgttatagctgca

SEQ ID NO: 49059 - DNA, 401 bp, Homo sapiens
  misc_feature (175)..(175): n is a, c, g, or t
  misc_feature (310)..(311): n is a, c, g, or t
  misc_feature (314)..(314): n is a, c, g, or t
  misc_feature (316)..(316): n is a, c, g, or t
  misc_feature (319)..(319): n is a, c, g, or t
  misc_feature (322)..(324): n is a, c, g, or t
gatgctgtcacaagactcaaagtcttcggggaatttgccgacttggaaggcatccatgggcaccctggtgaggccagtgttgtcacagatgacccgagacagggagtgcttctccagctcacgcctctgtgcatccgtgaagacgtggctgttctcccaccaaaaccagtcaccntcccgcagagccttcatctgcttcccaatgagacaggcaaacaggggccctgtccgagccctggggaggaagttttcagctaagcctcccagccagacatcgatgttgtcaggatgcttgtacaagtccaggtcnnggnangcnccnnntggcgatggctgtgctcagtcagcggggtctcaggcgaggcagcaccagactccctccactcagggatcctctagga

SEQ ID NO: 49060 - DNA, 3910 bp, Homo sapiens
  misc_feature (10)..(10): n is a, c, g, or t
  misc_feature (3740)..(3740): n is a, c, g, or t
  misc_feature (3789)..(3790): n is a, c, g, or t
  misc_feature (3823)..(3824): n is a, c, g, or t
gaggcaattnaggcgcccatttcagaagagttacagccgtgaaaattactcagcagtgcagttggctgagaagaggaaaaaagaatgagagcgctcgctgtgctgtctgtcacgctggttatggcctgcacagaagccttcttccccttcatctcgagagggaaagaactcctttggggaaagcctgaggagtctcgtgtctctagcgtcttggaggaaagcaagcgcctggtggacaccgccatgtacgccacgatgcagagaaacctcaagaaaagaggaatcctttctccagctcagcttctgtctttttccaaacttcctgagccaacaagcggagtgattgcccgagcagcagagataatggaaacatcaatacaagcgatgaaaagaaaagtcaacctgaaaactcaacaatcacagcatccaacggatgctttatcagaagatctgctgagcatcattgcaaacatgtctggatgtctcccttacatgctgcccccaaaatgcccaaacacttgcctggcgaacaaatacaggcccatcacaggagcttgcaacaacagagaccaccccagatggggcgcctccaacacggccctggcacgatggctccctccagtctatgaggacggcttcagtcagccccgaggctggaaccccggcttcttgtacaacgggttcccactgcccccggtccgggaggtgacaagacatgtcattcaagtttcaaatgaggttgtcacagatgatgaccgctattctgacctcctgatggcatggggacaatacatcgaccacgacatcgcgttcacaccacagagcaccagcaaagctgccttcgggggaggggctgactgccagatgacttgtgagaaccaaaacccatgttttcccatacaactcccggaggaggcccggccggccgcgggcaccgcctgtctgcccttctaccgctcttcggccgcctgcggcaccggggaccaaggcgcgctctttgggaacctgtccacggccaacccgcggcagcagatgaacgggttgacctcgttcctggacgcgtccaccgtgtatggcagctccccggccctagagaggcagctgcggaactggaccagtgccgaagggctgctccgcgtccacgcgcgcctccgggactccggccgcgcctacctgcccttcgtgccgccacgcgcgcctgcggcctgtgcgcccgagcccggcatccccggagagacccgcgggccctgcttcctggccggagacggccgcgccagcgaggtcccctccctgacggcactgcacacgctgtggctgcgcgagcacaaccgcctggccgcggcgctcaaggccctcaatgcgcactggagcgcggacgccgtgtaccaggaggcgcgcaaggtcgtgggcgctctgcaccagatcatcaccctgagggattacatccccaggatcctgggacccgaggccttccagcagtacgtgggtccctatgaaggctatgactccaccgccaaccccactgtgtccaacgtgttctccacagccgccttccgcttcggccatgccacgatccacccgctggtgaggaggctggacgccagcttccaggagcaccccgacctgcccgggctgtggctgcaccaggctttcttcagcccatggacattactccgtggaggtggtttggacccactaatacgaggccttcttgcaagaccagccaaactgcaggtgcaggatcagctgatgaacgaggagctgacggaaaggctctttgtgctgtccaattccagcaccttggatctggcgtccatcaacctgcagaggggccgggaccacgggctgccaggttacaatgagtggagggagttctgcggcctgcctcgcctggagacccccgctgacctgagcacagccatcgccagcaggagcgtggccgacaagatcctggacttgtacaagcatcctgacaacatcgatgtctggctgggaggcttagctgaaaacttcctccccagggctcggacagggcccctgtttgcctgtctcattgggaagcagatgaaggctctgcgggacggtgactggttttggtgggagaacagccacgtcttcacggatgcacagaggcgtgagctggagaagcactccctgtctcgggtcatctgtgacaacactggcctcaccagggtgcccatggatgccttccaagtcggcaaattccccgaagactttgagtcttgtgacagcatcactggcatgaacctggaggcctggagggaaacctttcctcaagacgacaagtgtggcttcccagagagcgtggagaatggggactttgtgcactgtgaggagtctgggaggcgcgtgctggtgtattcctgccggcacgggtatgagctccaaggccgggagcagctcacttgcacccaggaaggatgggatttccagcctcccctctgcaaagatgtgaacgagtgtgcagacggtgcccaccccccctgccacgcctctgcgaggtgcagaaacaccaaaggcggcttccagtgtctctgcgcggacccctacgagttaggagacgatgggagaacctgcgtagactccgggaggctccctcgggcgacttggatctccatgtcgctggctgctctgctgatcggaggcttcgcaggtctcacctcgacggtgatttgcaggtggagagtgctgggatggaaggccgggatactcacaggctgccgagagccctctgagggcaaagtggcaggacactgcagaacagcttcatgttcccaaaatcaccgtacgactcttttccaaacacaggcaaatccgaaatcagcaggacgactgttttcccaacacgggtaaatctagtaccatgtcgtagttactctcaggcatggatgaataaatgttatagctgcatttgtctggccttttcttgtaaacattgcctgatttgttccttctggggctttgccattaaaatgtatttacagattacacatctttattttgtgaaccctggaaacaccactcttgcaatcctcctgtctccaccttctggcatctctgatgccgtgctcgtctgcactctgccccggcggtccctccagcactggtttttccacaccccctgcccatcaccaggtgtccacagggcctacatctggcttccctcttctcctgggaagagcactcctggcttcctgcagggccggtgggaggaggaaagtgattctgagggagaggctggagccttaaggaccaacaaggcaaagtgacttgtctcatcctccagagattcaccaacacatgagcctcagaccccaggcttctgcctccagcagccgccctgccgcacactgctcttactcctccttataccctcactcacggggaacacagcccagtgatcccggaggaaactcactccctccctgactcaacaaggcagtctcgggggcaccgttagccacgcgaccctgtaaagctgccgtcctcatttcacatgtgaagcagctgaattccagagtgctgggtcccagcccaggcagccctcagcctcacgcaaggcaatagttaggagtccttcggcattgaaagcaaactcagacacatctgacctggagttctacctgcactaagagaagagagtggtaactaattcatggataaaacagaccatcgaggcagcactgaatgatctcacccacgaatgacaacagtggcanaggagggctatgaacattttgcttcaggatgttttatttcgctctactnntatgtagagaaagcatggtttgctttttataanntttgtgacccaaaaataccagactgttgttttccctaggtgccaggccatcctgttctgtgtgttcccaaactctttagttttgtt

SEQ ID NO: 49061 - DNA, 2259 bp, Homo sapiens
  misc_feature (2089)..(2089): n is a, c, g, or t
  misc_feature (2138)..(2139): n is a, c, g, or t
  misc_feature (2172)..(2173): n is a, c, g, or t
ttttttgagatagagtcttgctctgtcgcccagactggagtgcagtggcacaaacatagctcactgcagcttcgaccctcctgctcaagcaatcctcttgcctcagcctcttgcgtggctgggtctacaggcgctcaccaccatgcctggctaatttttaaattttttacagagatgcagcctcgctatgctgcccaggctggtgttgagcccttaggcccaagagatcctccagtctgaaactcccaaagtgctgggaccacagccacccactaaaataatagattttaaatgttctaactgccaaaaaaagatgtgaggtgatatgttaattaatttgatataatctctccacaatgtaaaggtatcaaaaccatgtttaaaacataaatatatgcagttagtatttgtcaactaaaaatacaaattttaatttaaacaaagtcacttacttgcatacaggaggggggcattgccaacatgatcggtctcccttctgaaattcagtgtgagattagatcctgtcctcggagataagcagagcccagggtcgttctgctgagagcacattcgtctttgcacctggctcccacgcatggaaccaaaaggacctggcctggaagtgaggctctttgtgaatttaaatagcttttccagccacagcaagggcagtgccagcaagtcccctgggcccctaattagtctgactgacaccaggggcaaggccaggcgttctgttcatctgtggtcgcagggacctgtgtgctcagcacggcttcttcctgaaggaccctgcctgcggattgcagatcccactctgtgagtaggaacctttgccacgtggatcctctgtggcctcctgcaaacaagcatttgtccggaagccagaaacttccctccagcatgacaagcaagaaggatggctcatctcgccagcggtcctttgtgaaaagagctcctgtccaggcccttctgtcttgtatcaagtgtgtgctgttactggagcagtcagaattcagacgttattaatgtttgttctgcatttttgcaggagagtgctgggatggaaggccgggatactcacaggctgccgagagccctctgagggcaaagtggcaggacactgcagaacagcttcatgttcccaaaatcaccgtacgactcttttccaaacacaggcaaatccgaaatcagcaggacgactgttttcccaacacgggtaaatctagtaccatgtcgtagttactctcaggcatggatgaataaatgttatagctgcatttgtctggccttttcttgtaaacattgcctgatttgttccttctggggctttgccattaaaatgtatttacagattacacatctttattttgtgaaccctggaaacaccactcttgcaatcctcctgtctccaccttctggcatctctgatgccgtgctcgtctgcactctgccccggcggtccctccagcactggtttttccacaccccctgcccatcaccaggtgtccacagggcctacatctggcttccctcttctcctgggaagagcactcctggcttcctgcagggccggtgggaggaggaaagtgattctgagggagaggctggagccttaaggaccaacaaggcaaagtgacttgtctcatcctccagagattcaccaacacatgagcctcagaccccaggcttctgcctccagcagccgccctgccgcacactgctcttactcctccttataccctcactcacggggaacacagcccagtgatcccggaggaaactcactccctccctgactcaacaaggcagtctcgggggcaccgttagccacgcgaccctgtaaagctgccgtcctcatttcacatgtgaagcagctgaattccagagtgctgggtcccagcccaggcagccctcagcctcacgcaaggcaatagttaggagtccttcggcattgaaagcaaactcagacacatctgacctggagttctacctgcactaagagaagagagtggtaactaattcatggataaaacagaccatcgaggcagcactgaatgatctcacccacgaatgacaacagtggcanaggagggctatgaacattttgcttcaggatgttttatttcgctctactnntatgtagagaaagcatggtttgctttttataanntttgtgacccaaaaataccagactgttgttttccctaggtgccaggccatcctgttctgtgtgttcccaaactctttagttttgtt

SEQ ID NO: 49062 - DNA, 1248 bp, Homo sapiens
  misc_feature (10)..(10): n is a, c, g, or t
gaggcaattnaggcgcccatttcagaagagttacagccgtgaaaattactcagcagtgcagttggctgagaagaggaaaaaagaatgagagcgctcgctgtgctgtctgtcacgctggttatggcctgcacagaagccttcttccccttcatctcgagagggaaagaactcctttggggaaagcctgaggagtctcgtgtctctagcgtcttggaggaaagcaagcgcctggtggacaccgccatgtacgccacgatgcagagaaacctcaagaaaagaggaatcctttctccagctcagcttctgtctttttccaaacttcctgagccaacaagcggagtgattgcccgagcagcagagataatggaaacatcaatacaagcgatgaaaagaaaagtcaacctgaaaactcaacaatcacagcatccaacggatgctttatcagaagatctgctgagcatcattgcaaacatgtctggatgtctcccttacatgctgcccccaaaatgcccaaacacttgcctggcgaacaaatacaggcccatcacaggagcttgcaacaacagagaccaccccagatggggcgcctccaacacggccctggcacgatggctccctccagtctatgaggacggcttcagtcagccccgaggctggaaccccggcttcttgtacaacgggttcccactgcccccggtgggtactcagaacgctactatcctggactaagattgggtcctgtgatgctgagggagggaaatagccttttactgggttcttgctcgtgctgggtgctgcgtgcaatcccttcagatcctcccagcctccctttgatgtagcaatcactgtttctgccctatggcttaggagccaaggctcagggagattgaaatctcttagtgagtggaaccctgcagatttaaattaagttttctcaaccctaacgtttctgttcctgaaaatcacttcagtgttttcagataaattcctttatccatcatgtgggctaggtacatcccaagatgattatgagttcagcaatccacttgttgatgtaaagatgactgctttactcccagaggtgaatttatttgctggacactcatagcctagtagaatctactggtctatttggtcaaaaaatgggtcattttgcctgtaatttaactactcatttcaatgaataagccagcctgtttgctcttgtgccatgttcagtgatgaaattatctagaaatacatcagtgg

SEQ ID NO: 49063 - DNA, 1755 bp, Homo sapiens
  misc_feature (10)..(10): n is a, c, g, or t
  misc_feature (1529)..(1529): n is a, c, g, or t
  misc_feature (1664)..(1665): n is a, c, g, or t
  misc_feature (1668)..(1668): n is a, c, g, or t
  misc_feature (1670)..(1670): n is a, c, g, or t
  misc_feature (1673)..(1673): n is a, c, g, or t
  misc_feature (1676)..(1678): n is a, c, g, or t
gaggcaattnaggcgcccatttcagaagagttacagccgtgaaaattactcagcagtgcagttggctgagaagaggaaaaaagaatgagagcgctcgctgtgctgtctgtcacgctggttatggcctgcacagaagccttcttccccttcatctcgagagggaaagaactcctttggggaaagcctgaggagtctcgtgtctctagcgtcttggaggaaagcaagcgcctggtggacaccgccatgtacgccacgatgcagagaaacctcaagaaaagaggaatcctttctccagctcagcttctgtctttttccaaacttcctgagccaacaagcggagtgattgcccgagcagcagagataatggaaacatcaatacaagcgatgaaaagaaaagtcaacctgaaaactcaacaatcacagcatccaacggatgctttatcagaagatctgctgagcatcattgcaaacatgtctggatgtctcccttacatgctgcccccaaaatgcccaaacacttgcctggcgaacaaatacaggcccatcacaggagcttgcaacaacagagaccaccccagatggggcgcctccaacacggccctggcacgatggctccctccagtctatgaggacggcttcagtcagccccgaggctggaaccccggcttcttgtacaacgggttcccactgcccccggtccgggaggtgacaagacatgtcattcaagtttcaaatgaggttgtcacagatgatgaccgctattctgacctcctgatggcatggggacaatacatcgaccacgacatcgcgttcacaccacagagcaccagcaaagctgccttcgggggaggggctgactgccagatgacttgtgagaaccaaaacccatgttttcccatacaactcccggaggaggcccggccggccgcgggcaccgcctgtctgcccttctaccgctcttcggccgcctgcggcaccggggaccaaggcgcgctctttgggaacctgtccacggccaacccgcggcagcagatgaacgggttgacctcgttcctggacgcgtccaccgtgtatggcagctccccggccctagagaggcagctgcggaactggaccagtgccgaagggctgctccgcgtccacgcgcgcctccgggactccggccgcgcctacctgcccttcgtgccgccacgcgcgcctgcggcctgtgcgcccgagcccggcatccccggagagacccgcgggccctgcttcctggccggagacggccgcgccagcgaggtcccctccctgacggcactgcacacgctgtggctgcgcgagcacaaccgcctggccgcggcgctcaaggccctcaatgcgcactggagcgcggacgccgtgtaccaggaggcgcgcaaggtcgtgggcgctctgcaccagatcatcaccctgagggattacatccccaggatcctgggacccgaggccttccagcagtacgtgggtccctatgaaggctatgactccaccgccaaccccagtcaccntcccgcagagccttcatctgcttcccaatgagacaggcaaacaggggccctgtccgagccctggggaggaagttttcagctaagcctcccagccagacatcgatgttgtcaggatgcttgtacaagtccaggtcnnggnangcnccnnntggcgatggctgtgctcagtcagcggggtctcaggcgaggcagcaccagactccctccactcagggatcctctagga

SEQ ID NO: 49064 - DNA, 2890 bp, Homo sapiens
  misc_feature (10)..(10): n is a, c, g, or t
gaggcaattnaggcgcccatttcagaagagttacagccgtgaaaattactcagcagtgcagttggctgagaagaggaaaaaagaatgagagcgctcgctgtgctgtctgtcacgctggttatggcctgcacagaagccttcttccccttcatctcgagagggaaagaactcctttggggaaagcctgaggagtctcgtgtctctagcgtcttggaggaaagcaagcgcctggtggacaccgccatgtacgccacgatgcagagaaacctcaagaaaagaggaatcctttctccagctcagcttctgtctttttccaaacttcctgagccaacaagcggagtgattgcccgagcagcagagataatggaaacatcaatacaagcgatgaaaagaaaagtcaacctgaaaactcaacaatcacagcatccaacggatgctttatcagaagatctgctgagcatcattgcaaacatgtctggatgtctcccttacatgctgcccccaaaatgcccaaacacttgcctggcgaacaaatacaggcccatcacaggagcttgcaacaacagagaccaccccagatggggcgcctccaacacggccctggcacgatggctccctccagtctatgaggacggcttcagtcagccccgaggctggaaccccggcttcttgtacaacgggttcccactgcccccggtccgggaggtgacaagacatgtcattcaagtttcaaatgaggttgtcacagatgatgaccgctattctgacctcctgatggcatggggacaatacatcgaccacgacatcgcgttcacaccacagagcaccagcaaagctgccttcgggggaggggctgactgccagatgacttgtgagaaccaaaacccatgttttcccatacaactcccggaggaggcccggccggccgcgggcaccgcctgtctgcccttctaccgctcttcggccgcctgcggcaccggggaccaaggcgcgctctttgggaacctgtccacggccaacccgcggcagcagatgaacgggttgacctcgttcctggacgcgtccaccgtgtatggcagctccccggccctagagaggcagctgcggaactggaccagtgccgaagggctgctccgcgtccacgcgcgcctccgggactccggccgcgcctacctgcccttcgtgccgccacgcgcgcctgcggcctgtgcgcccgagcccggcatccccggagagacccgcgggccctgcttcctggccggagacggccgcgccagcgaggtcccctccctgacggcactgcacacgctgtggctgcgcgagcacaaccgcctggccgcggcgctcaaggccctcaatgcgcactggagcgcggacgccgtgtaccaggaggcgcgcaaggtcgtgggcgctctgcaccagatcatcaccctgagggattacatccccaggatcctgggacccgaggccttccagcagtacgtgggtccctatgaaggctatgactccaccgccaaccccactgtgtccaacgtgttctccacagccgccttccgcttcggccatgccacgatccacccgctggtgaggaggctggacgccagcttccaggagcaccccgacctgcccgggctgtggctgcaccaggctttcttcagcccatggacattactccgtggaggttacaatgagtggagggagttctgcggcctgcctcgcctggagacccccgctgacctgagcacagccatcgccagcaggagcgtggccgacaagatcctggacttgtacaagcatcctgacaacatcgatgtctggctgggaggcttagctgaaaacttcctccccagggctcggacagggcccctgtttgcctgtctcattgggaagcagatgaaggctctgcgggacggtgactggttttggtgggagaacagccacgtcttcacggatgcacagaggcgtgagctggagaagcactccctgtctcgggtcatctgtgacaacactggcctcaccagggtgcccatggatgccttccaagtcggcaaattccccgaagactttgagtcttgtgacagcatcactggcatgaacctggaggcctggagggaaacctttcctcaagacgacaagtgtggcttcccagagagcgtggagaatggggactttgtgcactgtgaggagtctgggaggcgcgtgctggtgtattcctgccggcacgggtatgagctccaaggccgggagcagctcacttgcacccaggaaggatgggatttccagcctcccctctgcaaagatgtgaacgagtgtgcagacggtgcccaccccccctgccacgcctctgcgaggtgcagaaacaccaaaggcggcttccagtgtctctgcgcggacccctacgagttaggagacgatgggagaacctgcgtagactccgggaggctccctcgggcgacttggatctccatgtcgctggctgctctgctgatcggaggcttcgcaggtctcacctcgacggtgatttgcaggtggacacgcactggcactaaatccacactgcccatctcggagacaggcggaggaactcccgagctgagatgcggaaagcaccaggccgtagggacctcaccgcagcgggccgcagctcaggactcggagcaggagagtgctgggatggaaggccgggatactcacaggctgccgagagccctctgagggcaaagtggcaggacactgcagaacagcttcatgttcccaaaatcaccgtacgactcttttccaaacacaggcaaatccgaaatcagcaggacgactgttttcccaacacgggtaaatctagtaccatgtcgtagttactctcaggcatggatgaataaatgttatagctgca

SEQ ID NO: 49065 - DNA, 4040 bp, Homo sapiens
  misc_feature (10)..(10): n is a, c, g, or t
  misc_feature (3870)..(3870): n is a, c, g, or t
  misc_feature (3919)..(3920): n is a, c, g, or t
  misc_feature (3953)..(3954): n is a, c, g, or t
gaggcaattnaggcgcccatttcagaagagttacagccgtgaaaattactcagcagtgcagttggctgagaagaggaaaaaagaatgagagcgctcgctgtgctgtctgtcacgctggttatggcctgcacagaagccttcttccccttcatctcgagagggaaagaactcctttggggaaagcctgaggagtctcgtgtctctagcgtcttggaggaaagcaagcgcctggtggacaccgccatgtacgccacgatgcagagaaacctcaagaaaagaggaatcctttctccagctcagcttctgtctttttccaaacttcctgagccaacaagcggagtgattgcccgagcagcagagataatggaaacatcaatacaagcgatgaaaagaaaagtcaacctgaaaactcaacaatcacagcatccaacggatgctttatcagaagatctgctgagcatcattgcaaacatgtctggatgtctcccttacatgctgcccccaaaatgcccaaacacttgcctggcgaacaaatacaggcccatcacaggagcttgcaacaacagagaccaccccagatggggcgcctccaacacggccctggcacgatggctccctccagtctatgaggacggcttcagtcagccccgaggctggaaccccggcttcttgtacaacgggttcccactgcccccggtccgggaggtgacaagacatgtcattcaagtttcaaatgaggttgtcacagatgatgaccgctattctgacctcctgatggcatggggacaatacatcgaccacgacatcgcgttcacaccacagagcaccagcaaagctgccttcgggggaggggctgactgccagatgacttgtgagaaccaaaacccatgttttcccatacaactcccggaggaggcccggccggccgcgggcaccgcctgtctgcccttctaccgctcttcggccgcctgcggcaccggggaccaaggcgcgctctttgggaacctgtccacggccaacccgcggcagcagatgaacgggttgacctcgttcctggacgcgtccaccgtgtatggcagctccccggccctagagaggcagctgcggaactggaccagtgccgaagggctgctccgcgtccacgcgcgcctccgggactccggccgcgcctacctgcccttcgtgccgccacgcgcgcctgcggcctgtgcgcccgagcccggcatccccggagagacccgcgggccctgcttcctggccggagacggccgcgccagcgaggtcccctccctgacggcactgcacacgctgtggctgcgcgagcacaaccgcctggccgcggcgctcaaggccctcaatgcgcactggagcgcggacgccgtgtaccaggaggcgcgcaaggtcgtgggcgctctgcaccagatcatcaccctgagggattacatccccaggatcctgggacccgaggccttccagcagtacgtgggtccctatgaaggctatgactccaccgccaaccccactgtgtccaacgtgttctccacagccgccttccgcttcggccatgccacgatccacccgctggtgaggaggctggacgccagcttccaggagcaccccgacctgcccgggctgtggctgcaccaggctttcttcagcccatggacattactccgtggaggtggtttggacccactaatacgaggccttcttgcaagaccagccaaactgcaggtgcaggatcagctgatgaacgaggagctgacggaaaggctctttgtgctgtccaattccagcaccttggatctggcgtccatcaacctgcagaggggccgggaccacgggctgccaggttacaatgagtggagggagttctgcggcctgcctcgcctggagacccccgctgacctgagcacagccatcgccagcaggagcgtggccgacaagatcctggacttgtacaagcatcctgacaacatcgatgtctggctgggaggcttagctgaaaacttcctccccagggctcggacagggcccctgtttgcctgtctcattgggaagcagatgaaggctctgcgggacggtgactggttttggtgggagaacagccacgtcttcacggatgcacagaggcgtgagctggagaagcactccctgtctcgggtcatctgtgacaacactggcctcaccagggtgcccatggatgccttccaagtcggcaaattccccgaagactttgagtcttgtgacagcatcactggcatgaacctggaggcctggagggaaacctttcctcaagacgacaagtgtggcttcccagagagcgtggagaatggggactttgtgcactgtgaggagtctgggaggcgcgtgctggtgtattcctgccggcacgggtatgagctccaaggccgggagcagctcacttgcacccaggaaggatgggatttccagcctcccctctgcaaagatgtgaacgagtgtgcagacggtgcccaccccccctgccacgcctctgcgaggtgcagaaacaccaaaggcggcttccagtgtctctgcgcggacccctacgagttaggagacgatgggagaacctgcgtagactccgggaggctccctcgggcgacttggatctccatgtcgctggctgctctgctgatcggaggcttcgcaggtctcacctcgacggtgatttgcaggtggacacgcactggcactaaatccacactgcccatctcggagacaggcggaggaactcccgagctgagatgcggaaagcaccaggccgtagggacctcaccgcagcgggccgcagctcaggactcggagcaggagagtgctgggatggaaggccgggatactcacaggctgccgagagccctctgagggcaaagtggcaggacactgcagaacagcttcatgttcccaaaatcaccgtacgactcttttccaaacacaggcaaatccgaaatcagcaggacgactgttttcccaacacgggtaaatctagtaccatgtcgtagttactctcaggcatggatgaataaatgttatagctgcatttgtctggccttttcttgtaaacattgcctgatttgttccttctggggctttgccattaaaatgtatttacagattacacatctttattttgtgaaccctggaaacaccactcttgcaatcctcctgtctccaccttctggcatctctgatgccgtgctcgtctgcactctgccccggcggtccctccagcactggtttttccacaccccctgcccatcaccaggtgtccacagggcctacatctggcttccctcttctcctgggaagagcactcctggcttcctgcagggccggtgggaggaggaaagtgattctgagggagaggctggagccttaaggaccaacaaggcaaagtgacttgtctcatcctccagagattcaccaacacatgagcctcagaccccaggcttctgcctccagcagccgccctgccgcacactgctcttactcctccttataccctcactcacggggaacacagcccagtgatcccggaggaaactcactccctccctgactcaacaaggcagtctcgggggcaccgttagccacgcgaccctgtaaagctgccgtcctcatttcacatgtgaagcagctgaattccagagtgctgggtcccagcccaggcagccctcagcctcacgcaaggcaatagttaggagtccttcggcattgaaagcaaactcagacacatctgacctggagttctacctgcactaagagaagagagtggtaactaattcatggataaaacagaccatcgaggcagcactgaatgatctcacccacgaatgacaacagtggcanaggagggctatgaacattttgcttcaggatgttttatttcgctctactnntatgtagagaaagcatggtttgctttttataanntttgtgacccaaaaataccagactgttgttttccctaggtgccaggccatcctgttctgtgtgttcccaaactctttagttttgtt

SEQ ID NO: 49066 - DNA, 1794 bp, Homo sapiens
  misc_feature (1624)..(1624): n is a, c, g, or t
  misc_feature (1673)..(1674): n is a, c, g, or t
  misc_feature (1707)..(1708): n is a, c, g, or t
tggttttcttttctcgtagtttgactacatgtcaacctgtccacatttcatagacgacaagtgtggcttcccagagagcgtggagaatggggactttgtgcactgtgaggagtctgggaggcgcgtgctggtgtattcctgccggcacgggtatgagctccaaggccgggagcagctcacttgcacccaggaaggatgggatttccagcctcccctctgcaaagatgtgaacgagtgtgcagacggtgcccaccccccctgccacgcctctgcgaggtgcagaaacaccaaaggcggcttccagtgtctctgcgcggacccctacgagttaggagacgatgggagaacctgcgtagactccgggaggctccctcgggcgacttggatctccatgtcgctggctgctctgctgatcggaggcttcgcaggtctcacctcgacggtgatttgcaggtggacacgcactggcactaaatccacactgcccatctcggagacaggcggaggaactcccgagctgagatgcggaaagcaccaggccgtagggacctcaccgcagcgggccgcagctcaggactcggagcaggagagtgctgggatggaaggccgggatactcacaggctgccgagagccctctgagggcaaagtggcaggacactgcagaacagcttcatgttcccaaaatcaccgtacgactcttttccaaacacaggcaaatccgaaatcagcaggacgactgttttcccaacacgggtaaatctagtaccatgtcgtagttactctcaggcatggatgaataaatgttatagctgcatttgtctggccttttcttgtaaacattgcctgatttgttccttctggggctttgccattaaaatgtatttacagattacacatctttattttgtgaaccctggaaacaccactcttgcaatcctcctgtctccaccttctggcatctctgatgccgtgctcgtctgcactctgccccggcggtccctccagcactggtttttccacaccccctgcccatcaccaggtgtccacagggcctacatctggcttccctcttctcctgggaagagcactcctggcttcctgcagggccggtgggaggaggaaagtgattctgagggagaggctggagccttaaggaccaacaaggcaaagtgacttgtctcatcctccagagattcaccaacacatgagcctcagaccccaggcttctgcctccagcagccgccctgccgcacactgctcttactcctccttataccctcactcacggggaacacagcccagtgatcccggaggaaactcactccctccctgactcaacaaggcagtctcgggggcaccgttagccacgcgaccctgtaaagctgccgtcctcatttcacatgtgaagcagctgaattccagagtgctgggtcccagcccaggcagccctcagcctcacgcaaggcaatagttaggagtccttcggcattgaaagcaaactcagacacatctgacctggagttctacctgcactaagagaagagagtggtaactaattcatggataaaacagaccatcgaggcagcactgaatgatctcacccacgaatgacaacagtggcanaggagggctatgaacattttgcttcaggatgttttatttcgctctactnntatgtagagaaagcatggtttgctttttataanntttgtgacccaaaaataccagactgttgttttccctaggtgccaggccatcctgttctgtgtgttcccaaactctttagttttgtt

SEQ ID NO: 49067 - DNA, 1427 bp, Homo sapiens
  misc_feature (1257)..(1257): n is a, c, g, or t
  misc_feature (1306)..(1307): n is a, c, g, or t
  misc_feature (1340)..(1341): n is a, c, g, or t
tgccttgccgtcgctcgtgccgtgctctctaccctccacagtcacggtgccggaccctctcccgataactggacacgtgtctcccacaggacacgcactggcactaaatccacactgcccatctcggagacaggcggaggaactcccgagctgagatgcggaaagcaccaggccgtagggacctcaccgcagcgggccgcagctcaggactcggagcaggagagtgctgggatggaaggccgggatactcacaggctgccgagagccctctgagggcaaagtggcaggacactgcagaacagcttcatgttcccaaaatcaccgtacgactcttttccaaacacaggcaaatccgaaatcagcaggacgactgttttcccaacacgggtaaatctagtaccatgtcgtagttactctcaggcatggatgaataaatgttatagctgcatttgtctggccttttcttgtaaacattgcctgatttgttccttctggggctttgccattaaaatgtatttacagattacacatctttattttgtgaaccctggaaacaccactcttgcaatcctcctgtctccaccttctggcatctctgatgccgtgctcgtctgcactctgccccggcggtccctccagcactggtttttccacaccccctgcccatcaccaggtgtccacagggcctacatctggcttccctcttctcctgggaagagcactcctggcttcctgcagggccggtgggaggaggaaagtgattctgagggagaggctggagccttaaggaccaacaaggcaaagtgacttgtctcatcctccagagattcaccaacacatgagcctcagaccccaggcttctgcctccagcagccgccctgccgcacactgctcttactcctccttataccctcactcacggggaacacagcccagtgatcccggaggaaactcactccctccctgactcaacaaggcagtctcgggggcaccgttagccacgcgaccctgtaaagctgccgtcctcatttcacatgtgaagcagctgaattccagagtgctgggtcccagcccaggcagccctcagcctcacgcaaggcaatagttaggagtccttcggcattgaaagcaaactcagacacatctgacctggagttctacctgcactaagagaagagagtggtaactaattcatggataaaacagaccatcgaggcagcactgaatgatctcacccacgaatgacaacagtggcanaggagggctatgaacattttgcttcaggatgttttatttcgctctactnntatgtagagaaagcatggtttgctttttataanntttgtgacccaaaaataccagactgttgttttccctaggtgccaggccatcctgttctgtgtgttcccaaactctttagttttgtt

SEQ ID NO: 49068 - DNA, 1059 bp, Homo sapiens
tccagaaaagtttatgagttatagtggtcctcgctaaagaagttatttaagagttttaaactggctttgtgaaaaaattcttatattgaactgattaaacagtaagataaagtataagctatgctaaaaaaaaaaagtaccaactactatggacaaaccattacttgagcctatttggactttatattaaatttatttaaaataataaacttttaatatttcatcttgtctaaagttaaatccttacttttaatcatagttaacatattttaaaattactttggataagtgggattgatccaacccaaatcaaattgttaaatgccctcttgaatttttttgtctgttatttaattatatggtggaattaataataaaataaacttcatgtctctgattcaaggctgtctcaaaaaaaagaactgatcaaaatttcataaaaacaaaaaaaaaaaaaaaaaaaaaaaaaaaaaaaaaaaaaaaaaaaaaaaaaaagaaaaaaaaaaaaaaaaaacaaaaaaggagaaaagaaaaaaaaaaaaacaaaaaaaaaagagaaaaacacagaatcaaacaagaacatagaaacaaaagagagaaagaaaacacgaatccagggactcataatcaagacaaaccaaaggacgaagtcgccggcagcgcgcacaagaacagcaacgagcagactagatcagcaacacagaggagagcggagagcaaaacacacaacaagcgagcagacaacaactgctcacgaaccagcaacaacagggagaggagaacacaatgggcggggcaacaaccaaatagcgacacaccaaccatcaagaaacaacgaagaaacgaaagaaaaaatacaacccacagacacctcaccctatgtactgtggcgaccagcacaaaaacaccgacggctataaaacacgcagacgcgagagacaacacagacggggaagcacgagaagccccgagcgactcatcaccgagaaccaacaaagatcccagcagcagacatcaacgccaaccacgagtaacacagcgaatagaccgcaacagaca

SEQ ID NO: 49069 - DNA, 403 bp, Homo sapiens
aggaaatcgacatggctaaaatttgtaactcaagaaacagtatgaaaatattttaaaatactgagattttaaaaacaagttgttaaaattaaagtgattgccattagatattcgggagtgctggcaagaactgctttatttcataatgagcattttatactattacattgataaaacttgaaaaaagtaatgtcaggaattctattaggcattcaggtgatgcgggatgctgctgggtctatggaaccacacttgggcattacttcatgggtcattatgaggattaactgccacctggggcctgagttttgttattttgttaaccactatataactcttaaagggccctgtcgcttcataataactgttttgtgtttgtgatagacttcttcgagtcttaaga

SEQ ID NO: 49070 - DNA, 469 bp, Homo sapiens
aaaacacctgctgggttcacgcagaatataaaggtctttgaaataattcttgatctctaggccaaggagttttacattttaaaataatcaagcgtgcctactgcttgccaggccctgctctcgccttcactcgcattattcaattaatcgacacaggcctgtgcagtgcgtcttaatgacaaggactcctaccctccactgcctgtgttggaatcctggttctgccagttattagctgtgtatcctggcctaagttactctctgccacagtttctgactctgtaaaataggataatagtatctaccttataccattattctaaagataaataaatttaacatatttaggttgggcacggtagctcacacctgtaatcccagcactttgggaggccgaaggtggaaggattgtttgagcccaggagttcaagaccagcccgggtaaaatagtgaaactccccacctctcc

SEQ ID NO: 49071 - DNA, 434 bp, Homo sapiens
gaacacttggccacctctgacacagataattgctaaagtaataagaagagatggaaattaaatgtgctaagctaggagactttctaaagaaagggtttgtcatgctacgctgtgccattcatgtgtttttttgctcatgctgttccttgtgcctggaaattctccccctaattcccctgagcagtggatgcagtggataccctccccagatcccccccaacttccctgagtgttggctaccaaaagctctgagtgcacccagggagctaagtcctcctgcccacaggcaataatggactgacacggggtagacttaaagaaataagaggcacatcaatcaattgaaatgtgtgggaccttacctggactctgaattaaacaaactgtaattttttaaagctacaccttttaaacatgattggctatttgaacac

SEQ ID NO: 49072 - DNA, 171 bp, Homo sapiens
tccccccttccatctccaaagacgaccccttggcggaggtcggcgtgaaggaggtgaagaccaaggtcaacagcaccttgaccttggagtgtgagagctgggctgtgcccccgcccaccatccgctggtacaaggatggacaggtgagtttgggaccccctgcgcagcttc

SEQ ID NO: 49073 - DNA, 836 bp, Homo sapiens
tcttcacatcgttaatgtcttattcagtcactacccaaggggctgaccttcaagattctaatccatgaaagcttaaaatagtaaacaaatttgaatatagtttaacatacataataaattttatttctagaagaggaggatcagcccttagacatgaaaagtaaaaatagtttattcccagatttccctttgtgcattagtatattcaaccgagtctatccaagtaacaggacaaaaaaagctggcagttgttgctgcgctgtgaagtcttattaggtgagtcagctaattatatggcactaccataaatacagcaggcactgccctgctttgttaggcttgccaaggaaaataaggatttaaagcagcatactacctctttgctatataatgacattttcttcttaaaaatgattttgcaccaattcctgatttatccaccaattattttttaatttatggttgaatgtatttaaacctgaattcagagataaaactagtaaatagctccccaaaataacccccaaatatatttaatatattagctttactctctcctccactgccaaacctttaaaaactgaaataaattgtttttatttcatcttttctctttttctctctctctaaggtgattgccaagactaaagaaacagctagaagggcaaaagacaagaaaatcagtaagatagtaacagattatccaaagtagagcacggctcaggtgcagtggctcatgcctgtaatcccagcactttcggaggtgacgcaggaggatcacttgagtccaggagtttgagaccagcctgggcaacataatgaaacttcatctctat

SEQ ID NO: 49074 - DNA, 429 bp, Homo sapiens
ctctagcaaatgatgccaactggcaccaaattctttttgaatcttaaacatatatgcacacgtgcacacacacacacacacagagcttcggcataatttaggaaatgcataaagatgcccgtaagaaggacttggctatcatttggagtaattgcaggtctttgctcttggccttgtagcacacttgattcctggcatacacatcctagcataacatataacagtgtggcttcttcacctagtgtaggcataaatcctttgcttttcatggttttgtaaaaaggtagtaacatacctattatgctttgaaatttgattcgttatgctctgcataagtggtaaaggctgtattgctttgcactgttaattatgaacaagaaataaaacaaatttgaagatagtattctgggcatactacatgttatattg

SEQ ID NO: 49075 - DNA, 236 bp, Homo sapiens
acaaagacttatgaaacagtttgggctcaaggtctggcattatttgttaatagtcaaatatttcttaaggttatagggtagaaatgctaatttaatttatttctaagcagaatccattggaaacaagaagcttgcacagtgaatttaatagtcttctgagactttgggtcctggagttttcagcatcaacaatactaggcacaggtgtttacgaataaacaaaaatatgtgcttat

SEQ ID NO: 49076 - DNA, 906 bp, Homo sapiens
gtgtcaccagcgctgaccagtagaacttcttcctgtgatgaaaatgttctgtatctgcattgtccagtatcatagccactaacccggtgtggattttgagcagttgaaatgtggctagtgcaactgagggactgaattttaaattttatttgccaagtgagtgaggtttttctaaggttcttttgtgattttgtggccagcgctgtccagtggaacttcttgtgacgaaaatgttctgtatctgcactgtctagtatcatagctactagccccgtacgccttttgagcgcttgaaatgtggctagtgcgactgagggattgaattttaaattttatttaattttaactaacgttaaatagccacctgtagctcgtggctatcggattggacagtgtaggtctaagtctagtgtgtgggagaaaaacctagcttgcaaaaaaaaagtacaaattgtaataaaaatggaaccaaagactcagtggtaattctgtatttctccagacatgaaattcgtgctcataaatacactgatgaacttgggatggatgataaaaatggccgtaagaaatccttgtatttttaaactacttgtctgtaagactggtttattatttagtacactgaaggtgcttagtttttccatggttaatacaaaagaaaacattcttgttaactagacattaaatggattcattcattcaggtgacatttactacatgtttgctgtgcgccagttctgtagtaggttaggaatacaggcatgaaaaacaactagcagtctagaaggggagataggcaagtaggtcaacacagttcattgtaataagtaagtatttttaagtaggaatttaatttagcctttgaggaaggggagtgatagtttggaagggaaggattatcagagc

SEQ ID NO: 49077 - DNA, 264 bp, Homo sapiens
ttactcagctttccatctatggataatctaaccacaaattctcccctgatgtgcagatcttcattcaatatgtgcaaacacactttacagtctatcactttctcttctcctagaagttgtcctgcagcctcctgccaggctccaatctagactgaacgctgggttgggggagggaagaagagaggttctcactgacatctcaggatttcccttcaccatcatcttagagattcccctccaagcagctcttcttaaacaagtaac

SEQ ID NO: 49078 - DNA, 526 bp, Homo sapiens
gccaaaagacagaaatttattgactcacgtatcaagaatggcaggattgccactgggcttcagggaccagggtaacgccattagcaatatccgttatcagccttattctttcccactgagcctggctgaactacagctgccagcatttcctgggcttgcattttcccagcttcgtcacatcttaatttcaagctgaaaaatcctgggaagagacatacttcactgaagtcatttctctattctactcattgtagccaggcaaaatgagattaggattagctcagccagagttaggtgactatccttgcctaatcattctgcatatagatgatttatatttggaccctgtgtcagacttggagagaggagggtcatttcccaaaaaaggggagtaacagtccagaagaattaggattccacaaaaatatcttacggatacatctctctctatatttatctatattaatatatatcttgtaggtatatatagtcatgtttggcttaatgacaaggatatattctgaga

SEQ ID NO: 49079 - DNA, 1222 bp, Homo sapiens
atcagtcatatttaattactaagatattaaagaaaacttgagttttattctattggtaatattacattagggttttgtttttactttttgagacagttactgtcacctgagctggagtgcagtggtgccatcatggctgactgcagctttgacctggctcaagcgatgctcctacctcagcctcccaagtagctgggaccacaggcatgggccaccatgctggcttaattaacaaaatttttttttgtagagacggggtctcaccatgctgcccaggctgacattagtcattcttaagcttctcagttaaattacattatgaaacactttgttttcagaccatgtaaaatacctttcaactgagctctgagttcatcagttaacttctctactctttttaagggagtaagaatagtagagataactttttttcataactttttttttgtttgttttgttttgttttgagatggagtctcgctctgtcgcccaggctggaatgcagtggcacgatctcaggtcactgcaacctctgcctcccgggttcaagctattctcctgcctcaacctcctgagtagcagggattacaagcacctgccaccacgcccggctaatttttttatttttagtacagtcagggtttcgccatgttggccaggctggtctcaaactcctgacctcaagtgatccacctcagcctcccaaagtgctgggattacaggcgtgagccaccgcactgggccagagagaacttttttagtaaacatctattgggcactgagttagtcataaatgtggagacacaggtgtgaagtcacattgataaaatattagtgatatgataaagggacaacaattagggaacggactctttctggacaggaggcaaggaagagtgtgagatgtagggagacttggtagttgcaagcacaggaactggtatgaaaatacgtgcgccagagagagttaagtatgcttggtgtgtagagtatgaggtttagagatgatactgatgtaggaaggggtccagtcatataaaagtctgtgctccatgctgattttcttcaaagaaatgttgaaaggctttaaaatagtgacaatgagctatatatcctgaaggataagtctcatatcggtagaaaatggaaggaaatgacggtagggatgggaattgaatagttaaaatattccgcatataagatgatgtgtaagatgctgctg

SEQ ID NO: 49080 - DNA, 763 bp, Homo sapiens
  misc_feature (635)..(635): n is a, c, g, or t
  misc_feature (686)..(686): n is a, c, g, or t
  misc_feature (698)..(698): n is a, c, g, or t
  misc_feature (739)..(739): n is a, c, g, or t
atcagtcatatttaattactaagatattaaagaaaacttgagttttattctattggtaatattacattagggttttgtttttactttttgagacagttactgtcacctgagctggagtgcagtggtgccatcatggctgactgcagctttgacctggctcaagcgatgctcctacctcagcctcccaagtagctgggaccacaggcatgggccaccatgctggcttaattaacaaaatttttttttgtagagacggggtctcaccatgctgcccaggctgacattagtcattcttaagcttctcagttaaattacattatgaaacactttgttttcagaccatgtaaaatacctttcaactgagctctgagttcatcagttaacttctctactctttttaagggagtaagaatagtagagataactttttttcataactttttttttgtttgttttgttttgttttgagatggagtctcgctctgtcgcccaggctggaatgcagtggcacgatctcaggtcactgcaacctctgcctcccgggttcaagctattctcctgcctcaacctcctgagtagcagggattacaagcacctgccaccacgcccggctaatttttttatttttagtacancctggccaacgcagtgagaacctatctctacaaaaaaaatttaaaatttanccaggtgcagtntcacatgcctgtggtcacagctacttgggagctgcttgagnggatcatttgagcccaggagttga

SEQ ID NO: 49081 - DNA, 332 bp, Homo sapiens
aaaatctgacaagtgggaaaacatcctcagctcttcctgcccctgtttagggttacctttctgctaccctgtgtctaatagaaatgacatgacctgtcaagtaaggagatcatggttttcacctggcaaagtccatgccgaggtggctccaccctttggccatgatgcagatttcagtagtcaggttgctatcatgtagcccttagcagggagagactcttacaggctggaagcccagaccagatgcacaggtcgggatatcaggtcccatgagctgaattttccctccagaatagacagcaacaagtccagcaggtccacaatgcaggcat

SEQ ID NO: 49082 - DNA, 503 bp, Homo sapiens
tatctgacagtctggaagggtggcagatgaatgctatgagagggcccccttttctacagcatgcttagcttcctccccgatgtatgctttgatttggccttagaaagtgaaggcatgtggttgtaaaggaagcggaagcttaagaaattggtatcatttatcctggagaataagggccatagaaaatcttactaatggtatccttagtgccccagtggatttcctcccacccaagaatggaatacatacaaatccatggtagggctgtctggaaaacctaggctaccttattgcaatggtatcatcactgtatcacacacttggctcacaaggagacgtcttatttcaataagaagctttgactgcccacttcatgtcaggcaaataatatggacaggacacagttccttgcgtcaaggagctcatagtcaggcaacaatggcttcacatggatagaggcatttaaaccaggccttgaaaagttaggaagtggtaaaaaaaaa

SEQ ID NO: 49083 - DNA, 262 bp, Homo sapiens
tgaaaaggggattcactgcagttagtagacacacacaaaaccaagtagaaatgggatacaataaaataacaaattagctgaatgttccaaatgagagcttattgcatactctgggcggcaagccacccaggtgttaagggaagagaccaagggcacaagctgttttagtataataaagaaaatatatagaataaaaatagttatactaaaaataaattataattatatataaatattaatcattagtttgtagcattactct

SEQ ID NO: 49084 - DNA, 2229 bp, Homo sapiens
agggcccagaaacatgtgaggaacagcagctcagaagggtctccagactgatgggccggtgatcctatattcttgttgggctgacaactcttctggtttcgggctccaggtgctggcaagaaatctcagagagttggccaccctgttcaagggcttaggagaaagtcaacacacttcgcaacttgaattggtcccagctgctcccagaagaacgggcgggttggtccctatgccacccctggagagctactcgccgcccactttgccgtgaagggctgtgcggttcccgtgcgcgccggagcctgctgtggcctcttatgcactccaccacccccatcagctccctcttctccttcaccagccccgcagtgaagagactgctaggctggaagcaaggagatgaagaggaaaagtgggcagagaaggcagtggactctctagtgaagaagttaaagaagaagaagggagccatggacgagctggagagggctctcagctgcccggggcagcccagcaaatgcgtcacgattccccgctccctggacgggcggctgcaggtgtcccaccgcaagggcctgccccatgtgatttactgtcgcgtgtggcgctggccggatctgcagtcccaccacgagctgaagccgctggagtgctgtgagttcccatttggctccaagcagaaagaagtgtgcattaacccttaccactaccgccgggtggagactccagtactgcctcctgtgctcgtgccaagacacagtgaatataacccccagctcagcctcctggccaagttccgcagcgcctccctgcacagtgagccactcatgccacacaacgccacctatcctgactctttccagcagcctccgtgctctgcactccctccctcacccagccacgcgttctcccagtccccgtgcacggccagctaccctcactccccaggaagtccttctgagccagagagtccctatcaacactcagactttcgaccagtttgttacgaggagccccagcactggtgctcggtcgcctactatgaactgaacaaccgagttggggagacattccaggcttcctcccgaagtgtgctcatagatgggttcaccgacccttcaaataacaggaacagattctgtcttggacttctttctaatgtaaacagaaactcaacgatagaaaataccaggagacatataggaaagggtgtgcacttgtactacgtcgggggagaggtgtatgccgagtgcgtgagtgacagcagcatctttgtgcagagccggaactgcaactatcaacacggcttccacccagctaccgtctgcaagatccccagcggctgcagcctcaaggtcttcaacaaccagctcttcgctcagctcctggcccagtcagttcaccacggctttgaagtcgtgtatgaactgaccaagatgtgtactatccggatgagttttgttaagggttggggtgctgagtatcatcgccaggatgtcaccagcaccccctgctggattgagattcatcttcatgggccactgcagtggctggacaaagttctgactcagatgggctctccacataaccccatttcttcagtgtcttaacagtcatgtcttaagctgcatttccataggatagaggctattgcagggagtggcttgtatcatttcagatttgcaactgaagtttctaaaaacatgtgtaaatacatagaatgtatactgttcttattttttttaatcaccgtttgttttgtgctttctagttaacctgatgccagtacagtgcaattggaaaagcaggactttggtgcctgtgctataagcagcagattttgtgggaggaaacacttgagaggcgatattgtcaacagtatttgaagggtgttagcagaataaaagacagctttagtcagccgtgtcattataaagcatgttgtgtggcctcacagaaacattgaaactgtttatacagcaaaagtcaggtattagcagcactaaagcaaatatcactcagatgaaacaaagcagtgaaacccctacagtttaaatgatgtcacttttagtgctgttggcaagaaaaaaaaaaacaacaaacttgtacaatgaattaatgagataggccatagaaactttatttctaaggttgacatacctatagctgggctcctgtgctcatattcagtggtacattttaaacaaactgtgatcggaaaaaaaaaaa

SEQ ID NO: 49085 - DNA, 2130 bp, Homo sapiens
gctcataaatgacattaaaaacaaaaaaaaaatctggatgcagtggctcattcctatagtcccagcactttgggaggccaaggcgggaggatcatctgagcccaggagtttggggctgtagtgaactatgctccctcttctccttcaccagccccgcagtgaagagactgctaggctggaagcaaggagatgaagaggaaaagtgggcagagaaggcagtggactctctagtgaagaagttaaagaagaagaagggagccatggacgagctggagagggctctcagctgcccggggcagcccagcaaatgcgtcacgattccccgctccctggacgggcggctgcaggtgtcccaccgcaagggcctgccccatgtgatttactgtcgcgtgtggcgctggccggatctgcagtcccaccacgagctgaagccgctggagtgctgtgagttcccatttggctccaagcagaaagaagtgtgcattaacccttaccactaccgccgggtggagactccagtactgcctcctgtgctcgtgccaagacacagtgaatataacccccagctcagcctcctggccaagttccgcagcgcctccctgcacagtgagccactcatgccacacaacgccacctatcctgactctttccagcagcctccgtgctctgcactccctccctcacccagccacgcgttctcccagtccccgtgcacggccagctaccctcactccccaggaagtccttctgagccagagagtccctatcaacactcagttgacacaccacccctgccttatcatgccacagaagcctctgagacccagagtggccaacctgtagatgccacagctgatagacatgtagtgctatcgataccaaatggagactttcgaccagtttgttacgaggagccccagcactggtgctcggtcgcctactatgaactgaacaaccgagttggggagacattccaggcttcctcccgaagtgtgctcatagatgggttcaccgacccttcaaataacaggaacagattctgtcttggacttctttctaatgtaaacagaaactcaacgatagaaaataccaggagacatataggaaagggtgtgcacttgtactacgtcgggggagaggtgtatgccgagtgcgtgagtgacagcagcatctttgtgcagagccggaactgcaactatcaacacggcttccacccagctaccgtctgcaagatccccagcggctgcagcctcaaggtcttcaacaaccagctcttcgctcagctcctggcccagtcagttcaccacggctttgaagtcgtgtatgaactgaccaagatgtgtactatccggatgagttttgttaagggttggggtgctgagtatcatcgccaggatgtcaccagcaccccctgctggattgagattcatcttcatgggccactgcagtggctggacaaagttctgactcagatgggctctccacataaccccatttcttcagtgtcttaacagtcatgtcttaagctgcatttccataggatagaggctattgcagggagtggcttgtatcatttcagatttgcaactgaagtttctaaaaacatgtgtaaatacatagaatgtatactgttcttattttttttaatcaccgtttgttttgtgctttctagttaacctgatgccagtacagtgcaattggaaaagcaggactttggtgcctgtgctataagcagcagattttgtgggaggaaacacttgagaggcgatattgtcaacagtatttgaagggtgttagcagaataaaagacagctttagtcagccgtgtcattataaagcatgttgtgtggcctcacagaaacattgaaactgtttatacagcaaaagtcaggtattagcagcactaaagcaaatatcactcagatgaaacaaagcagtgaaacccctacagtttaaatgatgtcacttttagtgctgttggcaagaaaaaaaaaaacaacaaacttgtacaatgaattaatgagataggccatagaaactttatttctaaggttgacatacctatagctgggctcctgtgctcatattcagtggtacattttaaacaaactgtgatcggaaaaaaaaaaa

SEQ ID NO: 49086 - DNA, 2220 bp, Homo sapiens
agcggagtctgactgacgccggctggggccgccgccgccgccgccgccgctgctgcagccgctgtctcggtccccgccgccgccgccgggccctgcaggcgctgggcgcgcgcagccaggcaagttggccaccctgttcaagggcttaggagaaagtcaacacacttcgcaacttgaattggtcccagctgctcccagaagaacgggcgggttggtccctatgccacccctggagagctactcgccgcccactttgccgtgaagggctgtgcggttcccgtgcgcgccggagcctgctgtggcctcttatgcactccaccacccccatcagctccctcttctccttcaccagccccgcagtgaagagactgctaggctggaagcaaggagatgaagaggaaaagtgggcagagaaggcagtggactctctagtgaagaagttaaagaagaagaagggagccatggacgagctggagagggctctcagctgcccggggcagcccagcaaatgcgtcacgattccccgctccctggacgggcggctgcaggtgtcccaccgcaagggcctgccccatgtgatttactgtcgcgtgtggcgctggccggatctgcagtcccaccacgagctgaagccgctggagtgctgtgagttcccatttggctccaagcagaaagaagtgtgcattaacccttaccactaccgccgggtggagactccagtactgcctcctgtgctcgtgccaagacacagtgaatataacccccagctcagcctcctggccaagttccgcagcgcctccctgcacagtgagccactcatgccacacaacgccacctatcctgactctttccagcagcctccgtgctctgcactccctccctcacccagccacgcgttctcccagtccccgtgcacggccagctaccctcactccccaggaagtccttctgagccagagagtccctatcaacactcagactttcgaccagtttgttacgaggagccccagcactggtgctcggtcgcctactatgaactgaacaaccgagttggggagacattccaggcttcctcccgaagtgtgctcatagatgggttcaccgacccttcaaataacaggaacagattctgtcttggacttctttctaatgtaaacagaaactcaacgatagaaaataccaggagacatataggaaagggtgtgcacttgtactacgtcgggggagaggtgtatgccgagtgcgtgagtgacagcagcatctttgtgcagagccggaactgcaactatcaacacggcttccacccagctaccgtctgcaagatccccagcggctgcagcctcaaggtcttcaacaaccagctcttcgctcagctcctggcccagtcagttcaccacggctttgaagtcgtgtatgaactgaccaagatgtgtactatccggatgagttttgttaagggttggggtgctgagtatcatcgccaggatgtcaccagcaccccctgctggattgagattcatcttcatgggccactgcagtggctggacaaagttctgactcagatgggctctccacataaccccatttcttcagtgtcttaacagtcatgtcttaagctgcatttccataggatagaggctattgcagggagtggcttgtatcatttcagatttgcaactgaagtttctaaaaacatgtgtaaatacatagaatgtatactgttcttattttttttaatcaccgtttgttttgtgctttctagttaacctgatgccagtacagtgcaattggaaaagcaggactttggtgcctgtgctataagcagcagattttgtgggaggaaacacttgagaggcgatattgtcaacagtatttgaagggtgttagcagaataaaagacagctttagtcagccgtgtcattataaagcatgttgtgtggcctcacagaaacattgaaactgtttatacagcaaaagtcaggtattagcagcactaaagcaaatatcactcagatgaaacaaagcagtgaaacccctacagtttaaatgatgtcacttttagtgctgttggcaagaaaaaaaaaaacaacaaacttgtacaatgaattaatgagataggccatagaaactttatttctaaggttgacatacctatagctgggctcctgtgctcatattcagtggtacattttaaacaaactgtgatcggaaaaaaaaaaa

SEQ ID NO: 49087 - DNA, 2331 bp, Homo sapiens
agcggagtctgactgacgccggctggggccgccgccgccgccgccgccgctgctgcagccgctgtctcggtccccgccgccgccgccgggccctgcaggcgctgggcgcgcgcagccaggcaagttggccaccctgttcaagggcttaggagaaagtcaacacacttcgcaacttgaattggtcccagctgctcccagaagaacgggcgggttggtccctatgccacccctggagagctactcgccgcccactttgccgtgaagggctgtgcggttcccgtgcgcgccggagcctgctgtggcctcttatgcactccaccacccccatcagctccctcttctccttcaccagccccgcagtgaagagactgctaggctggaagcaaggagatgaagaggaaaagtgggcagagaaggcagtggactctctagtgaagaagttaaagaagaagaagggagccatggacgagctggagagggctctcagctgcccggggcagcccagcaaatgcgtcacgattccccgctccctggacgggcggctgcaggtgtcccaccgcaagggcctgccccatgtgatttactgtcgcgtgtggcgctggccggatctgcagtcccaccacgagctgaagccgctggagtgctgtgagttcccatttggctccaagcagaaagaagtgtgcattaacccttaccactaccgccgggtggagactccagtactgcctcctgtgctcgtgccaagacacagtgaatataacccccagctcagcctcctggccaagttccgcagcgcctccctgcacagtgagccactcatgccacacaacgccacctatcctgactctttccagcagcctccgtgctctgcactccctccctcacccagccacgcgttctcccagtccccgtgcacggccagctaccctcactccccaggaagtccttctgagccagagagtccctatcaacactcagttgacacaccacccctgccttatcatgccacagaagcctctgagacccagagtggccaacctgtagatgccacagctgatagacatgtagtgctatcgataccaaatggagactttcgaccagtttgttacgaggagccccagcactggtgctcggtcgcctactatgaactgaacaaccgagttggggagacattccaggcttcctcccgaagtgtgctcatagatgggttcaccgacccttcaaataacaggaacagattctgtcttggacttctttctaatgtaaacagaaactcaacgatagaaaataccaggagacatataggaaagggtgtgcacttgtactacgtcgggggagaggtgtatgccgagtgcgtgagtgacagcagcatctttgtgcagagccggaactgcaactatcaacacggcttccacccagctaccgtctgcaagatccccagcggctgcagcctcaaggtcttcaacaaccagctcttcgctcagctcctggcccagtcagttcaccacggctttgaagtcgtgtatgaactgaccaagatgtgtactatccggatgagttttgttaagggttggggtgctgagtatcatcgccaggatgtcaccagcaccccctgctggattgagattcatcttcatgggccactgcagtggctggacaaagttctgactcagatgggctctccacataaccccatttcttcagtgtcttaacagtcatgtcttaagctgcatttccataggatagaggctattgcagggagtggcttgtatcatttcagatttgcaactgaagtttctaaaaacatgtgtaaatacatagaatgtatactgttcttattttttttaatcaccgtttgttttgtgctttctagttaacctgatgccagtacagtgcaattggaaaagcaggactttggtgcctgtgctataagcagcagattttgtgggaggaaacacttgagaggcgatattgtcaacagtatttgaagggtgttagcagaataaaagacagctttagtcagccgtgtcattataaagcatgttgtgtggcctcacagaaacattgaaactgtttatacagcaaaagtcaggtattagcagcactaaagcaaatatcactcagatgaaacaaagcagtgaaacccctacagtttaaatgatgtcacttttagtgctgttggcaagaaaaaaaaaaacaacaaacttgtacaatgaattaatgagataggccatagaaactttatttctaaggttgacatacctatagctgggctcctgtgctcatattcagtggtacattttaaacaaactgtgatcggaaaaaaaaaaa

SEQ ID NO: 49088 - DNA, 1861 bp, Homo sapiens
agcggagtctgactgacgccggctggggccgccgccgccgccgccgccgctgctgcagccgctgtctcggtccccgccgccgccgccgggccctgcaggcgctgggcgcgcgcagccaggcaagttggccaccctgttcaagggcttaggagaaagtcaacacacttcgcaacttgaattggtcccagctgctcccagaagaacgggcgggttggtccctatgccacccctggagagctactcgccgcccactttgccgtgaagggctgtgcggttcccgtgcgcgccggagcctgctgtggcctcttatgcactccaccacccccatcagctccctcttctccttcaccagccccgcagtgaagagactgctaggctggaagcaaggagatgaagaggaaaagtgggcagagaaggcagtggactctctagtgaagaagttaaagaagaagaagggagccatggacgagctggagagggctctcagctgcccggggcagcccagcaaatgcgtcacgattccccgctccctggacgggcggctgcaggtgtcccaccgcaagggcctgccccatgtgatttactgtcgcgtgtggcgctggccggatctgcagtcccaccacgagctgaagccgctggagtgctgtgagttcccatttggctccaagcagaaagaagtgtgcattaacccttaccactaccgccgggtggagactccagtactgcctcctgtgctcgtgccaagacacagtgaatataacccccagctcagcctcctggccaagttccgcagcgcctccctgcacagtgagccactcatgccacacaacgccacctatcctgactctttccagcagcctccgtgctctgcactccctccctcacccagccacgcgttctcccagtccccgtgcacggccagctaccctcactccccaggaagtccttctgagccagagagtccctatcaacactcagactttcgaccagtttgttacgaggagccccagcactggtgctcggtcgcctactatgaactgaacaaccgagttggggagacattccaggcttcctcccgaagtgtgctcatagatgggttcaccgacccttcaaataacaggaacagattctgtcttggacttctttctaatgtaaacagaaactcaacgatagaaaataccaggagacatataggaaagggtgtgcacttgtactacgtcgggggagaggtgtatgccgagtgcgtgagtgacagcagcatctttgtgcagagccggaactgcaactatcaacacggcttccacccagctaccgtctgcaagatccccagcggctgcagcctcaaggtcttcaacaaccagctcttcgctcagctcctggcccagtcagttcaccacggctttgaagtcgtgtatgaactgaccaagatgtgtactatccggatgagttttgttaagtgacacacccagaaccccagaattggcataaagattattttaagctgaagacacttgagattcaattgatacagaaagaagccttctcagagcttcctttatctgactagaagctgaaacttctgataaatgaagaccatcataaattccctcttgaggaaagctactaccaggagagagaccaagagtaaatctaccataaataccccatgaccatgagttcagaaaacctacataaacatatattatcacaaaatgccttattgctcatttgttctcctaaaaccacatttgtttttcctaaaggaacctatttgttcatcccataggaacatttactccgtcttccctttccttactaatttaggtatataagcctcaaattctaaccatccatttcagta

SEQ ID NO: 49089 - DNA, 1049 bp, Homo sapiens
ttttgcattggtttttaattcatttaattggtttacactcatttttttttttaacatcccattttggcatttgtatgcccagttaaaaattatgaaatggcacattgtgggattttgtttagcctaaattcctagaaaaattgaaagataccttttattcgacttaagcctgaggttattcagcacggtgatctctgcatttttgaaaggttgtctcgtcgtttaataaacgtaaataacttaagcacattggaagagctattaaatgagagcaggagattaaaaagacatgatttcttactttatccacctgacaggatagcttgcattggtgattaaccttgcattgttaaattcatttcctaaatatttaggtaagtagttggtttgatcattatttgtaaagtattagtagtgcatgttgaattatcatgttaagatttttagtttgttgttcatgtgatatgaaagataacaattcctaaaactgaatgcatgcatggcttattcagctcaggtcacatacaaagagaaatgtgacgctgcaataaacatagcagagctatctgggtttgaagcaaaaaggctatgacgttaggtatatgcactttacattgtatgtatctttttagttctagtgaactcatctggaatcatgttacagaaaatgattctccaggtccaaacacatttaagtttaatgactgggactactctaacaattgcggctatctcattttgtctcattggttcattagcatagcacccatttaagaacaactacttctaaacacagtaatatttcagaggctataaaataatagagaaagaaaacttaaaaaatcctttgtttgcagccaagaaaatgtgaggatcagatttgtatttgttttgaacaattggaaactgtcacaattgtttttaagatgtaataaatgtatataaaatatgggattctatagtattagccattttgatatcttttgttgaaagaaaaaaccaaaaaaccccatatgttctaagtctcagaaatcaaagaattccacaat

SEQ ID NO: 49090 - DNA, 404 bp, Homo sapiens
ttagggccgtttggaaaggggcttgtcctgagagagggggatcggcgctggcagggcagtgcccgtgctcgctggtggcgttgtgatcctggatgtgtccagggaagtcctctccccgttttcttgggcggctccagcccatccagcccccctcatccttcattgccattttctcctatcattccttcataaaaacctcaaataacatcctaacctcgttcctaacagccttagctggaaggggacgaggaggcggctgcaaagcgctcctctctgctactggaagccccttcgtatctggggagtccctgccttttcccagagcctatgcctgtctcttgagggctgtggccatccgcttctgccacccttcaccgtttgagcggctgactttgataagaacg

SEQ ID NO: 49091 - DNA, 433 bp, Homo sapiens
gcctagaacgccttttcccttctcttctcttcatcactgtcttcttcacccctgccccttgccaaattgctctgtatcttgacattttaaacattctcctctttctctaatcacctgcctagattcactggagcaaagctgatggcataagaaatctgctattctccccagatccctcccctgatcatttatagacacttgccatctcccgcattcccagaatgcttatcttgaatttacacctgttgtaaattgccccattcatgaattaggctaatgattgtctttctttgttcaattgcttcatgccgaaggagtcacctctctgggttctcacatgctgtaaattattagagggcgaaaagcaaggtcccagtagtgctcttcaaccaagctggacacaaaatcagagctaatcaaatgctaaaaaaaa

SEQ ID NO: 49092 - DNA, 321 bp, Homo sapiens
ggccaggaacaaagctgagttccctctcctgacagatcagcagtggcattagattctcataagagcccaaaccctattgtgagctgcacatgcaagggatctaggttgtgcgctccttatgagaatctaatgataaatgtaatgtgcttgagtcatgccaagaccacccctgcattaatggaaaagttgtcttccactaaagcggcccctgatgaggaaaggcgaggaccactaaccaacagacactaaaattatttttcaaataatttaagaaagactttccatgcataaatttggcatgatagaaaattaagttaactt

SEQ ID NO: 49093 - DNA, 322 bp, Homo sapiens
gaaaggtggcaagagaattatcaaaagtttccatagatggttgggaagatctgattagtgtttccaaaatgcttatcattctaagaatcccaatagctggcaagccaagcagtggaacttatagtaacaacaatcaatcacttgtctcatcccacatttttgccaaattcaaaaacaccaaatttcccatcaaatgttctgtcagagtaaacctttacctaagtgcttgttttgcttttaatatgtgaatttctgggaacattcccatgggcagcctctaattttttttttttttttttgagacagagtttcgctttttcac

SEQ ID NO: 49094 - DNA, 441 bp, Homo sapiens
tctgtgaaatggatctgcagccctctccatttctgggttcccctggccacaccatgcttatggctgtcccaggagcaggctgacagacaagcttccaccagcatctaaccatggggctcatggacaccgtagagcgtctccacccaacagaatcctgacttgggggcagctgaggcagggggcccgagcgttgaggggaccacgctgctgccccgagacctgctggcatgccacctggccaaccctgacttcgcctgcccgggcgcatgttaactgagttacaacactgagggcacttgaacctggctgcatgaccagagatcgatcacctgtgagatcctctgtgaaacgggataagcatctttaatttcctgggctgttctggaacttcagtcagacaggacacaggagggtgtctgcaccacccacccctgcctcgtg

SEQ ID NO: 49095 - DNA, 930 bp, Homo sapiens
tgacacacaggcatagggtaaatgacctcagcttttaagtcaggtatacttgagtccattccacaccttgcttcctaattgccacctgattttggagaagttttctaaccctctttgagctgctatacaatgaaaaaaaatccctcttgcaagattactatgaggattgatgatgatctgtgtagcatccctggcacttagtaggtgctccaagagcaggtgccattgccacacttcactccagaggaggcagcataactaggagagaagtatatggaccttggagctggccaaccttaggttcaaaggccagcctctgccacccaccagctgagtgacctcgagcaactcatccaatgagtttgagcctttcctttccagtcagtcaaatagatagtagtacttacttcatgggattttgtgagaattaaaagataatgtatggacagagacctgcacagtgcctggtgatgattgggtatccaataaatagaattaatgatgcttatgatagcatttctgcgatgtcttgcaatttcctaagatgttcagtaccttccacccccgacagacaacagcaaaagcaatagtaacatagatccttccccagctgaaccgaagtgataccttcaggaatgtttcaaactgttttcagtctctctgaagctcctgatgcataaggcaaatacccacaggatggccatggaaggagtggaataggagtcctgactggctatcctttctgacccttctgagtgactaagatcctgcagaaatgtgacagaaaaagaaagttccttggagatgggctggaattgcttgtgatctgtccctctgattgtgttagaacgcttccagccaggtccaggtccgttctgccttagcacagcgaatcaatcactgtgacatggagggttttccaaaagagaa

SEQ ID NO: 49096 - DNA, 470 bp, Homo sapiens
tctgaactggctcaaggttttgagccctttaaaaaaatttgtgtatgtgtgataaaaatatacgtaacataaaattcactactttcatcatttttaagtataagtgaagtcacattaagagtacttacaatgttgtgtaatcattgccactatttctaaaactttttcatcattcaagaagaaatattgtaccccgccgggtgcagtggtcacgcctgtaatcccaacactttggcaggcggatcacgaggtcaagagatcgagaccatactggctaacatgctgaaaccccgtctctactaaaaatagaaaaattagctgggcgtggtagcgcgtgcctctagtcccagctacttgggaggctgaggcaggagaattgcttgaacccaggaggcggaggttgcggtgagcggagatcgcaccactgcactccagtctggcgacagagcgagactcccatctcaaaaaaa

SEQ ID NO: 49097 - DNA, 436 bp, Homo sapiens
ataatctggaaataaaaacaaatccctcctaggatcattatatccctaaaagttctttgccccagtcttagaaacatggcacttttgagcatgctaaaatcatgataaggacatatttctcttctcatttcacaccaataaaggaggaaaaaagccttgtcctataggcaccatcaaaataatctacccacccccaactatgccaggctcctgtctctgtggagttcagtggctcctcactagcaggaaagtataagcagagagaccattagttatgacatggagactctagctgataatgctgactcacttcaggagctattatactataaacagtgtgctgaaagccatttatctgcattttaggataaacagcagaaaagtctcaattaaatagattgcaagaaataagctgctgatgtcaaaccaagtgaag

SEQ ID NO: 49098 - DNA, 392 bp, Homo sapiens
tacctgatgtggaacaagtgcctgatctacatttgaattcacttagtccaaccagagtttcaaagttacaacttaggagcagagtcattttggggccatacccaaagctgcctcccatttggaccattccctttaagcattttcacagaccatctcctgaagggatggtcatcgtggttcggtaggttagcaaggtctggcaggaaacaaaaatcaactcagagactctcatgaaggccccacttataaagatctgagcagggggctgggcatggtggctcatgcctataatcccagcactttgggaggttgaggcaggtggatcacttgcggtcaggagttcgagaccagcctggctaacatggagaaaccccatctctactaaaaataca

SEQ ID NO: 49099 - DNA, 285 bp, Homo sapiens
ctttgctggtagtgaaagcagctctaatgacctggcgcccaacagaaccaaatctgtttactctgagctttgccccttcttcatcctcccccagggcttgagaatgaacccacaggatgaaggggctgtggctgatgcataacgggccagctggctgccaagtagggagggtagagtgcctcctctatttccttctgaattgtaaactctgagcctcctctacttcccaagcttcctatgggtgaggagagagggatcagctgagctcattcattcattgccagg

SEQ ID NO: 49100 - DNA, 611 bp, Homo sapiens
  misc_feature (23)..(23): n is a, c, g, or t
  misc_feature (28)..(28): n is a, c, g, or t
tctatagggaaatttggccctcnagccnaaaaattcggcacagacagaagcctgtggaaccagatgtaaaggatcagttctgtgtctaggtactccgttcccacagtactgtcagaaagtaagcaagtcaatttgggatggaatttctacccagtatgttgttgctgtgtggtcttctgacctcctggcttttccattttatcacctccatgggaaaggacttaggcagcagatgtggctgtgccacaacttgccacagctgtgggcttgggtggaggagctgtgagctagaggacggccacacccatagcacagctgacatcagccacacatgaagctgggaagctgctctctactctcagcaccctcagggccaagagaagccccaaaagagagtggttactgcccttattccaggccccagaattctctgctttgcaaatcccaggctgagccccatggttaaccctctctggttctttgctctaccctttggagagaagacaaagcaatgagaagtggaccaagaacagccctcctaatagaatatcctatccaacctgtgatttcagccaagggtaaaataactactctgggtctatcaaaaggag

SEQ ID NO: 49101 - DNA, 348 bp, Homo sapiens
tcgacggagtagaagggcagcaagtgccattcctggatcagagccctgcaacacggggtcagctgcaatttgccccccagggctgagtatcaacaggcacttcccctcgctctgaaaatgcttgggggcatcctcgtgctctctatttggccaagagagaacacgaaccgcaggttatttggcccagaccagtagatgccgtggaaaaggcaccgtggctgccccagaacaggcaaatcacaaaatgcttgccttgggaagcataaacaaagcctcatggtgtaggaggggcagcccccgcctttggatccgggatcagagggaagagagaatacagggctgtttaga

SEQ ID NO: 49102 - DNA, 425 bp, Homo sapiens
ttattcctgactataagttattccctattcttgacaacagtgattgagaatttggtttttggcctgaccatttagtcatctctgtagatggatgacacagatctaattcctttcaagtgagagacaacaggaaatccggtttgttggtcctttcttgtttgtttattttgagctccagtcagttagaaatttagtgcccgctgcaaagcacagctctttgagacttgggattggtaagagggtgtgttgcttacttctggcctgtggctgaatttgcagggccaaagccaaaatctctccatatgtctgtcatctgtgatccatgtgtctgcaagtctataactgagaaaagccttgattccgtgatatgtgagtgtgaaataaattaataaattagttatgtctcttaaatcaaaggagctctg

SEQ ID NO: 49103 - DNA, 338 bp, Homo sapiens
acatgaggaattcttataaattatcatggtgctaggctctgaaaatacataagaggattagagatagccccaactaccacccctaattagacttcttcttcctctgatggtgggatgtactccttgcctagagtggcagcccacagcagcatcaccacctctgattcccagaagggccagttgctagcacagtccatcccacgttgtttaggcattacctggagcccaagggatcttggcatccagaagctcaatttggtgaaaatattggtgtggcttgcacagcagtgtctctcctgtgggtgattccacccaacaactcctaatctctccaaccc

SEQ ID NO: 49104 - DNA, 387 bp, Homo sapiens
tttttcttagaatatatcctgtaatataaattgtttcacatgtgacaaactttaagtcctataatagaaactcttaatatactgaaacttactgtaatatttctggatgtgagttttgaaaacataaactgttgggccctttaagtctgacaattcatatttttggttttggaaattctcagctgttatttgttcagcataccttttctccattctcttgatgctttctggaattcctggatccatgttgaaacttggggatctctttccatgtcttctaacttttttttttttaagatggagtcttgcctctgtcagccaggctggagggagtgcaagtggtgccatctcggctcactgcaacctccgccttgtgagttcaaggga

SEQ ID NO: 49105 - DNA, 1420 bp, Homo sapiens
  misc_feature (3)..(3): n is a, c, g, or t
  misc_feature (6)..(7): n is a, c, g, or t
  misc_feature (9)..(9): n is a, c, g, or t
ttnggnngngaaagaaagaggacttaaggatgacttgaaagtttctggatggctggggatgttaattattggagaaaaggacttcaggaagaccaggtttgattaagagggtgaacagtgggtgttgctggtggtggtagtgattaggagtttagctttagaacaaggagagtttgggatgcttatttgtaatacaaagaggagatgtccagtaagtactgtagtttggacttcactgggtagggatttcaggctactatgctttttaactcatatttgacatctatgtataggtaaatgtctttattttctctaaacaatgtgaatgcctagcacactgcttgacatgctagaagtgtttaatgttgaatatgttgaattgaattgaaatgtaaatttcagttctgttttctataattatatattttactctaataatagtttctggtgtttgaagtatacattattttctttcaactgaacttgaatataatataattttatgaagtcatgagaaagtttggtaaccttccttaaggaataatttttggaaatgtatagacattaaaaaaatagagcctgcacctgaactggctactgttccctgaagcctgtattcctgaccactgtgaaaagtgccatccttgatcctaggcttcctgtccttaatggccattggttgctagtgctaaaactgtgtaagaaggtaaatttataatcatcataggttatttgtaaacagaaaaggtgggggggttggtagtaactgtattttggctctgttcagtgggcctataaattcatttgattacatttaaagttcttttgaaacttaccttggtttaagaagtttactgtattagtccatttgggctgccataaccaaataccatagacagggtggcttaaacaacataaatttattttctcacagtcctggaggccagaagtccaagattaaggttctggcctgtatcattttctggtgaaggcctactcctggcctgcagactgctttcctgctgtgtcctcacacagcctttcctcagctcataggaggggaaatgtaggaggagcagagggagagggagagcaggtgctctgtgtctctcctcttgtataagaacacccagtccaactggaccagggcccctcccttatgatctcatccaaccttgattacctcccagaggcctccatctccaagtactatcacatgagattagggcttcagtatatgaattttaggggaatacagtttaatccataacatgtaaccatagtagcatctttaatactggggttattttgcacttcttttgtatgtgagagagaataaagaacacacctttttaggtatttatacctgaggtatcattctaggaaatgagaatgagtttgtgaaaaataaatgcaaaaa

SEQ ID NO: 49106 - DNA, 323 bp, Homo sapiens
atcatttaactcagtgggtctcatgtctccaaaatgcaaaatagccatcatcacaattaccatcaccatcatcactactatcgacatctcattatcatcaccacaagtattaaggccccagactttataagacatttatttctcatacaatctctggttatgtacttttaagaattggaaaataaaataacgaatggaagaaaagcaaaaatattttataacttggaaaaatcttggccatgaagggatgtggcaggaagtgcaggaggataattttgaaaccatcgtgcaagacagggtttgtaatcaagaagagacaatag

SEQ ID NO: 49107 - DNA, 1324 bp, Homo sapiens
gttgcagctcctgagtgattggctgagtttgttccaaaggggcagccctgtttgctttgagtaggccccaaatcacccagagattttcaggtcatcttgcttgaccaggggctcagccatccgacagactggtccaatgtgcaagcctgggctttatttactcccagccttaccacctgctagtgtgaaaagttgagcagaccatgagacttccatgttaagtgggaattttcacagtgctgcaccagggttagatgaaggtgagatgggggattgcacataaggttctgagatcagtgcttgtctcctactgcatcgttattgttttatcattattaatgtttaagctcttagagtcaaaataataatgcctggagcgtgggtccactcttttccctgggactccattatttctctttgaagcacaggagccaatccccctggtccctatcaggagccacacagttttggttgaagagggaggggctgagagtctggtaggctcatgggtgtggttatccagcgcaggggccagagaagtgccctatgctcttctttccccaccgtgcttggctgactctaaaaattcctgggcacatcacagttactagtcagctttctggacatgtctattcaaagaagtttctggaagatcagagaatcttgaaaaggtgaaatccagtctcttgggcagaatctccaccaccttggtgagccagcacccagcctttgctctgtgattcggggcaaggccagcacatctactttgcaagcacagttagccttctgagaacctgggcttgggtctctgagctatctcagttcatcacaaaggggagaccctggcactatacctatgtgttaagtgagcactttccgccaggggggcttaaggcatataggccttctgatcccatttcctataaaggcatccttcattcatatattcggatgtttactgtgctcctacgtttgtgccaggcactgtgcatacaacaagatagacaaagttcttgtcttcctaggggaggctagtaatgaacagtaaattagacattttcaggttataataaggtctagaaagaaaataacagcgtgatgtaaatatgtgatgctgaggacagttattgaaacacagtagatgctaatttccaagcctctgcagactgtgtttttatttcctgtgcgtctgcatcactggctcacactggaagctggtcatgtaccctaccagttgtggcttaactcttttgtattacatagagcaaactatggcccatgggccaaacctaaacaactgctcttgctccaaatctaataatct

SEQ ID NO: 49108 - DNA, 729 bp, Homo sapiens
aagtgctgggattacaggtgtgagccacgctccagccaattattgctattctaagtcaataagcttgggatggtttattatacagcagaagtgtatcaaaagggtgatggtagttgcaggaaataaatatatacctttaattgtatatgcataaacatctttggaatgatacctccaaaatacaaattcccatattgaaagagcacactgagtacccagcatggtggatggaaatagatcatgaagtttcaaactaataggaagaggtagaagattctataggcttttgggaggggagatgggagaaaagtttaaggcaaataacaaagaatcagaacggcatccatcttctctatggtgctgatgtgctccagtgtgtaaccatcaggaacaaacctatagtcaaacctgagtatattggctcattgcaacagaggagacagcaaacactatggggaaattgtgggacaattcttcctttgggaatctcgatatttttatctagaaagtgagagaaatggttgcaagactaaacacataattggtaaagaatcaacagtctctgttgcccaggctggagtgcagggccgtcatctcagctcactgcaacctccacctcctgcgttcaagtgattctcctccctcagcctctcaagtagctgggattacaggcatgcccaaccatgcttggctaacttttgtgttgactgttggtcgacgcgggtcgag

SEQ ID NO: 49109 - DNA, 288 bp, Homo sapiens
cagagcaaatgaatgaaatggaatgaagacagaaactacaaatctatatagaccataccaaaagcatttggaaaaaagagaattttcttccaatcaacaactccctgaaagggaaaatcaggccttaattttcatgtgcaatatatacgtctattgattcaagatgattagaagcatgaaaaaaaatttcccaatttcgtcttctaagcatgtactcttcattatcagtgctctactgtctttttgttctcaaggcaaatttaaacttcctcacaaatatcttaatgc

SEQ ID NO: 49110 - DNA, 464 bp, Homo sapiens
gagagggtttcaccatgttggccaggctggtctcaaactcctgacttcaggtgatcttcccctctctacctcccaaagtgctggggttacaggcatgagtcattgcatccagcatgtcttctaactttctaaaaaatacttcttctgtattcatctccccacccccagcacttgggcaagtgccagtgactgtactcatctttgtttttgactttgttctgtgaaaattcctcagtttatcttgcttttcttcctgcatccattctgctttatagtcgtattgaattgtttattcaacagtatccatcttattccttttaataactttgttcttgttttgtgggtacaatttttgctttatctctcggtttattcttacattaaaataattagaattaaataatgagaatacaaagatgagatgtggctgaaaaggtccagggcaatttacagtcttaagggtt

SEQ ID NO: 49111 - DNA, 410 bp, Homo sapiens
tctttttaatttctggatcacatcaattttattctgacagatgcagcctctaaaataagctgtgtgatgcactcaaacctaaaataaaccattatttcagggttaggtgcgtcatacctgcaaataacctcatttatctagagaaatgtatttaatgcttattgtataaataccagtgtttcagcgtgatctataataccatctgtcacttctttttgtccaatacataattcaatcctttattccagttttttgagaaggagagctcttgcatattatcttatacatactgtgacaagaacccagggcatattatggaaaatatattaaatattatccaagataaaattttaatgcaagttgaatgaaatgctatctttgttgctaagatatgcattaaagtaagctta

SEQ ID NO: 49112 - DNA, 580 bp, Homo sapiens
tttgttaatacacattcccatccaatacactgcacatcatcagctttatcatcattaaaataagcagaattggctgggcgcggtggctcacgcctgtaatcccagcactctgggaggccgaggtgggcggatcacgaggtcaggagatcgagaccatcctggctaacatggtgaaaccctgtctctactaaaaatacaaaaaattagccgggcgtggtggcgggcgcctgtagtcccagctactcaggaggctgaggcaggagaatggcgtgaacccgggaggcagaggttgcagtgagctgagattgcaccactgcactccagcctgggcgacagagcaagactccatctcaaaaaaaaaaaaaaaaaaaaagcagaattgctgtttgatgaaatatgattgagtgcctgagacttataagcagaactgtttttgtagagcattaagaaatacaggctgggcatgggcatggtggctcatgcgtataatcccagcactttgggaggctagggcaggacgattgcttgagcacaggaattcgagatcagcctgggcaatagagtgagacttcatctctac

SEQ ID NO: 49113 - DNA, 422 bp, Homo sapiens
tctacctgaatccccaggggaactctgggatgtcagtgacggctcaagcattgcccctgaggcaagggagctgggctttccctaatcccccactccctcagtctcctggctaagcgctgtccccaggggacttaatcacccaaacacttccccaagagtggcatctgctgaccactggaggcactggtacagtgaagcgacagaagggatcagagagggtcccaggtggagcacagcaatgtggctgaataataactatattaattcatatagttaattctcaagcaatggcaaagtgtaggcagcttcttgtctgcaaacgtttccatgatatctctcctgcagccagacgggtcttttcctgccgcctacacagaatggccatggagcatccccaactcttattaaaatggaaaaaaaaa

SEQ ID NO: 49114 - DNA, 454 bp, Homo sapiens
ggagtgggaagggaaatctgcattttaacaagacctccagattattcagaaaccccaatgtttcagagctacttctttactctgtaatatcttctacatgagaattttaatttatttgtatattaaaaggtgcctttaaaactaaatccatcagcaatcatcaaatgagtatacttgacaacacttagtctgctttttcccctaatatgttatggaagatgggataaacgtagttaacatagactgttccgactataaacaaagccaatttaagtttgattggaattatatttttggaaatatatttgaaacatatttgaatactttgacttacaggaaaattaaatataacctctaaataacaggaatatcatatctgaatttttatgttatcttttatcataatattccttgggattacctactgaagacagtgattggaattttgaaaggc

SEQ ID NO: 49115 - DNA, 508 bp, Homo sapiens
tcagcaggtcgtatacactctctaagaagcagccatctcttaaatggcagaagaggacctccctcgttggactcatgaggattcactacagcaacatgagaaatctctagctcagtgaccctcacatattagctactcagtaaaggttgccctcccatgcccctgccctggctctcttttcccacacagcccacttctctctctgctctccttcctccgagttctccatggccccttgcccacgtttattcatctctgtctctcaccccacttcctgtaatgaacaacactgtcctcactctgtatgtatctgaccccaacttacaagtgtgttatatctaaaaatccattaataagtcaggtatcagaactactcttgtgcttttctaggggtggctcacacctgtactcctagcccttcgggaggctgaggtgagcagatcacttgagctcaggagcttgagaccagcctggccaacatggcaaaaccccatctctactaaaaatc

SEQ ID NO: 49116 - DNA, 448 bp, Homo sapiens
gaacaagttacttattttttttaactaacgttattttaattgacaaatcataattgtacccatgtatgtgatgttttgatatatgtatacaatgtgggatgattagatcaaactaatgaacacgtccatcccctaatttactgacaattttcatgatgcgacatttgaaatgtacccacttagttattttgaaagatacattattattgactatagtcacgctgctgtgctatagatttcaaaacatataatccagcaacccaacttctggatatagaccaaaaaaaaatcaaaatcaatatgtcgaagggatccctaaattcctatgttcactgcagctctattcacaatacccaagatatagaatcaacctaagtgtccatgagtggatgaaaggataaagcaaatgtactatatacacacaaaggaatactattaacccttaaaa

SEQ ID NO: 49117 - DNA, 230 bp, Homo sapiens
cttaaacccaggagtttgagaccagcctatttcttaaaaaaaaaaatgttaagggtatggaaactaactgggcactctcatgcatgactgaagcgtaaactggtacctttagagaagacagtacaaaaatgcaaaaactaagatgttaaaaaaatgtcaaatgtgtatttccccccagaaaacctacttttaggaatacatcttatgattattttatttttttgagatgg

SEQ ID NO: 49118 - DNA, 226 bp, Homo sapiens
tgaagcttctgaaatatcagctactagtttcaaaactctcccttctttggaggcagttagcataactacaaatccaaactagagatgactgataattaaaggggaatctaaagattgaataactaaacctctaagtttgtagttgtgaaactgaggctgagagaaggaaaacaatttagcaaaggctgtccatctctcttttttttttttttaagatggagtttca

SEQ ID NO: 49119 - DNA, 894 bp, Homo sapiens
  misc_feature (188)..(188): n is a, c, g, or t
  misc_feature (221)..(221): n is a, c, g, or t
  misc_feature (264)..(264): n is a, c, g, or t
  misc_feature (421)..(421): n is a, c, g, or t
  misc_feature (507)..(507): n is a, c, g, or t
  misc_feature (563)..(563): n is a, c, g, or t
  misc_feature (676)..(676): n is a, c, g, or t
atcaattttcccaattacaatgtgtaaagttaaccctaaattttaaccaagtgactaatttatgtctatacaaatgtatccaagtcagattaaacccattatctccttgagtctcatgcttctcattttttctgtatggctgtgcttaggaccaggaatcatacagtactggtgattcttttagtgantagattttggctaacatgtatcaccggtcttantcccagtcacagagatgtggtttccgacatgaaatccttacanaaggaaccagaaagtgcatctgtggctaaaaagatccatgtccttgccaacaactgttctgtgggactaaatctgaaggtattatatgcaatgtgagagacatatctataaattaagtttaaatcctgtggcagtttcctctttaaacttacagacntctacttttttcttatccaggataagaattgatttttttcatgatgctttaaatttctcttgtatcatctagcaggaacttgtgcnagtttgacaatgtgcttggtaggcggtgttgctccgtgattaagagcacaggctcnggtgtttcttactaactgaatctgcatcaaggtctaggtgtatctgtccatttttgccaagtttggggcagtaacagcaaccccagcatctcagtggcttacaaaacaaaggngtattattctctggagcgctatgcctctgctggtcagctgtggctctgctcctgtgacttcattctggaattcaagatcaagaattggtctggaacactctatcccagtatcagaggaaaaggagactcccaagttaagcaatggcccttaacatttctgctcagacatggcacaagttatccactcacattccattgaccggacaattcacatgtca

SEQ ID NO: 49120 - DNA, 191 bp, Homo sapiens
atccctataaatagagaagaccaacggcctctagcatgtcttgaaattccttctatattgggttcagtctaggaaactgttgcaaatcaggtgtccaaggcagattcttaagttgttaataaaaggtcttagggccaggtgcagatgcaaacacctgtaatcccagcactttgggaggccaaggtgagagg

SEQ ID NO: 49121 - DNA, 1053 bp, Homo sapiens
aaatgttggctatccctgctgttgtctatatatcaattttgtctacccaacacagctgtaaacttctcaaggtgaggagtgagccatcactctttgcacctcttgctgtgattgacatggtataccttaagatatatgttaattcctatgtcttaataaatattggcttatggagaatttgttggagcaagtacagaccctatgtttaacttcttttattcaacagaattaaaaaactagctagttctctcaataaaataatactttcttttctttcttaaaatctagctgatctggtctaaaatacacatgtgggaggcgggattgtagaaatatctcaaattaattagcgtctagctctttgtaaggtaattgacagtctgagttagttgcttcccccactgcaaagcagcaaaatctgctctcaaaggcttcacgtagccgggaaaactccgttcccaattcagatcctctggggagggcatcaattatttcctattgtttttagcaccgattgttctgtctaatttgaaaggatccaaaaaaggaaatgatacttgggcattagtatcattctccatcactcttgaaagatatatgaagggaatgttgggcgcaatcagtctaggaaacatatttctcccataacaataaggccagttctttttgctttgaatcagaaatagctccatcaggcccatgaaggaaagggaaacaaaactgagtgccaagcatatgataacatgctcagcatcatatgacattaggggattgcaaattgaaacaacagtaccaccacacacctatcagaatggccaaaatccagaagactgacatcaccaatgctagtgagaatgtggagcaacaggaactctcattcacggctggtggggatgcaaagtggtggagccacttgggaagacagtctggcagattcctaaaaaggtaaacatactcttactaaacaatctagtagatttgctcctaggtgtttacccaaaggagttgaaaacatgtccacacagaaaacctgcacatgaatgtttatagcag

SEQ ID NO: 49122 - DNA, 891 bp, Homo sapiens
ctttggggctggctgtggtgagtcactcagaagtctggctgtgacctggatgggctcaccagagtacgctagtggtagtgggaaaacaggcagagagaaaggagtgtcaggagcactcccagggaggctgttgtagatatttccattcccagaacagtgatctattgtgacagtctcagaacagacaacaagaattacaggtaattttctcattctcttgatatatttttagcaaaacttaaatcatgaatagaaggaaaagatgccattggggaaatagaaaaactcaatcattttataaagcatacaaatcataaggatgactggccaatagcactcccactttggtcttacctaaagttgggtggacaagaataataaaagtcctcattttatatccttccaaaatcagatttaaatgctgccagcatcttaatggaagtctgaaattgattgataggatgtagaaatccaaattcactaaaatagggggccagctacataaagtcctagaaggaaaaagtgcctcgcttttttctgccattatcctaccccctagtcatctggggaattgatctatgaagcttgaagaaggggcatttaacatcagagtggtgcaagggcagtgttgagatgctttaagcagcagcctgagctttagcactatttgaaggggagaaggttaatactaataatatttgtgttatttttatgatatattactgtttacagaacactttcatttgatcccaacatcaactgctgtgatagaggcagggcagatgttgtggtctcattacatagaatgtaaaactgaggttgaaaaatactaagtgacttgtctgtagtcaaatggtttttaaaattataaagccaggccttctgactgtc

SEQ ID NO: 49123 - DNA, 398 bp, Homo sapiens
gcctgggggcagtgctacccacatatgttaccttcaaaagacacatctatccatagccctggtaacaggcctgctgaactcaccctacctcagtgctgaagcagccctatgacttgactctatcccccatctattgtggttaatgggtgtctagtaggagccatgcctattaagaccctgctaatgggcctgccatctgcagacccagaagtcctcttgtgacccacctccaaccttgcttgaccatggttccagaggtagtcccatctgattggtaccaggcaggaattgtgcccacctgtgcccgcagtaacaggcccttcaactgtgtacctgactacagacccagcagcatccatgtgagacagctctagccccagttaatcgtgatcttggag

SEQ ID NO: 49124 - DNA, 320 bp, Homo sapiens
tggccacgtctgacttacgagaaaactagggagccattagctggcaccaccggcccagctgtcaggtggtggtggtctgcaggcagtgctgtgagtgccataccacccaccccatgcctacccacctccctcccacgctggcacttgctgtaggggctgctgcaggacaccactaacttgtttctcagcccagcttggcccccatcctcagagtccctgcatctctcccaggcctcactcttactgtcagatatttcaaatgcacgcatcacacagtgagcatccaagggctcatcagtggccctggcctggctctgatt

SEQ ID NO: 49125 - DNA, 406 bp, Homo sapiens
ccaaaccatgtcagacatgatatgatcagatttgtgttttgaaaaattaacactgcaatgtggagaattgattggagggaatcagaagagtccagtaagtaggaaaaagtaataacttacactagggtggtagcagtaagaatggaaagaagtagatgcatttgaatgatactcaaaaggtgaaaataactgttcttagtgatgagatagatgtagggataagctgaagcacttaatgtaaagggacggatggtgttgtctttcattaagatagggaagagtaggagattagatttccagagggaagatcatgaggttgaatttaaggacgtctttgagttttaaatgcctctgcccttcttaagtgggagatgtccaagttaagccatttgggatatatgtatct

SEQ ID NO: 49126 - DNA, 4683 bp, Homo sapiens
ccggacagcaccaggaagcccggcaggagaattctgccagatatcaggacagatggggaacagcagaagccgtgtggggcggagcttttgttcacagtttcttcctgaggaacaggcagagattgatcaattgtttgatgctctgtcatcagataaaaacagcccgaatgtctcatccaaatccttctctctgaaggcactacagaaccacgtcggggaagctcttcccccagagatggtcaccaggctgtatgatggcatgcggagggtcgacctgacagggaaggcgaagggacccagtgagaacgtgtcccaggagcagttcacagcatccatgtcccacctgttgaaaggaaactccgaggagaagagtctcatgattatgaaaatgatttctgccacagaaggtcccgtgaaggccagagaagtccaaaagtttacagaggatctggttggctctgtggtgcacgtgctaagccacagacaggagctgagaggctggactgggaaggaagccccagggcccaacccccgggtgcaggtgctggctgctcagctgctctctgagatgaagctgcaagatggcaagagacttctggggccccagtggctggactatgactgtgaccgagctgtgatcgaggactgggtgttcagggtcccccatgtggccatattcctgagtgtggtcatttgcaagggctttctcgtcctgtgctcgtctcttgatctgactaccctggtccctgagcgtcaagtggaccagggcaggggttttgagagcatcctggatgtcctctctgtcatgtacatcaacgcccagctgcctcgggagcagcggcaccgctggcgcctgctcttttcgtctgagctccatggacacagcttctcccagctctgtggccacatcactcaccgggggccctgtgtggctgtcctcgaggaccatgacaagcatgtgttcggtgggtttgcctcttgctcttgggaggtgaagcctcagtttcaaggggacaatagatgcttcctgttctccatctgccccagcatggctgtgtacacacacacgggctacaacgaccactacatgtacttgaaccatggacagcagacgatcccgaacggactgggtatgggggggcagcacaattactttgggctttgggtggatgttgattttgggaaaggacacagcagagccaagcccacgtgcaccacgtacaacagcccgcagctgtcggctcaggagaacttccagtttgataagatggaggtgtgggcggttggagacccctcagaggagcagttggccaagggcaacaagagcatcctggatgcggaccctgaggcccaggccctgctggagatcagtgggcattcgcgccacagcgaagggctccgggaagtcccggacgatgaatgaggagccgcctgagccttcctggagccaggacctggattcctctgggtagagggcaccgcctgcagcccctcttccctcccacatggtttaactgtaatagcgtaccgcacgggtcacagcctggtagtcccacatgtgccaagaagacgccctctgaagccatgtcctgactcatgggtggatctcccagaaatagatgttttttaagttttcttttttgccctacagggtcaccctcaggatctctccaagaaatcttgtgtcaaattagtaactcagtcttatactttgttcttttttaccaacgaaatcctaagcagctgagacctttcagacccccgctggcattagggaattccgctggcattagggaattccgctggcattagggaattccgctggcattagggaattccgctggcattagggaattccgctggcattagggaattccgctggcattagggaattccgctggcattagggaattccgctggcattagggaattccgctggcattagggaattccgctggcattagggaattccgctggcattagggaattccgctggcattagggaattccgctggcattagggaattccgctggcattagggaattccgctggcattagggaattccgctggcattagggaattccgctggcattagggaattccgctggcattagggaattccgctggcattagggaattccgctggcattagggaattccgctggcattagcattgctgggatctcaacttctctattgaggagggggttcctcccgctggggttcatatggcctcactcaggccatccctgttagaaggtggtacctgatggtctgttctgacgggtgagggacagaggcatctggatgaaaatctcgacgctttctgggaacagcttccaatggcatgggagttctgtatttaaaagcatgaactgtgtataaaatggggaaatggaggcaggagactttgaggtaacatggtctggtggtggcatgagtcctcagaaggtatttgtaataaggttccacacccagctctctcagctgtttttaaatgaatgtgtgtgaggaacagatgggaaagttgggagatctgtctacagagaagcaaagttgtggttctcttgctaacttcaaggtgagggacattgggcaccctaagtttgggaacttggttgataaatacgtatatggtccattccataaatcagtggtgagtgactggcctgggttctagacctctgggaaccagcacctgagtcacagctgtctaggcctcggtgctggcctgggttctagatctctgggaaccagtgcctgagtcacagctgtcagtgcagccatttgcccagggctgctcccgagggggatgatgggaaattcagcagtgtagactcactttaaacaagctccggtgatcctgaaatgctgaagatcgtgtaggtgggttgtggggtcagcagagctgccatctgcccacgtctggaaaacaacacacggtgagtcaccggttggccatgagatctccccacttaaaggtgctgtgagcttgtctctaagatatatacctcttccttttgtcttttgctgtaagctttgaccttttgcagatctgatgaaaatacaacctcttattgtatagtttgccttgattataagccatagtaaatcgagctgttcgcatttttgcaggccttgcattttctactgggaggttcatcaaaccttccacttagcaatagccctgactcaggcagaatgcctcataaattagccttcgaaagaaaagtgcacgctcagacagtgtgtggaggggcaggagcgtgatgcagacaaggacttagtcatgactgattttccttagccagtttgtaatggcttatggggaacattgtgagcttcctacctgacatgttggcagaagtagaatattaggatcctcaagcatctctaccgtaagtccaaagaatttaggtccctattgtcactttgttttgcaatgttttttataaaaatgcaattaaatacctcactattaaactgccatgatgcctcagttaaaaaaaaaattaaatgtccgtcagtgtctgtgccttggtgaccattgattgctgcttctgcccaggccgctgcaaaggttaggactttgtccactcacatgctttccaccctgagcttgttctaaggagagtgcagatcacgaatgcacctgcttccaggcagtgcacttagagaaagggcactggcccgggcttgggagcctgggggatgcagctctctctgtgggcttctcttggtgcacggttctgcctctggacactcaaacctttttagggcgtgtgcagggctggggccagtggacctgacagtaccttacctggctctgagaaactcgcaatcctagtttgcacaaatgaatagtttgttcttttgtgaaaccagaatgagaattcaggttctaaggactagaggtctccctacaaatgaagacttatctcagggccctagaaagtgctaggaggaagaggttaaaaaaaaaatttgtccgcgttgcaaactattataaatgattgccacattgcaagctattattttctcccaccatattttttaattaaaaaaaagtctggggccgggtgcggtggctcacgcctgtaatcccagcactttgggaggccggggtaggcggatcacctgaggtcggaagttcgagaccagcctgaccaacatggagaaaccccatctctactaaaaatacaaaattagctgggcatggtggcacatgcctgtaatctcagctactcaggaggctgaggtagtagaattgcttgaaccagggaggcagaggttgtggtgagccgagatcgtgccattgcactctagcctgggcaacaagagtgaaactcagtttcaagaaaaaaaaaaaaggctgggtgtgatggctcacgcctggaatcccagcattttgggagcttggggcaggccgattgcttgagcccaggagttcaagaccagcctgggcaacatggcgaaaacccatctctacaaaaaaaaatacgaaaattaaccaggcatggtaacacatgcctgtggtcccagctacttgggaggctgaggtgtgaggatcatttaggcctggaaggttgaggctgctataagctgtgattgtgccactgcactccagcctgggcaacacagcaagaccctatgtttaaaaaaaattgtgtacctggtttag

SEQ ID NO: 49127 - DNA, 4982 bp, Homo sapiens
ctgggcttttccaggacagtgagctgataactgttcccaggccatgtaggtggccagcacaggacaggtcaccttctggcccacaggaacttcttgcccaggctcaagctgccccttcgcacaagggcctctgggctctgagacacagacaggacttcgaagcctgtccagatgaggcagttggaatctccccagcttgtgggggctggagtgcactgttgtgatcttggctcactgcgacctctgcctcctggttcaagcgatcttcccacctcagcctcctgaatagctggaactatagtcacacgccaccacacccggctgagagaattctgccagatatcaggacagatggggaacagcagaagccgtgtggggcggagcttttgttcacagtttcttcctgaggaacaggcagagattgatcaattgtttgatgctctgtcatcagataaaaacagcccgaatgtctcatccaaatccttctctctgaaggcactacagaaccacgtcggggaagctcttcccccagagatggtcaccaggctgtatgatggcatgcggagggtcgacctgacagggaaggcgaagggacccagtgagaacgtgtcccaggagcagttcacagcatccatgtcccacctgttgaaaggaaactccgaggagaagagtctcatgattatgaaaatgatttctgccacagaaggtcccgtgaaggccagagaagtccaaaagtttacagaggatctggttggctctgtggtgcacgtgctaagccacagacaggagctgagaggctggactgggaaggaagccccagggcccaacccccgggtgcaggtgctggctgctcagctgctctctgagatgaagctgcaagatggcaagagacttctggggccccagtggctggactatgactgtgaccgagctgtgatcgaggactgggtgttcagggtcccccatgtggccatattcctgagtgtggtcatttgcaagggctttctcgtcctgtgctcgtctcttgatctgactaccctggtccctgagcgtcaagtggaccagggcaggggttttgagagcatcctggatgtcctctctgtcatgtacatcaacgcccagctgcctcgggagcagcggcaccgctggcgcctgctcttttcgtctgagctccatggacacagcttctcccagctctgtggccacatcactcaccgggggccctgtgtggctgtcctcgaggaccatgacaagcatgtgttcggtgggtttgcctcttgctcttgggaggtgaagcctcagtttcaaggggacaatagatgcttcctgttctccatctgccccagcatggctgtgtacacacacacgggctacaacgaccactacatgtacttgaaccatggacagcagacgatcccgaacggactgggtatgggggggcagcacaattactttgggctttgggtggatgttgattttgggaaaggacacagcagagccaagcccacgtgcaccacgtacaacagcccgcagctgtcggctcaggagaacttccagtttgataagatggaggtgtgggcggttggagacccctcagaggagcagttggccaagggcaacaagagcatcctggatgcggaccctgaggcccaggccctgctggagatcagtgggcattcgcgccacagcgaagggctccgggaagtcccggacgatgaatgaggagccgcctgagccttcctggagccaggacctggattcctctgggtagagggcaccgcctgcagcccctcttccctcccacatggtttaactgtaatagcgtaccgcacgggtcacagcctggtagtcccacatgtgccaagaagacgccctctgaagccatgtcctgactcatgggtggatctcccagaaatagatgttttttaagttttcttttttgccctacagggtcaccctcaggatctctccaagaaatcttgtgtcaaattagtaactcagtcttatactttgttcttttttaccaacgaaatcctaagcagctgagacctttcagacccccgctggcattagggaattccgctggcattagggaattccgctggcattagggaattccgctggcattagggaattccgctggcattagggaattccgctggcattagggaattccgctggcattagggaattccgctggcattagggaattccgctggcattagggaattccgctggcattagggaattccgctggcattagggaattccgctggcattagggaattccgctggcattagggaattccgctggcattagggaattccgctggcattagggaattccgctggcattagggaattccgctggcattagggaattccgctggcattagggaattccgctggcattagggaattccgctggcattagggaattccgctggcattagggaattccgctggcattagcattgctgggatctcaacttctctattgaggagggggttcctcccgctggggttcatatggcctcactcaggccatccctgttagaaggtggtacctgatggtctgttctgacgggtgagggacagaggcatctggatgaaaatctcgacgctttctgggaacagcttccaatggcatgggagttctgtatttaaaagcatgaactgtgtataaaatggggaaatggaggcaggagactttgaggtaacatggtctggtggtggcatgagtcctcagaaggtatttgtaataaggttccacacccagctctctcagctgtttttaaatgaatgtgtgtgaggaacagatgggaaagttgggagatctgtctacagagaagcaaagttgtggttctcttgctaacttcaaggtgagggacattgggcaccctaagtttgggaacttggttgataaatacgtatatggtccattccataaatcagtggtgagtgactggcctgggttctagacctctgggaaccagcacctgagtcacagctgtctaggcctcggtgctggcctgggttctagatctctgggaaccagtgcctgagtcacagctgtcagtgcagccatttgcccagggctgctcccgagggggatgatgggaaattcagcagtgtagactcactttaaacaagctccggtgatcctgaaatgctgaagatcgtgtaggtgggttgtggggtcagcagagctgccatctgcccacgtctggaaaacaacacacggtgagtcaccggttggccatgagatctccccacttaaaggtgctgtgagcttgtctctaagatatatacctcttccttttgtcttttgctgtaagctttgaccttttgcagatctgatgaaaatacaacctcttattgtatagtttgccttgattataagccatagtaaatcgagctgttcgcatttttgcaggccttgcattttctactgggaggttcatcaaaccttccacttagcaatagccctgactcaggcagaatgcctcataaattagccttcgaaagaaaagtgcacgctcagacagtgtgtggaggggcaggagcgtgatgcagacaaggacttagtcatgactgattttccttagccagtttgtaatggcttatggggaacattgtgagcttcctacctgacatgttggcagaagtagaatattaggatcctcaagcatctctaccgtaagtccaaagaatttaggtccctattgtcactttgttttgcaatgttttttataaaaatgcaattaaatacctcactattaaactgccatgatgcctcagttaaaaaaaaaattaaatgtccgtcagtgtctgtgccttggtgaccattgattgctgcttctgcccaggccgctgcaaaggttaggactttgtccactcacatgctttccaccctgagcttgttctaaggagagtgcagatcacgaatgcacctgcttccaggcagtgcacttagagaaagggcactggcccgggcttgggagcctgggggatgcagctctctctgtgggcttctcttggtgcacggttctgcctctggacactcaaacctttttagggcgtgtgcagggctggggccagtggacctgacagtaccttacctggctctgagaaactcgcaatcctagtttgcacaaatgaatagtttgttcttttgtgaaaccagaatgagaattcaggttctaaggactagaggtctccctacaaatgaagacttatctcagggccctagaaagtgctaggaggaagaggttaaaaaaaaaatttgtccgcgttgcaaactattataaatgattgccacattgcaagctattattttctcccaccatattttttaattaaaaaaaagtctggggccgggtgcggtggctcacgcctgtaatcccagcactttgggaggccggggtaggcggatcacctgaggtcggaagttcgagaccagcctgaccaacatggagaaaccccatctctactaaaaatacaaaattagctgggcatggtggcacatgcctgtaatctcagctactcaggaggctgaggtagtagaattgcttgaaccagggaggcagaggttgtggtgagccgagatcgtgccattgcactctagcctgggcaacaagagtgaaactcagtttcaagaaaaaaaaaaaaggctgggtgtgatggctcacgcctggaatcccagcattttgggagcttggggcaggccgattgcttgagcccaggagttcaagaccagcctgggcaacatggcgaaaacccatctctacaaaaaaaaatacgaaaattaaccaggcatggtaacacatgcctgtggtcccagctacttgggaggctgaggtgtgaggatcatttaggcctggaaggttgaggctgctataagctgtgattgtgccactgcactccagcctgggcaacacagcaagaccctatgtttaaaaaaaattgtgtacctggtttag

SEQ ID NO: 49128 - DNA, 1180 bp, Homo sapiens
atatgttgataaagggatatatgttgtccttagaaatcacacaaatcatgaccacaataatttatctgtaactgctgctaattttattgagcagagaaaaaagaatatacatatataaacatgtataggtgcatacacaatacacccggatatgttttacacataattttgattctgatattttagataacatctgttcacttttaaacaatctgttgaggttttgggactgttatctacattgattctcttaggaatagtggacagaatgactccaaagattctcagaaccctgtctcttgaagctcaatcttatttgggttcatcactgaaaacttagaacaaatcagtaaagaatcctgtattgaagaattaagtttgagtttaagcccactcaccgcagggctggtttttgcatgtaatactcccatgatgtctggggaaatgacagtttctgttgaattataattctccggtttaagggtctccttcccctggtgtctgatggtgagaggtctgaagagcatttgtcagagtacattaggcattctcaacctacttcatgctttacgagagctgagaaatcagacgcaccggcctttattattatatatgctacatctgttgagtatttttaaaataccaataagaggacttgtttatttcataaaccacttcttccctctctttcaaagaaaatacattattaccatacttttacattagtctgagaatttttgctaaatatgattaagtattccaaaatataatggcgtcattattcttgacttttttagagaatatacatcttaagactgtattagttctcagagcaaggcatcatctactcccctgcacctgagagtctggccccagattccagatgtgcggacagcccatgaccgaggtgcacacagtgccctcttgaataggaaggtcagccagtgaggcggcagcataacttgcaggatggacttatatcttaccatctcttcctgctaccaaaataaaaaaataaattgaaagacaagacccaccagtctagttttgtagacctgtgaaatgtgtctttatttcttggcattagaagaaagatatttttaatccatatcgtggttttagagttgaagtgaattgatacccaattttccatcttagatctcctttatcaaaaaaaaaa

SEQ ID NO: 49129 - DNA, 630 bp, Homo sapiens
attctgtgaacgtgtgctacttttgaaaaatagaggaaggggtgttggaagcctagactggttctcttgccactcctcaaaaagcaaaattttgcagcccaaatattaaaaattgactccgcgtattccttctcccccacagtggcacacaactgggcaggctccatctcgtctgctgctggaacccactagaaaccaaatgagccctccagcaggcctaatcactctgatctgtcatggaccttctagctggaagagttatgccatcatattatcccaacactcatcagtgtgtggaggacccccttttactgaatgatttattgctctttgcagaattcctttggctgcagattttatttctgagtcactctgttcagctcaattggtcgccttcagttaccgtggcaaccagcagatggggttctttgacaagggtcagcggggaggctgccttggtttggacagaagaggagctaaataaaaagctttcagcattgacggttccgtagcggacggccaggagttgttatcaaattacttgcattaaaacctaattaagatgtgtgccaataagtgggctgtagtgattgaatctggttacttagctgctgtgggcccaatcttatg

SEQ ID NO: 49130 - DNA, 672 bp, Homo sapiens
tttttataaaaaatttttaaaagatatatgtagacacaaagagagagagaccctgtctcttaaaaaagaaaaaaaaaagcaagctgttttctatctatagtggatatacaattatacattcccaccagcaatgtataaaagttcaagtttctccaagtccctggcagcatttagtgttacagtttttttaattttaactattctaacaggtaagtagtgatatcttacggtgatttcaatttgcatttccctgatgtctaataatgttgaacatgttgtcacttgtttgctatttgtatgtcctcttcagtgaaatgtttcttggtgtcttttgcccttattttttaggcagggccttgctctgtggcccaggctggagtgtagcggtggtgaagtcacagctcactgccgcctcaaaatccccatctcaagcgatgctcctattcaagcctccctagtagctgaaactacagatgagagccaccacacctgtctaattttgcccatttttttgaattgactttttttttttaaactgttgagggttctttaaatattctagatacaatcagttgccagatatgtgatttgcaaatgttcttccagtttgtagcttgtctttgcatcctcttaacagtctttaatcaggtaaaaattcttaattttcatgat

SEQ ID NO: 49131 - DNA, 250 bp, Homo sapiens
tttttataaaaaatttttaaaagatatatgtagacacaaagagagagagaccctgtctcttaaaaaagaaaaaaaaaagcaagctgttttctatctatagtggatatacaattatacattcccaccagcaatgtataaaagttcaagtttctccaagtccctggcagcatttagtgttacagtttttttaattttaactatctacagagtaggaactatggatcatcacttcgtagcatagtgacgtgtc

SEQ ID NO: 49132 - DNA, 526 bp, Homo sapiens
tttaaagttccctagcattttatttctcacttggactgttaatgaatatttctaaaaagcacactaagagttcaaagttttaaaataatggtaacataatactgttattatatctaacacctactagtatttaccatgtgccatgcactggtctaaaagctttcatatatttatttaagcttcacaacaactctatgtggtgggaactcttactgtctccattttatagatgaggaacctgaggcacagagagatcaagtaatatacctgcagctattaaatgatggaactaggattcagaccctgacaggctggctctagagagtgtgctgtcaacaccatgtctcttcagaaggcatttctttttcttttttttttttccagaaggcatttctgtcatgaagggttatttattgaccagggctttttttttttttttttggactgtcttgggtctcctaggctggagtgtagtggtgtgatcttggcttactgcaacctctacctcctgggttcaagcgattct

SEQ ID NO: 49133 - DNA, 2873 bp, Homo sapiens
  misc_feature (680)..(680): n is a, c, g, or t
ctaaacgccaagagttgagcctgtgggtctctccataagagttttaaaactcttgccagttaccactttatccaatttgctatcattttcgtattatcagctatcgccctgtaaaatattcaaaactagctatttctaaagtaaacattttatctgttacttttaaccagataggtgtctttgtcatccttctactataaattgttctttgccaacctgtacaggtagatgaaccaggcgagagttttaatcagccttttcttgtcccctttgtaagaaagagatgcttgccatagagaaggacatgagtacattaaaaataatttaatagccacaatatgatgttctttaagctgcaaattgagtacactgggaatcaacaaatttgatgaagcctgtctgtctcttcaccagtggagtgagtgcagcagttagaaagagaagcaatattgtgcaactggtgcagtggtgagttaatcatagtgtataaccttgtgttcatgaaacaggttgttcattgttctgcatctctcttcatttaaaaaggatacacaattctttcctcattgcatattacaccaaacgtttgagggaaaaatcctcattcgtaaaggattttggatttataatctaaaactcaacaataaagaaataatattccaagtctctggtttcctaanatacataataactgtttataaagaaggtctaagagctgatatttgccaaagtgatagaagagttgttttttcctctctactaccaagctttaagacattaaaagaagtctagtgtatttgaatattttagagaaagctttatcattttttaagatgccaagatgctgcctacgtttgcaaaagttgtctaagaattcaccatgagctatattttcttctggatctttgaccaaggtgatgtcagcttatttctggggaaggtgttgagctcttatacatgaaaatggatataggctattctctgggatgagtgtcatttcaatgctttataaatccatgaagctgcttgtctcataaagtagaactgatacaaattttggttggatatatagagaattttataaatgtattgccttagaatttctgggtggagacccaactacaatgacattgtcatgcaagaactataaagataattagagttaaaagttgtttaaattgtgcccttaaatacagcagaacctggagaaggtcatacttcaaaggtcgattttgagtccgaataaagaaagacctagtaacagatagtttttttttgttcattttcttctaccaagtagaggtttatgccctcagaactaaactagtaaaaatatctgaacaaaaaacctttcgttgttggcataaaaatgtgatacacttagagacattttgtttattgcatataaatctaatttttccataaattagatttatgatattttcataaagcacttgattagtttttcaaggcgtaccatcacaaagatgctttcctgcagagttctttgtatcaacagcctatggttgagatgttttctcatttcctgtagagagagaataccactaacaaacaagcaaaaactttagtgccaaaatagtggaactattttgtcatcttttgagaaaaaaatatacaaagaagtcatcttttcattaagtggattccctggttcctttccagctggttgtggaagtaatggctaacatccttcagctgactttgtctacaaggattattagcaaattctgtaggagcaagcatgtctgaccttaacttaatggatcccttattcaatcagtggcttctgtctttatgtctgttggcatatcaaaatggtttctgttcctagaaaagtaataacatatgcttatctttattctttttccaggtgatttgttttcaaatgctccttgtgaaaacacctagtgttgtagaaaggaaagtggccagaaagaacaacttgggaccatgagtaggtcattaaatagcttagtgatttatcctcatatagggcttataaaccctgtatgtgtttatatgtgcttcacagagttcgtgtcaggctcaaaggagatatgtataagaaagtggtttgtaaattatgttccatttcataaatagacactattcacaaactaaaatctaataaaaaaccacagttgtaatttaaactgcttgatataaaaagaggtatcatagcagggaaaacacactaattttcatacagtagaggtattgaaaactgaaaatgggaaggcaacttgaagtcattgtatttgattgaaaatgtttaatacatctcattattgacaaaatatgtcatcttgtatttatttcaaggaaaccaatgaattctaggtagtatattacaagttggtcaaaatattccatgtacaaatagggcttctgtgtccatagccttgtaagagatactgattgtatctgaaattattttttaaaaaaataaattatcctgctttagtgtgttaaaagtagacgatgttctaatataacactgaagtgcttcattgtatcccaacagtttaccttcaagtaatattatctttatttttaggctaagcacgtttgattattttgtctgtctcctatatagatctgttttgtctagtgctatgaatgtaacttaaaactataaacttgaagtttttattctatatgccccttaatagactgtggttcctgacgcacactgttaggtcattattttgttgtaccaaagttctagtggcttcagaaatcatagcatccaatgattttttggtgtctggctatgaatactatggttgagaattgtattcagtgattgtttctgcacacttttcaaataaaaaatgaatttttatcaatta

SEQ ID NO: 49134 - DNA, 1471 bp, Homo sapiens
cactcgcagtcctgacgggcaggggctgcggaccgcccggccttggacccatccggagccacaggttggaggagataagtagctgtccccgtgctcatcgccctgtggagcagatcctgtctccttgctgacggtggagcccgggagttccagggcttgggaaggggaaggaaacctctctgaaatctgacacctgctctcccggcaaggaaacttcgcaggctgaccgaccaagaccatcactatgaccgatggagactatgattatctgatcaaactcctggccctcggggattcaggggtggggaagacaacatttctttatagatacacagataataaattcaatcccaaattcatcactacagtaggaatagactttcgggaaaaacgtgtggtttataatgcacaaggaccgaatggatcttcagggaaagcatttaaagtgcatcttcagctttgggacactgcgggacaagagcggttccggagtctcaccactgcatttttcagagacgccatgggcttcttattaatgtttgacctcaccagtcaacagagcttcttaaatgtcagaaactggatgagccaactgcaagcaaatgcttattgtgaaaatccagatatagtattaattggcaacaaggcagacctaccagatcagagggaagtcaatgaacggcaagctcgggaactggctgacaaatatggcataccatattttgaaacaagtgcagcaactggacagaatgtggagaaagctgtagaaacccttttggacttaatcatgaagcgaatggaacagtgtgtggagaagacacaaatccctgatactgtcaatggtggaaattctggaaacttggatggggaaaagccaccagagaagaaatgtatctgctagactctacatagaaactgaacatcaagaaccccaccaaaatattacttttaaaaacaatgacaaaccacacaattgttgttgagtaaaccacgcacaatggcatgtctttctttttctgccagaaaatctattttaagaaaccagaatagtcaacagtgttcaaaagaattgactagttatccctgaggccctttcaaacatgatcaaagatttcccaatgtgatctcatcatcatggatactcaatttgttttttcttatagagaaaatgagtatataagacaatatacaagaagaaatatcagtgagttttaaatcagaacaagttacctgtcacattgaagaaaagggtaggcactaaagggagaacacagaaagaagaatttctaaaatattggatttacttcttatattgagtcagatgcatacttttagatttgcattggggaaaatgtactagctaaaaatggatacacaatgaagaattctatttggctaattaagaatgatatactatgtacacccaataagctgtactagaatgaataaattactgataaggttacaaata

SEQ ID NO: 49135 - DNA, 3140 bp, Homo sapiens
  misc_feature (947)..(947): n is a, c, g, or t
cactcgcagtcctgacgggcaggggctgcggaccgcccggccttggacccatccggagccacaggttggaggagataagtagctgtccccgtgctcatcgccctgtggagcagatcctgtctccttgctgacggtggagcccgggagttccagggcttgggaaggggaaggaaacctctctgaaatctgacacctgctctcccggcaaggaaacttcgcaggctgaccgaccaagaccatcactatgaccgatggagactatgattatctgatcaaactcctggccctcggggattcaggggtggggaagacaacatttctttatagatacacagataataaattcaatcccaaattcatcactacagtaggaatagactttcgggaaaaacgtgtggtttataatgcacaaggaccgaatggatcttcagggaaagcatttaaagtgcatcttcagctttgggacactgcgggacaagagcggttccggagtctcaccactgcatttttcagagacgccatgggcttcttattaatgtttgacctcaccagtcaacagagcttcttaaatgtcagaaactggatgagccaactgcaagcaaatgcttattgtgaaaatccagatatagtattaattggcaacaaggcagacctaccagatcagagggaagtcaatgaacggcaagctcgggaactggctgacaaatatggctgcaaattgagtacactgggaatcaacaaatttgatgaagcctgtctgtctcttcaccagtggagttgttcattgttctgcatctctcttcatttaaaaaggatacacaattctttcctcattgcatattacaccaaacgtttgagggaaaaatcctcattcgtaaaggattttggatttataatctaaaactcaacaataaagaaataatattccaagtctctggtttcctaanatacataataactgtttataaagaaggtctaagagctgatatttgccaaagtgatagaagagttgttttttcctctctactaccaagctttaagacattaaaagaagtctagtgtatttgaatattttagagaaagctttatcattttttaagatgccaagatgctgcctacgtttgcaaaagttgtctaagaattcaccatgagctatattttcttctggatctttgaccaaggtgatgtcagcttatttctggggaaggtgttgagctcttatacatgaaaatggatataggctattctctgggatgagtgtcatttcaatgctttataaatccatgaagctgcttgtctcataaagtagaactgatacaaattttggttggatatatagagaattttataaatgtattgccttagaatttctgggtggagacccaactacaatgacattgtcatgcaagaactataaagataattagagttaaaagttgtttaaattgtgcccttaaatacagcagaacctggagaaggtcatacttcaaaggtcgattttgagtccgaataaagaaagacctagtaacagatagtttttttttgttcattttcttctaccaagtagaggtttatgccctcagaactaaactagtaaaaatatctgaacaaaaaacctttcgttgttggcataaaaatgtgatacacttagagacattttgtttattgcatataaatctaatttttccataaattagatttatgatattttcataaagcacttgattagtttttcaaggcgtaccatcacaaagatgctttcctgcagagttctttgtatcaacagcctatggttgagatgttttctcatttcctgtagagagagaataccactaacaaacaagcaaaaactttagtgccaaaatagtggaactattttgtcatcttttgagaaaaaaatatacaaagaagtcatcttttcattaagtggattccctggttcctttccagctggttgtggaagtaatggctaacatccttcagctgactttgtctacaaggattattagcaaattctgtaggagcaagcatgtctgaccttaacttaatggatcccttattcaatcagtggcttctgtctttatgtctgttggcatatcaaaatggtttctgttcctagaaaagtaataacatatgcttatctttattctttttccaggtgatttgttttcaaatgctccttgtgaaaacacctagtgttgtagaaaggaaagtggccagaaagaacaacttgggaccatgagtaggtcattaaatagcttagtgatttatcctcatatagggcttataaaccctgtatgtgtttatatgtgcttcacagagttcgtgtcaggctcaaaggagatatgtataagaaagtggtttgtaaattatgttccatttcataaatagacactattcacaaactaaaatctaataaaaaaccacagttgtaatttaaactgcttgatataaaaagaggtatcatagcagggaaaacacactaattttcatacagtagaggtattgaaaactgaaaatgggaaggcaacttgaagtcattgtatttgattgaaaatgtttaatacatctcattattgacaaaatatgtcatcttgtatttatttcaaggaaaccaatgaattctaggtagtatattacaagttggtcaaaatattccatgtacaaatagggcttctgtgtccatagccttgtaagagatactgattgtatctgaaattattttttaaaaaaataaattatcctgctttagtgtgttaaaagtagacgatgttctaatataacactgaagtgcttcattgtatcccaacagtttaccttcaagtaatattatctttatttttaggctaagcacgtttgattattttgtctgtctcctatatagatctgttttgtctagtgctatgaatgtaacttaaaactataaacttgaagtttttattctatatgccccttaatagactgtggttcctgacgcacactgttaggtcattattttgttgtaccaaagttctagtggcttcagaaatcatagcatccaatgattttttggtgtctggctatgaatactatggttgagaattgtattcagtgattgtttctgcacacttttcaaataaaaaatgaatttttatcaatta

SEQ ID NO: 49136 - DNA, 3071 bp, Homo sapiens
  misc_feature (878)..(878): n is a, c, g, or t
tccagtaaggtgtgcccagctttcttctgggcacagacaagaaagatggaaagtataggttaaagtccccactctaaagtgctttacattttaaatgtggaccacaaaagtgcccacgagccaaaaagattccaagaagctgtgtaagcaaatccatgattgaatgttacaaacgtgtgtataaagtgctgtgagatcagaaagccaggaagtggtcttaaaaaaaaaaaactacaaccaaatcttctctctgggttcttcaggcaatttctctgcccacattcccatttccctaagatattccataagggccagtcacggagaattcatacctgaaagggaaactgttatttgtgttgttgtcaaagatatgtggactaactttcagaactacccactgtgtttccttggcaggttccggagtctcaccactgcatttttcagagacgccatgggcttcttattaatgtttgacctcaccagtcaacagagcttcttaaatgtcagaaactggatgagccaactgcaagcaaatgcttattgtgaaaatccagatatagtattaattggcaacaaggcagacctaccagatcagagggaagtcaatgaacggcaagctcgggaactggctgacaaatatggctgcaaattgagtacactgggaatcaacaaatttgatgaagcctgtctgtctcttcaccagtggagttgttcattgttctgcatctctcttcatttaaaaaggatacacaattctttcctcattgcatattacaccaaacgtttgagggaaaaatcctcattcgtaaaggattttggatttataatctaaaactcaacaataaagaaataatattccaagtctctggtttcctaanatacataataactgtttataaagaaggtctaagagctgatatttgccaaagtgatagaagagttgttttttcctctctactaccaagctttaagacattaaaagaagtctagtgtatttgaatattttagagaaagctttatcattttttaagatgccaagatgctgcctacgtttgcaaaagttgtctaagaattcaccatgagctatattttcttctggatctttgaccaaggtgatgtcagcttatttctggggaaggtgttgagctcttatacatgaaaatggatataggctattctctgggatgagtgtcatttcaatgctttataaatccatgaagctgcttgtctcataaagtagaactgatacaaattttggttggatatatagagaattttataaatgtattgccttagaatttctgggtggagacccaactacaatgacattgtcatgcaagaactataaagataattagagttaaaagttgtttaaattgtgcccttaaatacagcagaacctggagaaggtcatacttcaaaggtcgattttgagtccgaataaagaaagacctagtaacagatagtttttttttgttcattttcttctaccaagtagaggtttatgccctcagaactaaactagtaaaaatatctgaacaaaaaacctttcgttgttggcataaaaatgtgatacacttagagacattttgtttattgcatataaatctaatttttccataaattagatttatgatattttcataaagcacttgattagtttttcaaggcgtaccatcacaaagatgctttcctgcagagttctttgtatcaacagcctatggttgagatgttttctcatttcctgtagagagagaataccactaacaaacaagcaaaaactttagtgccaaaatagtggaactattttgtcatcttttgagaaaaaaatatacaaagaagtcatcttttcattaagtggattccctggttcctttccagctggttgtggaagtaatggctaacatccttcagctgactttgtctacaaggattattagcaaattctgtaggagcaagcatgtctgaccttaacttaatggatcccttattcaatcagtggcttctgtctttatgtctgttggcatatcaaaatggtttctgttcctagaaaagtaataacatatgcttatctttattctttttccaggtgatttgttttcaaatgctccttgtgaaaacacctagtgttgtagaaaggaaagtggccagaaagaacaacttgggaccatgagtaggtcattaaatagcttagtgatttatcctcatatagggcttataaaccctgtatgtgtttatatgtgcttcacagagttcgtgtcaggctcaaaggagatatgtataagaaagtggtttgtaaattatgttccatttcataaatagacactattcacaaactaaaatctaataaaaaaccacagttgtaatttaaactgcttgatataaaaagaggtatcatagcagggaaaacacactaattttcatacagtagaggtattgaaaactgaaaatgggaaggcaacttgaagtcattgtatttgattgaaaatgtttaatacatctcattattgacaaaatatgtcatcttgtatttatttcaaggaaaccaatgaattctaggtagtatattacaagttggtcaaaatattccatgtacaaatagggcttctgtgtccatagccttgtaagagatactgattgtatctgaaattattttttaaaaaaataaattatcctgctttagtgtgttaaaagtagacgatgttctaatataacactgaagtgcttcattgtatcccaacagtttaccttcaagtaatattatctttatttttaggctaagcacgtttgattattttgtctgtctcctatatagatctgttttgtctagtgctatgaatgtaacttaaaactataaacttgaagtttttattctatatgccccttaatagactgtggttcctgacgcacactgttaggtcattattttgttgtaccaaagttctagtggcttcagaaatcatagcatccaatgattttttggtgtctggctatgaatactatggttgagaattgtattcagtgattgtttctgcacacttttcaaataaaaaatgaatttttatcaatta

SEQ ID NO: 49137 - DNA, 1303 bp, Homo sapiens
cactcgcagtcctgacgggcaggggctgcggaccgcccggccttggacccatccggagccacaggttggaggagataagtagctgtccccgtgctcatcgccctgtggagcagatcctgtctccttgctgacggtggagcccgggagttccagggcttgggaaggggaaggaaacctctctgaaatctgacacctgctctcccggcaaggaaacttcgcaggctgaccgaccaagaccatcactatgaccgatggagactatgattatctgatcaaactcctggccctcggggattcaggggtggggaagacaacatttctttatagatacacagataataaattcaatcccaaattcatcactacagtaggaatagactttcgggaaaaacgtgtggtttataatgcacaaggaccgaatggatcttcagggaaagcatttaaagtgcatcttcagctttgggacactgcgggacaagagcggttccggagtctcaccactgcatttttcagagacgccatgggcttcttattaatgtttgacctcaccagtcaacagagcttcttaaatgtcagaaactggatgagccaactgcaagcaaatgcttattgtgaaaatccagatatagtattaattggcaacaaggcagacctaccagatcagagggaagtcaatgaacggcaagctcgggaactggctgacaaatatggcataccatattttgaaacaagtgcagcaactggacagaatgtggagaaagctgtagaaacccttttggacttaatcatgaagcgaatggaacagtgtgtggagaagacacaaatccctgatactgtcaatggtggaaattctggaaacttggatggggaaaagccaccagagaagaaatgtatctgctagactctacatagaaactgaacatcaagaaccccaccaaaatattacttttaaaaacaatgacaaaccacacaattgttgttgagtaaaccacgcacaatggcatgtctttctttttctgccagaaaatctattttaagaaaccagaatagtcaacagtgttcaaaagaattgactagttatccctgaggccctttcaaacatgatcaaagaagaatttctaaaatattggatttacttcttatattgagtcagatgcatacttttagatttgcattggggaaaatgtactagctaaaaatggatacacaatgaagaattctatttggctaattaagaatgatatactatgtacacccaataagctgtactagaatgaataaattactgataaggttacaaata

SEQ ID NO: 49138 - DNA, 510 bp, Homo sapiens
tgcccacgagccaaaaagattccaagaagctgtgtaagcaaatccatgattgaatgttacaaacgtgtgtataaagtgctgtgagatcagaaagccaggaagtggtcttaaaaaaaaaaaactacaaccaaatcttctctctgggttcttcaggcaatttctctgcccacattcccatttccctaagatattccataagggccagtcacggagaattcatacctgaaagggaaactgttatttgtgttgttgtcaaagatatgtggactaactttcagaactacccactgtgtttccttggcaggttccggagtctcaccactgcatttttcagagacgccatgggcttcttattaatgtttgacctcaccagtcaacagagcttcttaaatgtcagaaactggatgagtaagtgggactgagtaatgtgcattggccgctttgggactcaactgccttaggtgcttgttggtcttgcaagatgaaaccagattgggtaccacagattaa

SEQ ID NO: 49139 - DNA, 3074 bp, Homo sapiens
  misc_feature (881)..(881): n is a, c, g, or t
agcgggcctttgctgttacacaggaagagagcaggcagcatcagtatcggctcagcatccttcccccttctgttcgattagaagctgatcgaagcaacagtgccataaagaaatgggctagatatttccagaggctgcaatctggaggcgtttggaggtaccgaccaagaccatcactatgaccgatggagactatgattatctgatcaaactcctggccctcggggattcaggggtggggaagacaacatttctttatagatacacagataataaattcaatcccaaattcatcactacagtaggaatagactttcgggaaaaacgtgtggtttataatgcacaaggaccgaatggatcttcagggaaagcatttaaagtgcatcttcagctttgggacactgcgggacaagagcggttccggagtctcaccactgcatttttcagagacgccatgggcttcttattaatgtttgacctcaccagtcaacagagcttcttaaatgtcagaaactggatgagccaactgcaagcaaatgcttattgtgaaaatccagatatagtattaattggcaacaaggcagacctaccagatcagagggaagtcaatgaacggcaagctcgggaactggctgacaaatatggctgcaaattgagtacactgggaatcaacaaatttgatgaagcctgtctgtctcttcaccagtggagttgttcattgttctgcatctctcttcatttaaaaaggatacacaattctttcctcattgcatattacaccaaacgtttgagggaaaaatcctcattcgtaaaggattttggatttataatctaaaactcaacaataaagaaataatattccaagtctctggtttcctaanatacataataactgtttataaagaaggtctaagagctgatatttgccaaagtgatagaagagttgttttttcctctctactaccaagctttaagacattaaaagaagtctagtgtatttgaatattttagagaaagctttatcattttttaagatgccaagatgctgcctacgtttgcaaaagttgtctaagaattcaccatgagctatattttcttctggatctttgaccaaggtgatgtcagcttatttctggggaaggtgttgagctcttatacatgaaaatggatataggctattctctgggatgagtgtcatttcaatgctttataaatccatgaagctgcttgtctcataaagtagaactgatacaaattttggttggatatatagagaattttataaatgtattgccttagaatttctgggtggagacccaactacaatgacattgtcatgcaagaactataaagataattagagttaaaagttgtttaaattgtgcccttaaatacagcagaacctggagaaggtcatacttcaaaggtcgattttgagtccgaataaagaaagacctagtaacagatagtttttttttgttcattttcttctaccaagtagaggtttatgccctcagaactaaactagtaaaaatatctgaacaaaaaacctttcgttgttggcataaaaatgtgatacacttagagacattttgtttattgcatataaatctaatttttccataaattagatttatgatattttcataaagcacttgattagtttttcaaggcgtaccatcacaaagatgctttcctgcagagttctttgtatcaacagcctatggttgagatgttttctcatttcctgtagagagagaataccactaacaaacaagcaaaaactttagtgccaaaatagtggaactattttgtcatcttttgagaaaaaaatatacaaagaagtcatcttttcattaagtggattccctggttcctttccagctggttgtggaagtaatggctaacatccttcagctgactttgtctacaaggattattagcaaattctgtaggagcaagcatgtctgaccttaacttaatggatcccttattcaatcagtggcttctgtctttatgtctgttggcatatcaaaatggtttctgttcctagaaaagtaataacatatgcttatctttattctttttccaggtgatttgttttcaaatgctccttgtgaaaacacctagtgttgtagaaaggaaagtggccagaaagaacaacttgggaccatgagtaggtcattaaatagcttagtgatttatcctcatatagggcttataaaccctgtatgtgtttatatgtgcttcacagagttcgtgtcaggctcaaaggagatatgtataagaaagtggtttgtaaattatgttccatttcataaatagacactattcacaaactaaaatctaataaaaaaccacagttgtaatttaaactgcttgatataaaaagaggtatcatagcagggaaaacacactaattttcatacagtagaggtattgaaaactgaaaatgggaaggcaacttgaagtcattgtatttgattgaaaatgtttaatacatctcattattgacaaaatatgtcatcttgtatttatttcaaggaaaccaatgaattctaggtagtatattacaagttggtcaaaatattccatgtacaaatagggcttctgtgtccatagccttgtaagagatactgattgtatctgaaattattttttaaaaaaataaattatcctgctttagtgtgttaaaagtagacgatgttctaatataacactgaagtgcttcattgtatcccaacagtttaccttcaagtaatattatctttatttttaggctaagcacgtttgattattttgtctgtctcctatatagatctgttttgtctagtgctatgaatgtaacttaaaactataaacttgaagtttttattctatatgccccttaatagactgtggttcctgacgcacactgttaggtcattattttgttgtaccaaagttctagtggcttcagaaatcatagcatccaatgattttttggtgtctggctatgaatactatggttgagaattgtattcagtgattgtttctgcacacttttcaaataaaaaatgaatttttatcaatta

SEQ ID NO: 49140 - DNA, 3619 bp, Homo sapiens
  misc_feature (947)..(947): n is a, c, g, or t
  misc_feature (3505)..(3505): n is a, c, g, or t
cactcgcagtcctgacgggcaggggctgcggaccgcccggccttggacccatccggagccacaggttggaggagataagtagctgtccccgtgctcatcgccctgtggagcagatcctgtctccttgctgacggtggagcccgggagttccagggcttgggaaggggaaggaaacctctctgaaatctgacacctgctctcccggcaaggaaacttcgcaggctgaccgaccaagaccatcactatgaccgatggagactatgattatctgatcaaactcctggccctcggggattcaggggtggggaagacaacatttctttatagatacacagataataaattcaatcccaaattcatcactacagtaggaatagactttcgggaaaaacgtgtggtttataatgcacaaggaccgaatggatcttcagggaaagcatttaaagtgcatcttcagctttgggacactgcgggacaagagcggttccggagtctcaccactgcatttttcagagacgccatgggcttcttattaatgtttgacctcaccagtcaacagagcttcttaaatgtcagaaactggatgagccaactgcaagcaaatgcttattgtgaaaatccagatatagtattaattggcaacaaggcagacctaccagatcagagggaagtcaatgaacggcaagctcgggaactggctgacaaatatggctgcaaattgagtacactgggaatcaacaaatttgatgaagcctgtctgtctcttcaccagtggagttgttcattgttctgcatctctcttcatttaaaaaggatacacaattctttcctcattgcatattacaccaaacgtttgagggaaaaatcctcattcgtaaaggattttggatttataatctaaaactcaacaataaagaaataatattccaagtctctggtttcctaanatacataataactgtttataaagaaggtctaagagctgatatttgccaaagtgatagaagagttgttttttcctctctactaccaagctttaagacattaaaagaagtctagtgtatttgaatattttagagaaagctttatcattttttaagatgccaagatgctgcctacgtttgcaaaagttgtctaagaattcaccatgagctatattttcttctggatctttgaccaaggtgatgtcagcttatttctggggaaggtgttgagctcttatacatgaaaatggatataggctattctctgggatgagtgtcatttcaatgctttataaatccatgaagctgcttgtctcataaagtagaactgatacaaattttggttggatatatagagaattttataaatgtattgccttagaatttctgggtggagacccaactacaatgacattgtcatgcaagaactataaagataattagagttaaaagttgtttaaattgtgcccttaaatacagcagaacctggagaaggtcatacttcaaaggtcgattttgagtccgaataaagaaagacctagtaacagatagtttttttttgttcattttcttctaccaagtagaggtttatgccctcagaactaaactagtaaaaatatctgaacaaaaaacctttcgttgttggcataaaaatgtgatacacttagagacattttgtttattgcatataaatctaatttttccataaattagatttatgatattttcataaagcacttgattagtttttcaaggcgtaccatcacaaagatgctttcctgcagagttctttgtatcaacagcctatggttgagatgttttctcatttcctgtagagagagaataccactaacaaacaagcaaaaactttagtgccaaaatagtggaactattttgtcatcttttgagaaaaaaatatacaaagaagtcatcttttcattaagtggattccctggttcctttccagctggttgtggaagtaatggctaacatccttcagctgactttgtctacaaggattattagcaaattctgtaggagcaagcatgtctgaccttaacttaatggatcccttattcaatcagtggcttctgtctttatgtctgttggcatatcaaaatggtttctgttcctagaaaagtaataacatatgcttatctttattctttttccaggtgatttgttttcaaatgctccttgtgaaaacacctagtgttgtagaaaggaaagtggccagaaagaacaacttgggaccatgagtaggtcattaaatagcttagtgatttatcctcatatagggcttataaaccctgtatgtgtttatatgtgcttcacagagttcgtgtcaggctcaaaggagatatgtataagaaagtggtttgtaaattatgttccatttcataaatagacactattcacaaactaaaatctaataaaaaaccacagttgtaatttaaactgcttgatataaaaagaggtatcatagcagggaaaacacactaattttcatacagtagaggtattgaaaactgaaaatgggaaggcaacttgaagtcattgtatttgattgaaaatgtttaatacatctcattattgacaaaatatgtcatcttgtatttatttcaaggaaaccaatgaattctaggtagtatattacaagttggtcaaaatattccatgtacaaatagggcttctgtgtccatagccttgtaagagatactgattgtatctgaaattattttttaaaaaaataaattatcctgctttagtgtgttaaaagtagacgatgttctaatataacactgaagtgcttcattgtatcccaacagtttaccttcaagtaatattatctttatttttaggctaagcacgtttgattattttgtctgtctcctatatagatctgttttgtctagtgctatgaatgtaacttaaaactataaacttgaagtttttattctatatgccccttaatagactgtggttcctgacgcacactgttaggtcattattttgttgtaccaaagttctagtggcttcagaaatcatagcatccaatgattttttggtgtctggctatgaatactatggttgagaattgtattcagtgattgtttctgcacacttttcaaataaaaaatgaatttttatcaattaaaaaaaaaaaaaaaaaaaaaaaaaaaaaaatttttggggggttgggtggaaaagtttttaaaaccttggtgggggggggggcccgggggttaggtgaacactgggcccaagaactcggtgcccagaggaagaaccgcggccccaggaaccaaagtggcttcggggtttctcccccaaataaaaaaaccgccgcggggggccaccacgcgagggtttttcggaaaacacaaaattcccgaaagggcagttccgggggagcgaccccataaccggggcgctccttaatcacaaccagcggagggtcgccagagcggaaggatggcgaaatattaaaaatttaggccgcagcggccggggtggtagcncacttgaccacagtctgatctcatacatacatcacacagacaccacatccaacatccactaactaccacccagtcgctcccaccacactctctgcccataccctccacagacac

SEQ ID NO: 49141 - DNA, 491 bp, Homo sapiens
tgatctgcccacctcggcctcccaaagtgttgggattacaggtgtgagccacttcacacggcctatacctttaacttgaaatttactttttaaaaaataggacaaaataattttaaaatgtggtaggattctgttgtaatgcaatggaataacagctatatcagtaaaactgttgaggctgttcatttatttaaaaacctaagcaattgtggtgtgtataccaggagcagcaaattctgataatttatagttgggagaataattttcctctgggctggtctagagattatatttatagggaccctctgaagattcaaaaataagaattgtcaagaggggataatcagcatttcaagagaggaataaccagcacttgttaaaacacctgctctttactgggtccctctgtgtgtctggtacttcacatacattctcctattaaagcttttcaacagtctctggaggtattagccatcttgagagagaaaaaa

SEQ ID NO: 49142 - DNA, 456 bp, Homo sapiens
ctgctacaagccccatgagcaaggctgttcccactgacagagctttcccaggatgacagagagtgcgctctgcctctctggggtgtgctagcctacgaggggcaatcgtaaggcgaatgtcactgaaagaacacaagtgtccttaaacatggactatctgggctttctagtgctgaaattcttcccactcccactgcccacttcccattatgtaaaaaacacagttgtttcatgtttttgtttctttactgtttttctttgtttttgttaagaatgcattcatttattcaaaattgtttattgtagaataatcaggcattgcgctaagcactgaagaatataacaaaacaaaaacaagtctctaccttaaggagtttgcatgcttgcaggggagacagacattaacaaataattatacaattaaactgtaattgtgacaggtgccatgaatgaata

SEQ ID NO: 49143 - DNA, 422 bp, Homo sapiens
ctattttgtatcacagtaataaagcaacttttagtgtttagcctgtgtaaatggcacctccctattcttttcttactgtcctttgcaaccctgaagttcagataagaagcaaaggacagtgccagctccatggccattgtcctcagtgcctggtgtcgtgctggtctaaaagcctcataagcccccttaaatgcctcctcctacattccctaagtgtttcactcagaggttggctatcctcttttctgtgtatccttcctaaccagtgatccctcagtaatgcaaggttagcattggttaaagtgagatattattgtccatccccaaagtggtttatactaccaggcaggcagtgtagaaagcctttgatttcatgcagaatgcttgctagttatcttttgtgtcactttaaacgaattgat

SEQ ID NO: 49144 - DNA, 372 bp, Homo sapiens
gatctgagctgcgtcatcaggccagtgtcacaccgtcatttatgtgtcctcctcgagcagtgcaagtctatcatcctgggtgcgggaatggaacataactatttggggagatgttaaatggaagtgttagcttccctccataagagctcacttaaattttttttttaaattgaaatcaaatccagaaaccataaaaatgtcccattttaaagtgtacattcacaaggttgcataaccaccacaatgatctaattccaggacattttatcaccccaaaaagtagtcgctgcctgtcagcagtcattctttctcatctggcatggcaaccacgaatctactttctgtctctatagatttgcttattttgaacat

SEQ ID NO: 49145 - DNA, 702 bp, Homo sapiens
ttaaatgcaaataaaatagctttaaaaaaccctcaaagaaaatttagcacaaaaattggatgtaaacgcatctaatagtgtacaaaatataaagctagattactttttacagcaacttgatagtaacaaatctccaattattttccatatgaataaatgagacatcaaatgcatacatataatttactcctataaatttagcaaaatgcaaataaaaattataaaacttttcaagttagaaagtggtttaattctttagttctgttttttttttttttatttcctatcttctcctaaagacagtgtctcttttcaatctctaattactcaattagcatttaaaagttagttggggaataactgtgcttcctctagggagaagcaggatcatggatccatgcaagttaattaatgtcgtatctccatcattcatttccctctaaaaaggaaataaccctactccagcagaaaaaaaaaaggagaataaaaattcacaaaattaaatactgtttggcaccaattggttgtctatgctatttaattctggtagttattgataagaaacaagtaaggaaccttacagtcattcatgactccccttcttcctcaccttccacatccaatcaatcactaaaacatgcctaaacagacacctctcttgtttgttccttccggatgttactatttaaacaggtcacaggc

SEQ ID NO: 49146 - DNA, 173 bp, Homo sapiens
ataacaggcatgaaccagtgtgcccagccaccctccaggtctttagatgccagcgtcaactcagagcctgtgtccatcggtcctacaatgtgaggggtctctgtgccagagtgctcagccctgtgagtaaatgccacgttcctttgcgagaacattccagcaaatgctggcag

SEQ ID NO: 49147 - DNA, 436 bp, Homo sapiens
gagactttacagaggtgattaaggatttggggatgaagcagttatccaggattatctgggtaaggtgggcctgatgtagccacaaggggcctcctaagtgaaagagagaggtagggtggtcagaactagagagaggtttgaaggtgttacaccactagctttgaaggcagaggaaggggccacaagccaatgaatatatgtggtccctagaagctggaaaaggccagggagtggattcttctctagagtctccagaagaaatgtggcccttctgacaccttcatttagtccacagaactataatttatcttagtttaagccactggtaagtgtaattgtaattgtaatttgttacatctgctatagtgaaactaatactgaaatttagaaaagatgggtaacttattatgtggtgaagtttaaaaaagataagtaa

SEQ ID NO: 49148 - DNA, 3281 bp, Homo sapiens
cagcgttcacctctcagccaagtccaatagcactcacttaggtgtgcatctgtggctttctctctgtctggtcagtgctcctttatatgtccataccccctgccagagggcagcattgagggtgtacagagcccagtgtgactctcctgcagctggggacatagaagagctctgtgacgatggcagatgtggttctccagcctcttgcctggctgccagtgggagtagcctgtctgttctggcacagggggctgttccatatggagggtcagaaactggccttcacagccacccaggcgttccttccacttctgcacgtcttcctttccccatgaagatttgggtgtaccctggttgtggtctctgaagactgggcaggcctgtactttgtgaagctttcagctgtctctggtaggcctgatgaagcctatctgcagaggttggcctgaagccataatgagcagttctgttctttttagcccttgtctagtttatggctctgttgcagacatgcctttctgtgtcttggttaaaagtactggtgtgtctttgcatttaggtgtggtctgtgagtctgggaaagcttctagaggagagccctccagggttgctctttggggtgggagtagtgggagcggaaatggaacgctgactgccctcttaaagccagaagggtacttcattcagggcaggcagttggcatgtgtaggcactcaggagtcttccttcagtttcagcggccggtgttcatcatcaggagtggcagggttggatatgggagtgagaatgtgcctctgagattgaccagtggccatagactccagcaagatgtgcatcttggtctgagaggcacccactgtaccagaaaccagacttgtatcgaccaatggcttatcagccccaggaggcttattactgccacaaatgtccctgatggtgagcagcacttggccactactgtctgatgttaaccagagttatgggggtggtttctgcaaatacacaatactgtggaggggttatgtggcttacccagaggtgcccagatagcaaatgaaggtgtaagattggaatccctgtctttctggttgacccttggcttggctaatcattcattcattcattccacacacattgatgaatgccgactctgtactgggttctgttctaggaactagacagacacatcacctatgctgctcttgtggggcttctgttccgctgggggagacagtcagtagtaagccttcaagcaaaggcatggctgctggtgtgatgagtgccatgaagacccataaggctgcgttaaaggagatgggtggtccaggaaggcctctctgaggaggtggcatttgagcactcaagtgccttacactggacttctgaccccatgagctggaacttaggatatctgatctagaagtacctctagaagtcctcttcccaataaacaagctaaggcccagtgagcttaaggtgtgaattcatggggtgattcatgggaaagatgaaattaaacccaagaaggacaagtataatagccggccactgctctgctcacaccagccttgggctccagccctctgccttttcatcccagaatgtgttttattatcttcaagactcagccctttgaaagatttagactgccaaattgcatttattaacaataataaatctattttctcatggctgggtgtggggagggggtagaaattttaaacacatttgtgacggttgatcagccctccaggtaaggcaacggctgactgcctggagctggtgtttttcctgcctaggcggagacaccgcccaattttgtaccaccagctgctgtcactgtcagagtggaatttccattggtgtttctgaaatagcagtgtttcctggaggacccccatttgtactttctggattccatctggacctggtttagggggttagatgcttttgaatgggggctggagagaccctactgatgcctctgaccagagatggtgaggcaggactcacagggcccccagggtttattttagggagagagaagcccacagttaaatcagaggtcacaaatacagcagcagaccccacctctcccaaggaccagactgagctataattggccaataatttcatctaaaagcaggaatcctacatcaatttgaaaggagcttctggctgaagtaagactttattaattagcctgttaggaaaatagtttcccagtattatgagggctggataatttcatgcccactgtttttcttgaagcttctcaaaggcagacacagccgcgtgcagcggctcacgcctacaatctcagcacgttgggaggtcgaggcaggtggatcacgaggccaggagatcgagaccatcctggccaacatggtgaaaccccatctctacaaaaatacaaaaattaattgggcgtggtggtgggcgcctgtaatcccagctactcaggaggctgaggcaggagaatcagaggttgcagtgaaccgagattgtgccactacactccagcctggccacagagcgagactcagaaaacaagggaagacactagattttcatttttgtactaaatagaaaaagtaatatctttttaaaaatgtgttttgtttgtttttaactgtttgttcatgccaatgtgccaggcaccatatttattctttaatctatacagaaatgctgctggatgaatggaattatgctcactctgccaatgagggaaccaaggctcagaaaggttaagtaaccaacctaaggtcaggtagtactgaggagctgtgcttggatacaaaaccaggtcatccaacctggaatcttagctttgacccccaaccttctcccggcaactttgatgataatatggaaataccttagactcttgacttgactttactttctcttctctgttataaaatctgctacattccttttcctgggaaagcgaaatagattatgccaaaagttctgatttttaaaaatgttttattgtgggccgggcgcagtggctcatgcctgtaatcccaggactttgggaggccgaggtgggtggatcatgaagtcaggagatcaagaccatcctggccaacacagtgaaaccccatgtctactaaaaatacaaaaattaactgggcttggtggtgcacgcctgtaatcccagctactcaggaggctgaggcgggagaatcccttgaacctgggaggcggaggttgtagtgagccgagattgtgccactgcactccagcctggcaacagagcaaggctccgtctc

SEQ ID NO: 49149 - DNA, 961 bp, Homo sapiens
cccttgaggaaagcccagcgacgccgggccagcgcattcttattttatgtatgagcaaactatggaatggaaaagagattatgagttattacttgatttgatttgccctaagtgttttttaaacgaagatctggcaagagttagcgtgcagttctacattgtgacaattcatgagagctaaggactggctgtctcttgggacaaataggctttcttgagtctgcatgaggccctcaccagatacagccacctgatcttggacttcacagcctccagaaatttcctaggaaagaagttgtttcaactctcattggaggaagtataaggtgatctcagggaaggggagaagggctggttgcctgccaaatctatgatcaagtcggctccacagtcactttgcttccacttctaagtgagaacatacagtgtttggtttttcattcctgagttacttcacctagaacaatggcctccagctccatccaagttgctgcagaagacatttcattccttttatggctgagtagtattccatgtccagtgattcaagtttgacacaccacaccacggtggatgtgccttgtcatgacacatcttctcagcagcactagaagatacatccaaagtcctgtgagcaaggacacagcgagaagatggctgtctacaagccaggaagagagtcctcaccagaaccaaaccctgctggactttgatcttggacttcccagcctctaaaactgtgaagacataaatttctgttgttaaacccacacaggtctgtggtatctgtttattatggcagcccagtaagactaagacaggccatcacaagacatgaatgttttggaccttctcttgggccctagtaaacagaaatcaggtacgcaaaaggggtaagcatataatttcctttatttttatttttaatgtgtaagccttaggtttttatttatttatttgg

SEQ ID NO: 49150 - DNA, 629 bp, Homo sapiens
cttttatttagaagacaacataaaaattaaaagagaaaaaatatcccccatattcataatacctctctatggactattcttttgtgggataaggtaggtgggagaatggaagagtagcagacccattagaatacaaaacatatgccctggaatacacttgtgtcagtgacaaatgctgctttgctgtgctacatcgagtacaagtccagtgattcaagtttgacacaccacaccacggtggatgtgccttgtcatgacacatcttctcagcagcactagaagatacatccaaagtcctgtgagcaaggacacagcgagaagatggctgtctacaagccaggaagagagtcctcaccagaaccaaaccctgctggactttgatcttggacttcccagcctctaaaactgtgaagacataaatttctgttgttaaacccacacaggtctgtggtatctgtttattatggcagcccagtaagactaagacaggccatcacaagacatgaatgttttggaccttctcttgggccctagtaaacagaaatcaggtacgcaaaaggggtaagcatataatttcctttatttttatttttaatgtgtaagccttaggtttttatttatttatttgg

SEQ ID NO: 49151 - DNA, 1014 bp, Homo sapiens
tgtgttactgttattcctggtaaatcattcagaagaaataaattttcttgccactcaaaattaactagtatggtgcattgctgccccaccccccaaaagatgagttgacagctactgggcattaatctagccattttttgataacagagtatctctttgcacatagttatgagagttataaacattccaaatgtaattatctcagtcctttacaacttggaagtctaattaaagaaagtttaagatactataaatcttaaggaattaggtttataatgtggaacccagtcagagtttgggattacattggaaagtgagtatattgaaaaggattgcagaaacatttctctcagccagaatttaattgctcagaaaactgaatttcagtaaaatagatgaaaagtggtaggcagagagactcagacctatgactgctgaagaaagagctaattccatatccctttttctagatgccctggaatacacttgtgtcagtgacaaatgctgctttgctgtgctacatcgagtacaagagaaatacatgggctatcttcagcacagaacacaaactctgccttcttttctcaagtccagtgattcaagtttgacacaccacaccacggtggatgtgccttgtcatgacacatcttctcagcagcactagaagatacatccaaagtcctgtgagcaaggacacagcgagaagatggctgtctacaagccaggaagagagtcctcaccagaaccaaaccctgctggactttgatcttggacttcccagcctctaaaactgtgaagacataaatttctgttgttaaacccacacaggtctgtggtatctgtttattatggcagcccagtaagactaagacaggccatcacaagacatgaatgttttggaccttctcttgggccctagtaaacagaaatcaggtacgcaaaaggggtaagcatataatttcctttatttttatttttaatgtgtaagccttaggtttttatttatttatttgg

SEQ ID NO: 49152 - DNA, 786 bp, Homo sapiens
  misc_feature (102)..(102): n is a, c, g, or t
  misc_feature (107)..(107): n is a, c, g, or t
ggactgctgctcggtgatgtcttgaggaaaaccgctagtgaggccgggcccatcgcattactgattctgattgaagcatcgtgtgccgtagcaggtttagcngtgcnagcttctagcattgttgagtgtgctatgatagcataatgactgggcgtctttttacaacgctaggcttcttgagtctgcatgaggccctcaccagatacagccacctgatcttggacttcacagcctccagaaatatgccctggaatacacttgtgtcagtgacaaatgctgctttgctgtgctacatcgagtacaagagaaatacatgggctatcttcagcacagaacacaaactctgccttcttttctcaagtccagtgattcaagtttgacacaccacaccacggtggatgtgccttgtcatgacacatcttctcagcagcactagaagatacatccaaagtcctgtgagcaaggacacagcgagaagatggctgtctacaagccaggaagagagtcctcaccagaaccaaaccctgctggactttgatcttggacttcccagcctctaaaactgtgaagacataaatttctgttgttaaacccacacaggtctgtggtatctgtttattatggcagcccagtaagactaagacaggccatcacaagacatgaatgttttggaccttctcttgggccctagtaaacagaaatcaggtacgcaaaaggggtaagcatataatttcctttatttttatttttaatgtgtaagccttaggtttttatttatttatttgg

SEQ ID NO: 49153 - DNA, 395 bp, Homo sapiens
atgtttcaaaagaatctgcccaaacatatgatctccatcaactgtaaagttagggcctggaatcacacctttcattttctttttgtctcctttagcagccctgaagagttttcaccaaattgcaaactggagtcaggtaataatgtttgtttctgagctttcagaggaagctgtttattttagtaggcaattttcatgtgtgatgaagtgaaatgttgagaaggcagcctctcatcagtggacaaacaatgcctaagaatttagctaatggccccccttcagtgcagagaatagatggtaacaattggacttgcatactagacccagagctacttgtttggctgctaggtgttaatgcaaatttgttcttcagctcattcaaccctggggctccc

SEQ ID NO: 49154 - DNA, 635 bp, Homo sapiens
tagttcctatcctgaactacacactgaagttccactgtctgtcttaattctgggattgcttgttgttttcatcttatctgtctgttttggggctggtttattcgtctttgtcttgaaacgccgaaagggagtgccgagcgttcccaggaataccaacaacttagacgtaagctcctttcaattacagtatgggtcttacaacactgagactcacgataaaacagacggccatgtctacaactatatccccccacctgtgggtcagatgtgccaaaaccccatctacatgcagaaggaaggagacccagtagcctattaccgaaacctgcaagagttcagctatagcaacctggaggagaaaaaagaagagccagccacacctgcttacacaataagtgccactgagctgctagaaaagcaggccacaccaagagagcctgagctgctgtatcaaaatattgctgagcgagtcaaggaacttcccagcgcaggcctagtccactataacttttgtaccttacctaaaaggcagtttgccccttcctatgaatctcgacgccaaaaccaagacagaatcaataaaaccgttttatatggaactcccaggaaatgctttgtggggcagtcaaaaccca

SEQ ID NO: 49155 - DNA, 2542 bp, Homo sapiens
ctttgaggtcttgtggtctgattcttcaataacatcagtaaccaaatcttcctctgaagtgacggaatttatttcaaagctatgtcagctctatcctgaagagaacttggagaaactcattccttgcttagctggtccggacgcattttatgtggagcgaaaccacgtggatctggactcaggcctgaggtacctggcctcattaccttctcacgtgttgaaaaatgaccatgtcaggaggtttctcagcacttcctctcccccacagcagcttcagagtccaagtcctggcaatccctccctttctaaagtaggtaccgtgatgggcgtgtctggaaggcctgtgtgtggagtggctggtatcccgtcctcgcagagcggagcccagcaccacgggcagcacccggccggctccgccgcccccttgcctcactgctcccatgcgggcagcgcgggctcagccctggcctaccggacccagatggacacatcacctgccatcctcatgccttccagtctgcagacccctcagacccaggagcagaatgggattctagactggcttaggaaactgcgtttgcacaagtattaccccgtctttaagcagctctccatggagaagtttttgagccttactgaagaagatctgaataaatttgagtctcttaccatgggggcaaagaagaagctcaagacccagctggagctggaaaaggagaagtcagagagacggtgcctgaacccctcggccccgccgctggtcaccagcagtggtgtggctcgagtgccccccaccagccacgtcgggcccgtgcagtcggggcggggcagccatgcagcagagctgcgggtggaagtggagcagccccatcaccagctgccccgggaaggcagttcctcggagtactccagctcctcctccagccccatgggggtacaggcccgggaagagagctccgacagcgctgaggagaatgacagacgtgtggagattcacttggagagctctgacaaggagaagccggtgatgctgctgaatcacttcacttccagttccgccagacccacggcccaggttctccctgtgcagaatgaggccagctccaatccatcaggccaccaccccctgcccccgcagatgctgagcgcagcctcacacatcacacccatccgcatgctgaattccgtgcacaagccagaaagagggagcgcggacatgaagctcctctcgtcttctgtgcactcacttttgtctctagaagaaaggaataaaggatctggaccaagaagcagcatgaaagtggacaagagctttggcagcgccatgatggacgtgctgcccgcgtccgcaccccaccagcctgtgcaggtcctctctgggctttcggagagcagctccatgtcacccacagtctcctttggtccccggaccaaagtcgtgcatgcatccacgctggacagggtgctgaagacagcacagcaaccggccctggtcgtggagaccagcacggccgccacggggacgcccagcacagtcctccacgccgcccgtccgcccatcaaactgctgctgtcgtcatctgttcctgctgattctgccatttctgggcaaacttcctgtcctaataatgtgcaaataagtgtgccccctgcaataataaacccccggactgctctgtacacagccaacaccaaagttgccttttctgcaatgagcagtatgccagtgggccccctgcagggtggcttctgtgcaaacagcaacactgcctctcccagcagccacccctccacgtcctttgccaacatggccacgttgcccagctgcccagcccccagctccagcccggcgctgtcctccgtccctgaaagcagtttctatagcagcagtggcggtggcggctccacaggaaacattcctgcctcgaatccgaaccaccaccaccaccaccaccatcagcagcccccggcacccccgcagcccgccccacccccgccaggctgcattgtgtgcacgtcctgtggctgcagcggcagctgcggctcgagtggcctgactgtcagctacgccaactacttccagcacccgttctccggtccgtccgtgttcaccttccccttcttgcccttcagtcccatgtgcagcagcggctacgtcagcgcccagcagtacggcggcggctccaccttccccgtcgtgcacgccccttacagcagcagcgggaccccagaccctgtcctgagtgggcagtccacgtttgccgtgccacccatgcagaacttcatggcagggacagcaggggtgtaccagacccaaggactggtgggcagtagcaatggttccagtcacaaaaagagcgggaacctatcttgttacaactgcggggccactggtcaccgcgcccaggactgcaaacagccgtccatggacttcaaccggccaggtaagcgcgcgccatggccgcgcccaccaggctcccgcaggaccagtgcacacaaatgcttggtttttatgaagagtaaacttctttctttgtaaagc

SEQ ID NO: 49156 - DNA, 6533 bp, Homo sapiens
ctttgaggtcttgtggtctgattcttcaataacatcagtaaccaaatcttcctctgaagtgacggaatttatttcaaagctatgtcagctctatcctgaagagaacttggagaaactcattccttgcttagctggtccggacgcattttatgtggagcgaaaccacgtggatctggactcaggcctgaggtacctggcctcattaccttctcacgtgttgaaaaatgaccatgtcaggaggtttctcagcacttcctctcccccacagcagcttcagagtccaagtcctggcaatccctccctttctaaagtaggtaccgtgatgggcgtgtctggaaggcctgtgtgtggagtggctggtatcccgtcctcgcagagcggagcccagcaccacgggcagcacccggccggctccgccgcccccttgcctcactgctcccatgcgggcagcgcgggctcagccctggcctaccggacccagatggacacatcacctgccatcctcatgccttccagtctgcagacccctcagacccaggagcagaatgggattctagactggcttaggaaactgcgtttgcacaagtattaccccgtctttaagcagctctccatggagaagtttttgagccttactgaagaagatctgaataaatttgagtctcttaccatgggggcaaagaagaagctcaagacccagctggagctggaaaaggagaagtcagagagacggtgcctgaacccctcggccccgccgctggtcaccagcagtggtgtggctcgagtgccccccaccagccacgtcgggcccgtgcagtcggggcggggcagccatgcagcagagctgcgggtggaagtggagcagccccatcaccagctgccccgggaaggcagttcctcggagtactccagctcctcctccagccccatgggggtacaggcccgggaagagagctccgacagcgctgaggagaatgacagacgtgtggagattcacttggagagctctgacaaggagaagccggtgatgctgctgaatcacttcacttccagttccgccagacccacggcccaggttctccctgtgcagaatgaggccagctccaatccatcaggccaccaccccctgcccccgcagatgctgagcgcagcctcacacatcacacccatccgcatgctgaattccgtgcacaagccagaaagagggagcgcggacatgaagctcctctcgtcttctgtgcactcacttttgtctctagaagaaaggaataaaggatctggaccaagaagcagcatgaaagtggacaagagctttggcagcgccatgatggacgtgctgcccgcgtccgcaccccaccagcctgtgcaggtcctctctgggctttcggagagcagctccatgtcacccacagtctcctttggtccccggaccaaagtcgtgcatgcatccacgctggacagggtgctgaagacagcacagcaaccggccctggtcgtggagaccagcacggccgccacggggacgcccagcacagtcctccacgccgcccgtccgcccatcaaactgctgctgtcgtcatctgttcctgctgattctgccatttctgggcaaacttcctgtcctaataatgtgcaaataagtgtgccccctgcaataataaacccccggactgctctgtacacagccaacaccaaagttgccttttctgcaatgagcagtatgccagtgggccccctgcagggtggcttctgtgcaaacagcaacactgcctctcccagcagccacccctccacgtcctttgccaacatggccacgttgcccagctgcccagcccccagctccagcccggcgctgtcctccgtccctgaaagcagtttctatagcagcagtggcggtggcggctccacaggaaacattcctgcctcgaatccgaaccaccaccaccaccaccaccatcagcagcccccggcacccccgcagcccgccccacccccgccaggctgcattgtgtgcacgtcctgtggctgcagcggcagctgcggctcgagtggcctgactgtcagctacgccaactacttccagcacccgttctccggtccgtccgtgttcaccttccccttcttgcccttcagtcccatgtgcagcagcggctacgtcagcgcccagcagtacggcggcggctccaccttccccgtcgtgcacgccccttacagcagcagcgggaccccagaccctgtcctgagtgggcagtccacgtttgccgtgccacccatgcagaacttcatggcagggacagcaggggtgtaccagacccaaggactggtgggcagtagcaatggttccagtcacaaaaagagcgggaacctatcttgttacaactgcggggccactggtcaccgcgcccaggactgcaaacagccgtccatggacttcaaccggccaggtacttttaggttgaaatacgcccctccagcagaaagtctggactccacagattgatatttttctctggcaacagaacgttattaagccatggagacataaggaaaattaaatacaaaactgagaagtctagttgctgttgagcttaatctttttaatccaaaggtgctttacttttcctagactggatagaaaatctagcgtagaagtgcatcaaactcgatttattgccaaaaccctagattggagcttggtgtcagaactcgcctagtgggcatctctgtggctggtgagatcggccacctccacttttggttgcagtgcagagacgccatgtctcccgaagagcattgccatcactggccctcctaggctcacacgtcaattccagggcagctacacgtggtctgaatcgagaaccgagcttggagttctccaagtggagttccacccgccggactcctgacacccctgggctagggaaaatgtcgactttgttttgttctgttcctaaagtgattagcactaatctctgggatttttaaggattgcactacagaagaatgtaccctgatgtaaatctctgcggttctgggagccaaactcctctgagaacagtcagtgcaagagactccaataatccatattgaaagagtcagcaccagcagaggctactcgacttaggacgcaacagaggttttagtatttccttccctcctccaagcacttgtagcagtttcaggtttttaatttttttctgcaaataaatctaaactacgttattaaatagaaatagtttactcgcaacaacttaatttctaagggtccaagtcccagagaatccatagtcgtcaaagctttgagagtatctttcttcccagccagtcagtggctttgagccctatcttccactacaaatgacctctcgaggggggacggcgacagcgcggctctgtgagtggctgtgaggatgctgcacgtcctcagcagagtttgcaagttgctttatctcccacgggctccccaagaacctccaaccccgaggcttatcgctagcggattcacacctgagacagacatttcaacaatgatacagtcctgtcatttatcagcaaaagattgggaattttctcctgtcaacttcttttgtattaggctgtgtattgatagttaattccgttaaaaattacttggaaaacagtgggaagtggtaggactctggaagaggccacacacccgagagctgcgagatctgtgcaagtctggttttggttaggtagtaataaaagtcctcactgtagatctctaaatttcaacccacggaaatgaaagccttttgtctgaaatttacggacttaaatcttcaaggttaaagggaattttctgctcaaataatactcttatcgaaaatgctaaagtcttcaatgttaaaatactgattggtaaaatcttgcagttgggattttgcagttggatatttattttaaaaaaaattataatattcagactattcttaaaatgggacaatcagcctcatgaaaaattgatgtaaatcagaagaataccctagaatgaggccttgtgatgtgagcgttcaatttgaagagcagttcctaacttcatagaaacctaaagcagaaagttgttacattttttttatgacaggcttttagtagaattttttagttttattttagttgaattttatttctatgcaatgcagaattaacagacctcttctcctcatggtacacagtattacagtgttgaagtaatggtgatgcttattacaacagctatttaggggaatgttacgttgatctcttaaattgtaaacactacaaaatgtcaaaataatgagaactgacacaactttgccttaaagagtactagactggaccttctcatattacgtttaaggaagacttagagtgttcattgatgtttacgattttaatatttctgaaggccattacagtggcctggatatgtgctgaaagccaaacttttaaattttttggtttttttaagcaaagaaatattttaaataaatcctatttcaacactgaaattgttgaaaaccgtctcataacaaaaggaaaaaacattggaatttttgttttagtggtcagtataggggaatgaaagcgtctgttgttacccacgtaactattttgataagtattagaggttaaccttaaatccagcaaaacattaaaacagaaacttttcaacttggagcctgccattcagcgttgaggtagatgagttccgacactgtcacggctgtgttcccagcagcgaaggcctctgcggagctgccagtcgtcttgaacgtgcatgggcggcgtgtgacatctccagggaggccgtccgaagtcgagaatcgtcagctgtaagtaggagctacacagcgcagagaaaatggaaccacccatccgtgaggcctctttccggagggagccgcacacttggacttgagagtttgccagcagcgagctcggatgcatctctccaaaagccaccaaggtcggcgcgtctgaagagcgttttgcggtcatcagacttcctcatctgaaaacacagaacatactgaccctttcaagtacttagtcattttcctgaaagtgtggtctgtttcagaatgctgtggcaaccaggtaggtgtggcactggccatgtgccacgtctttgccctttgtagtctgtcagatattaaagtttctaaccctgtttttttaatctccaagaatggggaaagtggaatgtagagatggaagcagaacgtgatgtttggatacaacagctatttaatccttttttattttttaagcaaaacactcagttttctaccttattttctaatgttgatttcatggtaatactgacagttggaagtgtttaacataaaaactcattgctaaagagcactgaggaaatgggagctagcgcacttgtaataaaaataaagacaaaatattttcttgaatgcatatatgtgattgggtattttaaaaaccagtatcatctgtcatctccaaaagattataggagtcagcttgttaatacagtagtgttagtaggttctgtatttttaattcagtacttagaattctaggtcctttattgcccaaagtcagcacagttagtttataccacagactctgtcttggggcacagtagtggggcggggtagtgactttgcctaaacatcacccagctggaacagaggctgagcggggctttaggcacttgccagatgggaactgggttgcaccctccttgctccctgtcattttcttgtcactcttcctgcttcccagtgttttattttatgccttgctcgttgtacatcatgatgactgatggtcttcaaggttgtgaggaaagccgtctccctgcttgactcgactgctgtcccagaggagagtcctgtgcgacctgagcgggggtggctgccatttccagcatgcaggtgacttccaaagaatgagtcaggtggcactgaaagccatgggttctgaagaggcgaatttgttgaaaagtcccaagggtctgaatgaaagcatctttaatcaacactcaacactcgcaatattctagaaaaccatatactgtgctggttgaggccaaaggttaacattgctccactgttcaccaaggaagggggcagtggccatccgccgcggcctcacgtgcgttgtaacaagccctcatcacatgtgtgagtcttacgtgcacaaaaagagaaggctttggtactgaaactggacaccttgtgtactcgataccttcacagcttctattggacatattttctttttaggaatgaaggaaaattctcccatttttgagccattcttttgtcaattctacaaaattgcatgtaactttataaatatttttaaaagatatagttttgtaaatatttaatattccgctaatttgattttgaattgtaaatgtcaagtattctgtttttggggtttttatgttttattatactttgttaaaaaggacaaattgtacatttttagaatgtttttatgagtaaatttaatgtactgaaaataaaaattttaaaaaaggc

SEQ ID NO: 49157 - DNA, 6479 bp, Homo sapiens
ctttgaggtcttgtggtctgattcttcaataacatcagtaaccaaatcttcctctgaagtgacggaatttatttcaaagctatgtcagctctatcctgaagagaacttggagaaactcattccttgcttagctggtccggacgcattttatgtggagcgaaaccacgtggatctggactcaggcctgaggtacctggcctcattaccttctcacgtgttgaaaaatgaccatgtcaggaggtttctcagcacttcctctcccccacagcagcttcagagtccaagtcctggcaatccctccctttctaaagtaggtaccgtgatgggcgtgtctggaaggcctgtgtgtggagtggctggtatcccgtcctcgcagagcggagcccagcaccacgggcagcacccggccggctccgccgcccccttgcctcactgctcccatgcgggcagcgcgggctcagccctggcctaccggacccagatggacacatcacctgccatcctcatgccttccagtctgcagacccctcagacccaggagcagaatgggattctagactggcttaggaaactgcgtttgcacaagtattaccccgtctttaagcagctctccatggagaagtttttgagccttactgaagaagatctgaataaatttgagtctcttaccatgggggcaaagaagaagctcaagacccagctggagctggaaaaggagaagtcagagagacggtgcctgaacccctcggccccgccgctggtcaccagcagtggtgtggctcgagtgccccccaccagccacgtcgggcccgtgcagtcggggcggggcagccatgcagcagagctgcgggtggaagtggagcagccccatcaccagctgccccgggaaggcagttcctcggagtactccagctcctcctccagccccatgggggtacaggcccgggaagagagctccgacagcgctgaggagaatgacagacgtgtggagattcacttggagagctctgacaaggagaagccggtgatgctgctgaatcacttcacttccagttccgccagacccacggcccaggttctccctgtgcagaatgaggccagctccaatccatcaggccaccaccccctgcccccgcagatgctgagcgcagcctcacacatcacacccatccgcatgctgaattccgtgcacaagccagaaagagggagcgcggacatgaagctcctctcgtcttctgtgcactcacttttgtctctagaagaaaggaataaaggatctggaccaagaagcagcatgaaagtggacaagagctttggcagcgccatgatggacgtgctgcccgcgtccgcaccccaccagcctgtgcaggtcctctctgggctttcggagagcagctccatgtcacccacagtctcctttggtccccggaccaaagtcgtgcatgcatccacgctggacagggtgctgaagacagcacagcaaccggccctggtcgtggagaccagcacggccgccacggggacgcccagcacagtcctccacgccgcccgtccgcccatcaaactgctgctgtcgtcatctgttcctgctgattctgccatttctgggcaaacttcctgtcctaataatgtgcaaataagtgtgccccctgcaataataaacccccggactgctctgtacacagccaacaccaaagttgccttttctgcaatgagcagtatgccagtgggccccctgcagggtggcttctgtgcaaacagcaacactgcctctcccagcagccacccctccacgtcctttgccaacatggccacgttgcccagctgcccagcccccagctccagcccggcgctgtcctccgtccctgaaagcagtttctatagcagcagtggcggtggcggctccacaggaaacattcctgcctcgaatccgaaccaccaccaccaccaccaccatcagcagcccccggcacccccgcagcccgccccacccccgccaggctgcattgtgtgcacgtcctgtggctgcagcggcagctgcggctcgagtggcctgactgtcagctacgccaactacttccagcacccgttctccggtccgtccgtgttcaccttccccttcttgcccttcagtcccatgtgcagcagcggctacgtcagcgcccagcagtacggcggcggctccaccttccccgtcgtgcacgccccttacagcagcagcgggaccccagaccctgtcctgagtgggcagtccacgtttgccgtgccacccatgcagaacttcatggcagggacagcaggggtgtaccagacccaaggactggtgggcagtagcaatggttccagtcacaaaaagagcgggaacctatcttgttacaactgcggggccactggtcaccgcgcccaggactgcaaacagccgtccatggacttcaaccggccaggtacttttaggttgaaatacgcccctccagcagaaagtctggactccacagattgatatttttctctggcaacagaacgttattaagccatggagacataaggaaaattaaatacaaaactgagaagtctagttgctgttgagcttaatctttttaatccaaaggtgctttacttttcctagactggatagaaaatctagcgtagaagtgcatcaaactcgatttattgccctggtgagatcggccacctccacttttggttgcagtgcagagacgccatgtctcccgaagagcattgccatcactggccctcctaggctcacacgtcaattccagggcagctacacgtggtctgaatcgagaaccgagcttggagttctccaagtggagttccacccgccggactcctgacacccctgggctagggaaaatgtcgactttgttttgttctgttcctaaagtgattagcactaatctctgggatttttaaggattgcactacagaagaatgtaccctgatgtaaatctctgcggttctgggagccaaactcctctgagaacagtcagtgcaagagactccaataatccatattgaaagagtcagcaccagcagaggctactcgacttaggacgcaacagaggttttagtatttccttccctcctccaagcacttgtagcagtttcaggtttttaatttttttctgcaaataaatctaaactacgttattaaatagaaatagtttactcgcaacaacttaatttctaagggtccaagtcccagagaatccatagtcgtcaaagctttgagagtatctttcttcccagccagtcagtggctttgagccctatcttccactacaaatgacctctcgaggggggacggcgacagcgcggctctgtgagtggctgtgaggatgctgcacgtcctcagcagagtttgcaagttgctttatctcccacgggctccccaagaacctccaaccccgaggcttatcgctagcggattcacacctgagacagacatttcaacaatgatacagtcctgtcatttatcagcaaaagattgggaattttctcctgtcaacttcttttgtattaggctgtgtattgatagttaattccgttaaaaattacttggaaaacagtgggaagtggtaggactctggaagaggccacacacccgagagctgcgagatctgtgcaagtctggttttggttaggtagtaataaaagtcctcactgtagatctctaaatttcaacccacggaaatgaaagccttttgtctgaaatttacggacttaaatcttcaaggttaaagggaattttctgctcaaataatactcttatcgaaaatgctaaagtcttcaatgttaaaatactgattggtaaaatcttgcagttgggattttgcagttggatatttattttaaaaaaaattataatattcagactattcttaaaatgggacaatcagcctcatgaaaaattgatgtaaatcagaagaataccctagaatgaggccttgtgatgtgagcgttcaatttgaagagcagttcctaacttcatagaaacctaaagcagaaagttgttacattttttttatgacaggcttttagtagaattttttagttttattttagttgaattttatttctatgcaatgcagaattaacagacctcttctcctcatggtacacagtattacagtgttgaagtaatggtgatgcttattacaacagctatttaggggaatgttacgttgatctcttaaattgtaaacactacaaaatgtcaaaataatgagaactgacacaactttgccttaaagagtactagactggaccttctcatattacgtttaaggaagacttagagtgttcattgatgtttacgattttaatatttctgaaggccattacagtggcctggatatgtgctgaaagccaaacttttaaattttttggtttttttaagcaaagaaatattttaaataaatcctatttcaacactgaaattgttgaaaaccgtctcataacaaaaggaaaaaacattggaatttttgttttagtggtcagtataggggaatgaaagcgtctgttgttacccacgtaactattttgataagtattagaggttaaccttaaatccagcaaaacattaaaacagaaacttttcaacttggagcctgccattcagcgttgaggtagatgagttccgacactgtcacggctgtgttcccagcagcgaaggcctctgcggagctgccagtcgtcttgaacgtgcatgggcggcgtgtgacatctccagggaggccgtccgaagtcgagaatcgtcagctgtaagtaggagctacacagcgcagagaaaatggaaccacccatccgtgaggcctctttccggagggagccgcacacttggacttgagagtttgccagcagcgagctcggatgcatctctccaaaagccaccaaggtcggcgcgtctgaagagcgttttgcggtcatcagacttcctcatctgaaaacacagaacatactgaccctttcaagtacttagtcattttcctgaaagtgtggtctgtttcagaatgctgtggcaaccaggtaggtgtggcactggccatgtgccacgtctttgccctttgtagtctgtcagatattaaagtttctaaccctgtttttttaatctccaagaatggggaaagtggaatgtagagatggaagcagaacgtgatgtttggatacaacagctatttaatccttttttattttttaagcaaaacactcagttttctaccttattttctaatgttgatttcatggtaatactgacagttggaagtgtttaacataaaaactcattgctaaagagcactgaggaaatgggagctagcgcacttgtaataaaaataaagacaaaatattttcttgaatgcatatatgtgattgggtattttaaaaaccagtatcatctgtcatctccaaaagattataggagtcagcttgttaatacagtagtgttagtaggttctgtatttttaattcagtacttagaattctaggtcctttattgcccaaagtcagcacagttagtttataccacagactctgtcttggggcacagtagtggggcggggtagtgactttgcctaaacatcacccagctggaacagaggctgagcggggctttaggcacttgccagatgggaactgggttgcaccctccttgctccctgtcattttcttgtcactcttcctgcttcccagtgttttattttatgccttgctcgttgtacatcatgatgactgatggtcttcaaggttgtgaggaaagccgtctccctgcttgactcgactgctgtcccagaggagagtcctgtgcgacctgagcgggggtggctgccatttccagcatgcaggtgacttccaaagaatgagtcaggtggcactgaaagccatgggttctgaagaggcgaatttgttgaaaagtcccaagggtctgaatgaaagcatctttaatcaacactcaacactcgcaatattctagaaaaccatatactgtgctggttgaggccaaaggttaacattgctccactgttcaccaaggaagggggcagtggccatccgccgcggcctcacgtgcgttgtaacaagccctcatcacatgtgtgagtcttacgtgcacaaaaagagaaggctttggtactgaaactggacaccttgtgtactcgataccttcacagcttctattggacatattttctttttaggaatgaaggaaaattctcccatttttgagccattcttttgtcaattctacaaaattgcatgtaactttataaatatttttaaaagatatagttttgtaaatatttaatattccgctaatttgattttgaattgtaaatgtcaagtattctgtttttggggtttttatgttttattatactttgttaaaaaggacaaattgtacatttttagaatgtttttatgagtaaatttaatgtactgaaaataaaaattttaaaaaaggc

SEQ ID NO: 49158 - DNA, 4201 bp, Homo sapiens
cctccagcagaaagtctggaggggcgtatttcaacctaaaagtacctggccggttgaagtccatggacggctgtttgcagtcctgggcgcggtgaccagtggccccgcagttgtacttttaggttgaaatacgcccctccagcagaaagtctggactccacagattgatatttttctctggcaacagaacgttattaagccatggagacataaggaaaattaaatacaaaactgagaagtctagttgctgttgagcttaatctttttaatccaaaggtgctttacttttcctagactggatagaaaatctagcgtagaagtgcatcaaactcgatttattgccaaaaccctagattggagcttggtgtcagaactcgcctagtgggcatctctgtggctggtgagatcggccacctccacttttggttgcagtgcagagacgccatgtctcccgaagagcattgccatcactggccctcctaggctcacacgtcaattccagggcagctacacgtggtctgaatcgagaaccgagcttggagttctccaagtggagttccacccgccggactcctgacacccctgggctagggaaaatgtcgactttgttttgttctgttcctaaagtgattagcactaatctctgggatttttaaggattgcactacagaagaatgtaccctgatgtaaatctctgcggttctgggagccaaactcctctgagaacagtcagtgcaagagactccaataatccatattgaaagagtcagcaccagcagaggctactcgacttaggacgcaacagaggttttagtatttccttccctcctccaagcacttgtagcagtttcaggtttttaatttttttctgcaaataaatctaaactacgttattaaatagaaatagtttactcgcaacaacttaatttctaagggtccaagtcccagagaatccatagtcgtcaaagctttgagagtatctttcttcccagccagtcagtggctttgagccctatcttccactacaaatgacctctcgaggggggacggcgacagcgcggctctgtgagtggctgtgaggatgctgcacgtcctcagcagagtttgcaagttgctttatctcccacgggctccccaagaacctccaaccccgaggcttatcgctagcggattcacacctgagacagacatttcaacaatgatacagtcctgtcatttatcagcaaaagattgggaattttctcctgtcaacttcttttgtattaggctgtgtattgatagttaattccgttaaaaattacttggaaaacagtgggaagtggtaggactctggaagaggccacacacccgagagctgcgagatctgtgcaagtctggttttggttaggtagtaataaaagtcctcactgtagatctctaaatttcaacccacggaaatgaaagccttttgtctgaaatttacggacttaaatcttcaaggttaaagggaattttctgctcaaataatactcttatcgaaaatgctaaagtcttcaatgttaaaatactgattggtaaaatcttgcagttgggattttgcagttggatatttattttaaaaaaaattataatattcagactattcttaaaatgggacaatcagcctcatgaaaaattgatgtaaatcagaagaataccctagaatgaggccttgtgatgtgagcgttcaatttgaagagcagttcctaacttcatagaaacctaaagcagaaagttgttacattttttttatgacaggcttttagtagaattttttagttttattttagttgaattttatttctatgcaatgcagaattaacagacctcttctcctcatggtacacagtattacagtgttgaagtaatggtgatgcttattacaacagctatttaggggaatgttacgttgatctcttaaattgtaaacactacaaaatgtcaaaataatgagaactgacacaactttgccttaaagagtactagactggaccttctcatattacgtttaaggaagacttagagtgttcattgatgtttacgattttaatatttctgaaggccattacagtggcctggatatgtgctgaaagccaaacttttaaattttttggtttttttaagcaaagaaatattttaaataaatcctatttcaacactgaaattgttgaaaaccgtctcataacaaaaggaaaaaacattggaatttttgttttagtggtcagtataggggaatgaaagcgtctgttgttacccacgtaactattttgataagtattagaggttaaccttaaatccagcaaaacattaaaacagaaacttttcaacttggagcctgccattcagcgttgaggtagatgagttccgacactgtcacggctgtgttcccagcagcgaaggcctctgcggagctgccagtcgtcttgaacgtgcatgggcggcgtgtgacatctccagggaggccgtccgaagtcgagaatcgtcagctgtaagtaggagctacacagcgcagagaaaatggaaccacccatccgtgaggcctctttccggagggagccgcacacttggacttgagagtttgccagcagcgagctcggatgcatctctccaaaagccaccaaggtcggcgcgtctgaagagcgttttgcggtcatcagacttcctcatctgaaaacacagaacatactgaccctttcaagtacttagtcattttcctgaaagtgtggtctgtttcagaatgctgtggcaaccaggtaggtgtggcactggccatgtgccacgtctttgccctttgtagtctgtcagatattaaagtttctaaccctgtttttttaatctccaagaatggggaaagtggaatgtagagatggaagcagaacgtgatgtttggatacaacagctatttaatccttttttattttttaagcaaaacactcagttttctaccttattttctaatgttgatttcatggtaatactgacagttggaagtgtttaacataaaaactcattgctaaagagcactgaggaaatgggagctagcgcacttgtaataaaaataaagacaaaatattttcttgaatgcatatatgtgattgggtattttaaaaaccagtatcatctgtcatctccaaaagattataggagtcagcttgttaatacagtagtgttagtaggttctgtatttttaattcagtacttagaattctaggtcctttattgcccaaagtcagcacagttagtttataccacagactctgtcttggggcacagtagtggggcggggtagtgactttgcctaaacatcacccagctggaacagaggctgagcggggctttaggcacttgccagatgggaactgggttgcaccctccttgctccctgtcattttcttgtcactcttcctgcttcccagtgttttattttatgccttgctcgttgtacatcatgatgactgatggtcttcaaggttgtgaggaaagccgtctccctgcttgactcgactgctgtcccagaggagagtcctgtgcgacctgagcgggggtggctgccatttccagcatgcaggtgacttccaaagaatgagtcaggtggcactgaaagccatgggttctgaagaggcgaatttgttgaaaagtcccaagggtctgaatgaaagcatctttaatcaacactcaacactcgcaatattctagaaaaccatatactgtgctggttgaggccaaaggttaacattgctccactgttcaccaaggaagggggcagtggccatccgccgcggcctcacgtgcgttgtaacaagccctcatcacatgtgtgagtcttacgtgcacaaaaagagaaggctttggtactgaaactggacaccttgtgtactcgataccttcacagcttctattggacatattttctttttaggaatgaaggaaaattctcccatttttgagccattcttttgtcaattctacaaaattgcatgtaactttataaatatttttaaaagatatagttttgtaaatatttaatattccgctaatttgattttgaattgtaaatgtcaagtattctgtttttggggtttttatgttttattatactttgttaaaaaggacaaattgtacatttttagaatgtttttatgagtaaatttaatgtactgaaaataaaaattttaaaaaaggc

SEQ ID NO: 49159 - DNA, 5852 bp, Homo sapiens
ctttgaggtcttgtggtctgattcttcaataacatcagtaaccaaatcttcctctgaagtgacggaatttatttcaaagctatgtcagctctatcctgaagagaacttggagaaactcattccttgcttagctggtccggacgcattttatgtggagcgaaaccacgtggatctggactcaggcctgaggtacctggcctcattaccttctcacgtgttgaaaaatgaccatgtcaggaggtttctcagcacttcctctcccccacagcagcttcagagtccaagtcctggcaatccctccctttctaaagtaggtaccgtgatgggcgtgtctggaaggcctgtgtgtggagtggctggtatcccgtcctcgcagagcggagcccagcaccacgggcagcacccggccggctccgccgcccccttgcctcactgctcccatgcgggcagcgcgggctcagccctggcctaccggacccagatggacacatcacctgccatcctcatgccttccagtctgcagacccctcagacccaggagcagaatgggattctagactggcttaggaaactgcgtttgcacaagtattaccccgtctttaagcagctctccatggagaagtttttgagccttactgaagaagatctgaataaatttgagtctcttaccatgggggcaaagaagaagctcaagacccagctggagctggaaaaggagaagtcagagagacggtgcctgaacccctcggccccgccgctggtcaccagcagtggtgtggctcgagtgccccccaccagccacgtcgggcccgtgcagtcggggcggggcagccatgcagcagagctgcgggtggaagtggagcagccccatcaccagctgccccgggaaggcagttcctcggagtactccagctcctcctccagccccatgggggtacaggcccgggaagagagctccgacagcgctgaggagaatgacagacgtgtggagattcacttggagagctctgacaaggagaagccggtgatgctgctgaatcacttcacttccagttccgccagacccacggcccaggttctccctgtgcagaatgaggccagctccaatccatcaggccaccaccccctgcccccgcagatgctgagcgcagcctcacacatcacacccatccgcatgctgaattccgtgcacaagccagaaagagggagcgcggacatgaagctcctctcgtcttctgtgcactcacttttgtctctagaagaaaggaataaaggatctggaccaagaagcagcatgaaagtggacaagagctttggcagcgccatgatggacgtgctgcccgcgtccgcaccccaccagcctgtgcaggtcctctctgggctttcggagagcagctccatgtcacccacagtctcctttggtccccggaccaaagtcgtgcatgcatccacgctggacagggtgctgaagacagcacagcaaccggccctggtcgtggagaccagcacggccgccacggggacgcccagcacagtcctccacgccgcccgtccgcccatcaaactgctgctgtcgtcatctgttcctgctgattctgccatttctgggcaaacttcctgtcctaataatgtgcaaataagtgtgccccctgcaataataaacccccggactgctctgtacacagccaacaccaaagttgccttttctgcaatgagcagtatgccagtgggccccctgcagggtggcttctgtgcaaacagcaacactgcctctcccagcagccacccctccacgtcctttgccaacatggccacgttgcccagctgcccagcccccagctccagcccggcgctgtcctccgtccctgaaagcagtttctatagcagcagtggcggtggcggctccacaggaaacattcctgcctcgaatccgaaccaccaccaccaccaccaccatcagcagcccccggcacccccgcagcccgccccacccccgccaggctgcattgtgtgcacgtcctgtggctgcagcggcagctgcggctcgagtggcctgactgtcagctacgccaactacttccagcacccgttctccggtccgtccgtgttcaccttccccttcttgcccttcagtcccatgtgcagcagcggctacgtcagcgcccagcagtacggcggcggctccaccttccccgtcgtgcacgccccttacagcagcagcgggaccccagaccctgtcctgagtgggcagtccacgtttgccgtgccacccatgcagaacttcatggcagggacagcaggggtgtaccagacccaaggactggtgggcagtagcaatggttccagtcacaaaaagagcgggaacctatcttgttacaactgcggggccactggtcaccgcgcccaggactgcaaacagccgtccatggacttcaaccggccaggtacttttaggttgaaatacgcccctccagcagaaagtctggactccacagattgatatttttctctggcaacagaacgttattaagccatggagacataaggaaaattaaatacaaaactgagaagtctagttgctgttgagcttaatctttttaatccaaaggtgctttacttttcctagactggatagaaaatctagcgtagaagtgcatcaaactcgatttattgccaaaaccctagattggagcttggtgtcagaactcgcctagtgggcatctctgtggctggtgagatcggccacctccacttttggttgcagtgcagagacgccatgtctcccgaagagcattgccatcactggccctcctaggctcacacgtcaattccagggcagctacacgtggtctgaatcgagaaccgagcttggagttctccaagtggagttccacccgccggactcctgacacccctgggctagggaaaatgtcgactttgttttgttctgttcctaaagtgattagcactaatctctgggatttttaaggattgcactacagaagaatgtaccctgatgtaaatctctgcggttctgggagccaaactcctctgagaacagtcagtgcaagagactccaataatccatattgaaagagtcagcaccagcagaggctactcgacttaggacgcaacagaggttttagtatttccttccctcctccaagcacttgtagcagtttcaggtttttaatttttttctgcaaataaatctaaactacgttattaaatagaaatagtttactcgcaacaacttaatttctaagggtccaagtcccagagaatccatagtcgtcaaagctttgagagtatctttcttcccagccagtcagtggctttgagccctatcttccactacaaatgacctctcgaggggggacggcgacagcgcggctctgtgagtggctgtgaggatgctgcacgtcctcagcagagtttgcaagttgctttatctcccacgggctccccaagaacctccaaccccgaggcttatcgctagcggattcacacctgagacagacatttcaacaatgatacagtcctgtcatttatcagcaaaagattgggaattttctcctgtcaacttcttttgtattaggctgtgtattgatagttaattccgttaaaaattacttggaaaacagtgggaagtggtaggactctggaagaggccacacacccgagagctgcgagatctgtgcaagtctggttttggttaggtagtaataaaagtcctcactgtagatctctaaatttcaacccacggaaatgaaagccttttgtctgaaatttacggacttaaatcttcaaggttaaagggaattttctgctcaaataatactcttatcgaaaatgctaaagtcttcaatgttaaaatactgattggtaaaatcttgcagttgggattttgcagttggatatttattttaaaaaaaattataatattcagactattcttaaaatgggacaatcagcctcatgaaaaattgatgtaaatcagaagaataccctagaatgaggccttgtgatgtgagcgttcaatttgaagagcagttcctaacttcatagaaacctaaagcagaaagttgttacattttttttatgacaggcttttagtagaattttttagttttattttagttgaattttatttctatgcaatgcagaattaacagacctcttctcctcatggtacacagtattacagtgttgaagtaatggtgatgcttattacaacagctatttaggggaatgttacgttgatctcttaaattgtaaacactacaaaatgtcaaaataatgagaactgacacaactttgccttaaagagtactagactggaccttctcatattacgtttaaggaagacttagagtgttcattgatgtttacgattttaatatttctgaaggccattacagtggcctggatatgtgctgaaagccaaacttttaaattttttggtttttttaagcaaagaaatattttaaataaatcctatttcaacactgaaattgttgaaaaccgtctcataacaaaaggaaaaaacattggaatttttgttttagtggtcagtataggggaatgaaagcgtctgttgttacccacgtaactattttgataagtattagaggttaaccttaaatccagcaaaacattaaaacagaaacttttcaacttggagcctgccattcagcgttgaggtagatgagttccgacactgtcacggctgtgttcccagcagcgaaggcctctgcggagctgccagtcgtcttgaacgtgcatgggcggcgtgtgacatctccagggaggccgtccgaagtcgagaatcgtcagctgtaagtaggagctacacagcgcagagaaaatggaaccacccatccgtgaggcctctttccggagggagccgcacacttggacttgagagtttgccagcagcgagctcggatgcatctctccaaaagccaccaaggtcggcgcgtctgaagagcgttttgcggtcatcagacttcctcatctgaaaacacagaacatactgaccctttcaagtacttagtcattttcctgaaagtgtggtctgtttcagaatgctgtggcaaccaggtaggtgtggcactggccatgtgccacgtctttgccctttgtagtctgtcagatattaaagtttctaaccctgtttttttaatctccaagaatggggaaagtggaatgtagagatggaagcagaacgtgatgtttggatacaacagctatttaatccttttttattttttaagcaaaacactcagttttctaccttattttctaatgttgatttcatggtaatactgacagttggaagtgtttaacataaaaactcattgctaaagagcactgaggaaatgggagctagcgcacttgtaataaaaataaagacaaaatattttcttgaatgcatatatgtgattgggtattttaaaaaccagtatcatctgtcatctccaaaagattataggagtcagcttgttaatacagtagtgttagtaggttctgtatttttaattcagtacttagaattctaggtcctttattgcccaaagtcagcacagttagtttataccacagactctgtcttggggcacagtagtggggcggggtagtgactttgcctaaacatcacccagctggaacagaggctgagcggggctttaggcacttgccagatgggaactgggttgcaccctccttgctccctgtcattttcttgtcactcttcctgcttcccagtgttttattttatgccttgctcgttgtacatcatgatgactgatggtcttcatgatgtacaacgagcaaggcataaaaaaaaaaaa

SEQ ID NO: 49160 - DNA, 1775 bp, Homo sapiens
ctttgaggtcttgtggtctgattcttcaataacatcagtaaccaaatcttcctctgaagtgacggaatttatttcaaagctatgtcagctctatcctgaagagaacttggagaaactcattccttgcttagctggtccggacgcattttatgtggagcgaaaccacgtggatctggactcaggcctgaggtacctggcctcattaccttctcacgtgttgaaaaatgaccatgtcaggaggtttctcagcacttcctctcccccacagcagcttcagagtccaagtcctggcaatccctccctttctaaagtaggtaccgtgatgggcgtgtctggaaggcctgtgtgtggagtggctggtatcccgtcctcgcagagcggagcccagcaccacgggcagcacccggccggctccgccgcccccttgcctcactgctcccatgcgggcagcgcgggctcagccctggcctaccggacccagatggacacatcacctgccatcctcatgccttccagtctgcagacccctcagacccaggagcagaatgggattctagactggcttaggaaactgcgtttgcacaagtattaccccgtctttaagcagctctccatggagaagtttttgagccttactgaagaagatctgaataaatttgagtctcttaccatgggggcaaagaagaagctcaagacccagctggagctggaaaaggagaagtcagagagacggtgcctgaacccctcggccccgccgctggtcaccagcagtggtgtggctcgagtgccccccaccagccacgtcgggcccgtgcagtcggggcggggcagccatgcagcagagctgcgggtggaagtggagcagccccatcaccagctgccccgggaaggcagttcctcggagtactccagctcctcctccagccccatgggggtacaggcccgggaagagagctccgacagcgctgaggagaatgacagacgtgtggagattcacttggagagctctgacaaggagaagccggtgatgctgctgaatcacttcacttccagttccgccagacccacggcccaggttctccctgtgcagaatgaggccagctccaatccatcaggccaccaccccctgcccccgcagatgctgagcgcagcctcacacatcacacccatccgcatgctgaattccgtgcacaagccagaaagagggagcgcggacatgaagctcctctcgtcttctgtgcactcacttttgtctctagaagaaaggaataaaggatctggaccaagaagcagcatgaaagtggacaagagctttggcagcgccatgatggacgtgctgcccgcgtccgcaccccaccagcctgtgcaggtcctctctgggctttcggagagcagctccatgtcacccacagtctcctttggtccccggaccaaagtcgtgcatgcatccacgctggacagggtgctgaagacagcacagcaaccggccctggtcgtggagaccagcacggccgccacggggacgcccagcacagtcctccacgccgcccgtccgcccatcaaactgctgctgtcgtcatctgttcctgctgattctgccatttctgggcaaacttcctgtcctaataatgtgcaaataagtgtgccccctgcaataattagcccatcaaactgctgctgtcgtcaatctagttcctgctgattctgccatttctgggcaaacttcctgtcctaataatgtgcaaatgagtgtgccccctgcaaaaaagtgtgca

SEQ ID NO: 49161 - DNA, 6479 bp, Homo sapiens
ctttgaggtcttgtggtctgattcttcaataacatcagtaaccaaatcttcctctgaagtgacggaatttatttcaaagctatgtcagctctatcctgaagagaacttggagaaactcattccttgcttagctggtccggacgcattttatgtggagcgaaaccacgtggatctggactcaggcctgaggtacctggcctcattaccttctcacgtgttgaaaaatgaccatgtcaggaggtttctcagcacttcctctcccccacagcagcttcagagtccaagtcctggcaatccctccctttctaaagtaggtaccgtgatgggcgtgtctggaaggcctgtgtgtggagtggctggtatcccgtcctcgcagagcggagcccagcaccacgggcagcacccggccggctccgccgcccccttgcctcactgctcccatgcgggcagcgcgggctcagccctggcctaccggacccagatggacacatcacctgccatcctcatgccttccagtctgcagacccctcagacccaggagcagaatgggattctagactggcttaggaaactgcgtttgcacaagtattaccccgtctttaagcagctctccatggagaagtttttgagccttactgaagaagatctgaataaatttgagtctcttaccatgggggcaaagaagaagctcaagacccagctggagctggaaaaggagaagtcagagagacggtgcctgaacccctcggccccgccgctggtcaccagcagtggtgtggctcgagtgccccccaccagccacgtcgggcccgtgcagtcggggcggggcagccatgcagcagagctgcgggtggaagtggagcagccccatcaccagctgccccgggaaggcagttcctcggagtactccagctcctcctccagccccatgggggtacaggcccgggaagagagctccgacagcgctgaggagaatgacagacgtgtggagattcacttggagagctctgacaaggagaagccggtgatgctgctgaatcacttcacttccagttccgccagacccacggcccaggttctccctgtgcagaatgaggccagctccaatccatcaggccaccaccccctgcccccgcagatgctgagcgcagcctcacacatcacacccatccgcatgctgaattccgtgcacaagccagaaagagggagcgcggacatgaagctcctctcgtcttctgtgcactcacttttgtctctagaagaaaggaataaaggatctggaccaagaagcagcatgaaagtggacaagagctttggcagcgccatgatggacgtgctgcccgcgtccgcaccccaccagcctgtgcaggtcctctctgggctttcggagagcagctccatgtcacccacagtctcctttggtccccggaccaaagtcgtgcatgcatccacgctggacagggtgctgaagacagcacagcaaccggccctggtcgtggagaccagcacggccgccacggggacgcccagcacagtcctccacgccgcccgtccgcccatcaaactgctgctgtcgtcatctgttcctgctgattctgccatttctgggcaaacttcctgtcctaataatgtgcaaataagtgtgccccctgcaataataaacccccggactgctctgtacacagccaacaccaaagttgccttttctgcaatgagcagtatgccagtgggccccctgcagggtggcttctgtgcaaacagcaacactgcctctcccagcagccacccctccacgtcctttgccaacatggccacgttgcccagctgcccagcccccagctccagcccggcgctgtcctccgtccctgaaagcagtttctatagcagcagtggcggtggcggctccacaggaaacattcctgcctcgaatccgaaccaccaccaccaccaccaccatcagcagcccccggcacccccgcagcccgccccacccccgccaggctgcattgtgtgcacgtcctgtggctgcagcggcagctgcggctcgagtggcctgactgtcagctacgccaactacttccagcacccgttctccggtccgtccgtgttcaccttccccttcttgcccttcagtcccatgtgcagcagcggctacgtcagcgcccagcagtacggcggcggctccaccttccccgtcgtgcacgccccttacagcagcagcgggaccccagaccctgtcctgagtgggcagtccacgtttgccgtgccacccatgcagaacttcatggcagggacagcaggggtgtaccagacccaaggactggtgggcagtagcaatggttccagtcacaaaaagagcgggaacctatcttgttacaactgcggggccactggtcaccgcgcccaggactgcaaacagccgtccatggacttcaaccggccaggtacttttaggttgaaatacgcccctccagcagaaagtctggactccacagattgatatttttctctggcaacagaacgttattaagccatggagacataaggaaaattaaatacaaaactgagaagtctagttgctgttgagcttaatctttttaatccaaaggtgctttacttttcctagactggatagaaaatctagcgtagaagtgcatcaaactcgatttattgccaaaaccctagattggagcttggtgtcagaactcgcctagtgggcatctctgtggctggtgagatcggccacctccacttttggttgcagtgcagagacgccatgtctcccgaagagcattgccatcactggccctcctaggctcacacgtcaattccagggcagctacacgtggtctgaatcgagaaccgagcttggagttctccaagtggagttccacccgccggactcctgacacccctgggctagggaaaatgtcgactttgttttgttctgttcctaaagtgattagcactaatctctgggatttttaaggattgcactacagaagaatgtaccctgatgtaaatctctgcggttctgggagccaaactcctctgagaacagtcagtgcaagagactccaataatccatattgaaagagtcagcaccagcagaggctactcgacttaggacgcaacagaggttttagtatttccttccctcctccaagcacttgtagcagtttcaggtttttaatttttttctgcaaataaatctaaactacgttattaaatagaaatagtttactcgcaacaacttaatttctaagggtccaagtcccagagaatccatagtcgtcaaagctttgagagtatctttcttcccagccagtcagtggctttgagccctatcttccactacaaatgacctctcgaggggggacggcgacagcgcggctctgtgagtggctgtgaggatgctgcacgtcctcagcagagtttgcaagttgctttatctcccacgggctccccaagaacctccaaccccgaggcttatcgctagcggattcacacctgagacagacatttcaacaatgatacagtcctgtcatttatcagcaaaagattgggaattttctcctgtcaacttcttttgtattaggctgtgtattgatagttaattccgttaaaaattacttggaaaacagtgggaagtggtaggactctggaagaggccacacacccgagagctgcgagatctgtgcaagtctggttttggttaggtagtaataaaagtcctcactgtagatctctaaatttcaacccacggaaatgaaagccttttgtctgaaatttacggacttaaatcttcaaggttaaagggaattttctgctcaaataatactcttatcgaaaatgctaaagtcttcaatgttaaaatactgattggtaaaatcttgcagttgggattttgcagttggatatttattttaaaaaaaattataatattcagactattcttaaaatgggacaatcagcctcatgattcaatttgaagagcagttcctaacttcatagaaacctaaagcagaaagttgttacattttttttatgacaggcttttagtagaattttttagttttattttagttgaattttatttctatgcaatgcagaattaacagacctcttctcctcatggtacacagtattacagtgttgaagtaatggtgatgcttattacaacagctatttaggggaatgttacgttgatctcttaaattgtaaacactacaaaatgtcaaaataatgagaactgacacaactttgccttaaagagtactagactggaccttctcatattacgtttaaggaagacttagagtgttcattgatgtttacgattttaatatttctgaaggccattacagtggcctggatatgtgctgaaagccaaacttttaaattttttggtttttttaagcaaagaaatattttaaataaatcctatttcaacactgaaattgttgaaaaccgtctcataacaaaaggaaaaaacattggaatttttgttttagtggtcagtataggggaatgaaagcgtctgttgttacccacgtaactattttgataagtattagaggttaaccttaaatccagcaaaacattaaaacagaaacttttcaacttggagcctgccattcagcgttgaggtagatgagttccgacactgtcacggctgtgttcccagcagcgaaggcctctgcggagctgccagtcgtcttgaacgtgcatgggcggcgtgtgacatctccagggaggccgtccgaagtcgagaatcgtcagctgtaagtaggagctacacagcgcagagaaaatggaaccacccatccgtgaggcctctttccggagggagccgcacacttggacttgagagtttgccagcagcgagctcggatgcatctctccaaaagccaccaaggtcggcgcgtctgaagagcgttttgcggtcatcagacttcctcatctgaaaacacagaacatactgaccctttcaagtacttagtcattttcctgaaagtgtggtctgtttcagaatgctgtggcaaccaggtaggtgtggcactggccatgtgccacgtctttgccctttgtagtctgtcagatattaaagtttctaaccctgtttttttaatctccaagaatggggaaagtggaatgtagagatggaagcagaacgtgatgtttggatacaacagctatttaatccttttttattttttaagcaaaacactcagttttctaccttattttctaatgttgatttcatggtaatactgacagttggaagtgtttaacataaaaactcattgctaaagagcactgaggaaatgggagctagcgcacttgtaataaaaataaagacaaaatattttcttgaatgcatatatgtgattgggtattttaaaaaccagtatcatctgtcatctccaaaagattataggagtcagcttgttaatacagtagtgttagtaggttctgtatttttaattcagtacttagaattctaggtcctttattgcccaaagtcagcacagttagtttataccacagactctgtcttggggcacagtagtggggcggggtagtgactttgcctaaacatcacccagctggaacagaggctgagcggggctttaggcacttgccagatgggaactgggttgcaccctccttgctccctgtcattttcttgtcactcttcctgcttcccagtgttttattttatgccttgctcgttgtacatcatgatgactgatggtcttcaaggttgtgaggaaagccgtctccctgcttgactcgactgctgtcccagaggagagtcctgtgcgacctgagcgggggtggctgccatttccagcatgcaggtgacttccaaagaatgagtcaggtggcactgaaagccatgggttctgaagaggcgaatttgttgaaaagtcccaagggtctgaatgaaagcatctttaatcaacactcaacactcgcaatattctagaaaaccatatactgtgctggttgaggccaaaggttaacattgctccactgttcaccaaggaagggggcagtggccatccgccgcggcctcacgtgcgttgtaacaagccctcatcacatgtgtgagtcttacgtgcacaaaaagagaaggctttggtactgaaactggacaccttgtgtactcgataccttcacagcttctattggacatattttctttttaggaatgaaggaaaattctcccatttttgagccattcttttgtcaattctacaaaattgcatgtaactttataaatatttttaaaagatatagttttgtaaatatttaatattccgctaatttgattttgaattgtaaatgtcaagtattctgtttttggggtttttatgttttattatactttgttaaaaaggacaaattgtacatttttagaatgtttttatgagtaaatttaatgtactgaaaataaaaattttaaaaaaggc

SEQ ID NO: 49162 - DNA, 5870 bp, Homo sapiens
ctttgaggtcttgtggtctgattcttcaataacatcagtaaccaaatcttcctctgaagtgacggaatttatttcaaagctatgtcagctctatcctgaagagaacttggagaaactcattccttgcttagctggtccggacgcattttatgtggagcgaaaccacgtggatctggactcaggcctgaggtacctggcctcattaccttctcacgtgttgaaaaatgaccatgtcaggaggtttctcagcacttcctctcccccacagcagcttcagagtccaagtcctggcaatccctccctttctaaagtaggtaccgtgatgggcgtgtctggaaggcctgtgtgtggagtggctggtatcccgtcctcgcagagcggagcccagcaccacgggcagcacccggccggctccgccgcccccttgcctcactgctcccatgcgggcagcgcgggctcagccctggcctaccggacccagatggacacatcacctgccatcctcatgccttccagtctgcagacccctcagacccaggagcagaatgggattctagactggcttaggaaactgcgtttgcacaagtattaccccgtctttaagcagctctccatggagaagtttttgagccttactgaagaagatctgaataaatttgagtctcttaccatgggggcaaagaagaagctcaagacccagctggagctggaaaaggagaagtcagagagacggtgcctgaacccctcggccccgccgctggtcaccagcagtggtgtggctcgagtgccccccaccagccacgtcgggcccgtgcagtcggggcggggcagccatgcagcagagctgcgggtggaagtggagcagccccatcaccagctgccccgggaaggcagttcctcggagtactccagctcctcctccagccccatgggggtacaggcccgggaagagagctccgacagcgctgaggagaatgacagacgtgtggagattcacttggagagctctgacaaggagaagccggtgatgctgctgaatcacttcacttccagttccgccagacccacggcccaggttctccctgtgcagaatgaggccagctccaatccatcaggccaccaccccctgcccccgcagatgctgagcgcagcctcacacatcacacccatccgcatgctgaattccgtgcacaagccagaaagagggagcgcggacatgaagctcctctcgtcttctgtgcactcacttttgtctctagaagaaaggaataaaggatctggaccaagaagcagcatgaaagtggacaagagctttggcagcgccatgatggacgtgctgcccgcgtccgcaccccaccagcctgtgcaggtcctctctgggctttcggagagcagctccatgtcacccacagtctcctttggtccccggaccaaagtcgtgcatgcatccacgctggacagggtgctgaagacagcacagcaaccggccctggtcgtggagaccagcacggccgccacggggacgcccagcacagtcctccacgccgcccgtccgcccatcaaactgctgctgtcgtcatctgttcctgctgattctgccatttctgggcaaacttcctgtcctaataatgtgcaaataagtgtgccccctgcaataataaacccccggactgctctgtacacagccaacaccaaagttgccttttctgcaatgagcagtatgccagtgggccccctgcagggtggcttctgtgcaaacagcaacactgcctctcccagcagccacccctccacgtcctttgccaacatggccacgttgcccagctgcccagcccccagctccagcccggcgctgtcctccgtccctgaaagcagtttctatagcagcagtggcggtggcggctccacaggaaacattcctgcctcgaatccgaaccaccaccaccaccaccaccatcagcagcccccggcacccccgcagcccgccccacccccgccaggctgcattgtgtgcacgtcctgtggctgcagcggcagctgcggctcgagtggcctgactgtcagctacgccaactacttccagcacccgttctccggtccgtccgtgttcaccttccccttcttgcccttcagtcccatgtgcagcagcggctacgtcagcgcccagcagtacggcggcggctccaccttccccgtcgtgcacgccccttacagcagcagcgggaccccagaccctgtcctgagtgggcagtccacgtttgccgtgccacccatgcagaacttcatggcagggacagcaggggtgtaccagacccaaggactggtgggcagtagcaatggttccagtcacaaaaagagcgggaacctatcttgttacaactgcggggccactggtcaccgcgcccaggactgcaaacagccgtccatggacttcaaccggccaggtacttttaggttgaaatacgcccctccagcagaaagtctggactccacagattgatatttttctctggcaacagaacgttattaagccatggagacataaggaaaattaaatacaaaactgagaagtctagttgctgttgagcttaatctttttaatccaaaggtgctttacttttcctagactggatagaaaatctagcgtagaagtgcatcaaactcgatttattgccaaaaccctagattggagcttggtgtcagaactcgcctagtgggcatctctgtggctggtgagatcggccacctccacttttggttgcagtgcagagacgccatgtctcccgaagagcattgccatcactggccctcctaggctcacacgtcaattccagggcagctacacgtggtctgaatcgagaaccgagcttggagttctccaagtggagttccacccgccggactcctgacacccctgggctagggaaaatgtcgactttgttttgttctgttcctaaagtgattagcactaatctctgggatttttaaggattgcactacagaagaatgtaccctgatgtaaatctctgcggttctgggagccaaactcctctgagaacagtcagtgcaagagactccaataatccatattgaaagagtcagcaccagcagaggctactcgacttaggacgcaacagaggttttagtatttccttccctcctccaagcacttgtagcagtttcaggtttttaatttttttctgcaaataaatctaaactacgttattaaatagaaatagtttactcgcaacaacttaatttctaagggtccaagtcccagagaatccatagtcgtcaaagctttgagagtatctttcttcccagccagtcagtggctttgagccctatcttccactacaaatgacctctcgaggggggacggcgacagcgcggctctgtgagtggctgtgaggatgctgcacgtcctcagcagagtttgcaagttgctttatctcccacgggctccccaagaacctccaaccccgaggcttatcgctagcggattcacacctgagacagacatttcaacaatgatacagtcctgtcatttatcagcaaaagattgggaattttctcctgtcaacttcttttgtattaggctgtgtattgatagttaattccgttaaaaattacttggaaaacagtgggaagtggtaggactctggaagaggccacacacccgagagctgcgagatctgtgcaagtctggttttggttaggtagtaataaaagtcctcactgtagatctctaaatttcaacccacggaaatgaaagccttttgtctgaaatttacggacttaaatcttcaaggttaaagggaattttctgctcaaataatactcttatcgaaaatgctaaagtcttcaatgttaaaatactgattggtaaaatcttgcagttgggattttgcagttggatatttattttaaaaaaaattataatattcagactattcttaaaatgggacaatcagcctcatgaaaaattgatgtaaatcagaagaataccctagaatgaggccttgtgatgtgagcgttcaatttgaagagcagttcctaacttcatagaaacctaaagcagaaagttgttacattttttttatgacaggcttttagtagaattttttagttttattttagttgaattttatttctatgcaatgcagaattaacagacctcttctcctcatggtacacagtattacagtgttgaagtaatggtgatgcttattacaacagctatttaggggaatgttacgttgatctcttaaattgtaaacactacaaaatgtcaaaataatgagaactgacacaactttgccttaaagagtactagactggaccttctcatattacgtttaaggaagacttagagtgttcattgatgtttacgattttaatatttctgaaggccattacagtggcctggatatgtgctgaaagccaaacttttaaattttttggtttttttaagcaaagaaatattttaaataaatcctatttcaacactgaaattgttgaaaaccgtctcataacaaaaggaaaaaacattggaatttttgttttagtggtcagtataggggaatgaaagcgtctgttgttacccacgtaactattttgataagtattagaggttaaccttaaatccagcaaaacattaaaacagaaacttttcaacttggagcctgccattcagcgttgaggtagatgagttccgacactgtcacggctgtgttcccagcagcgaaggcctctgcggagctgccagtcgtcttgaacgtgcatgggcggcgtgtgacatctccagggaggccgtccgaagtcgagaatcgtcagctgtaagtaggagctacacagcgcagagaaaatggaaccacccatccgtgaggcctctttccggagggagccgcacacttggacttgagagtttgccagcagcgagctcggatgcatctctccaaaagccaccaaggtcggcgcgtctgaagagcgttttgcggtcatcagacttcctcatctgaaaacacagaacatactgaccctttcaagtacttagtcattttcctgaaagtgtggtctgtttcagaatgctgtggcaaccagtgttttattttatgccttgctcgttgtacatcatgatgactgatggtcttcaaggttgtgaggaaagccgtctccctgcttgactcgactgctgtcccagaggagagtcctgtgcgacctgagcgggggtggctgccatttccagcatgcaggtgacttccaaagaatgagtcaggtggcactgaaagccatgggttctgaagaggcgaatttgttgaaaagtcccaagggtctgaatgaaagcatctttaatcaacactcaacactcgcaatattctagaaaaccatatactgtgctggttgaggccaaaggttaacattgctccactgttcaccaaggaagggggcagtggccatccgccgcggcctcacgtgcgttgtaacaagccctcatcacatgtgtgagtcttacgtgcacaaaaagagaaggctttggtactgaaactggacaccttgtgtactcgataccttcacagcttctattggacatattttctttttaggaatgaaggaaaattctcccatttttgagccattcttttgtcaattctacaaaattgcatgtaactttataaatatttttaaaagatatagttttgtaaatatttaatattccgctaatttgattttgaattgtaaatgtcaagtattctgtttttggggtttttatgttttattatactttgttaaaaaggacaaattgtacatttttagaatgtttttatgagtaaatttaatgtactgaaaataaaaattttaaaaaaggc

SEQ ID NO: 49163 - DNA, 2867 bp, Homo sapiens
ctttgaggtcttgtggtctgattcttcaataacatcagtaaccaaatcttcctctgaagtgacggaatttatttcaaagctatgtcagctctatcctgaagagaacttggagaaactcattccttgcttagctggtccggacgcattttatgtggagcgaaaccacgtggatctggactcaggcctgaggtacctggcctcattaccttctcacgtgttgaaaaatgaccatgtcaggaggtttctcagcacttcctctcccccacagcagcttcagagtccaagtcctggcaatccctccctttctaaagtaggtaccgtgatgggcgtgtctggaaggcctgtgtgtggagtggctggtatcccgtcctcgcagagcggagcccagcaccacgggcagcacccggccggctccgccgcccccttgcctcactgctcccatgcgggcagcgcgggctcagccctggcctaccggacccagatggacacatcacctgccatcctcatgccttccagtctgcagacccctcagacccaggagcagaatgggattctagactggcttaggaaactgcgtttgcacaagtattaccccgtctttaagcagctctccatggagaagtttttgagccttactgaagaagatctgaataaatttgagtctcttaccatgggggcaaagaagaagctcaagacccagctggagctggaaaaggagaagtcagagagacggtgcctgaacccctcggccccgccgctggtcaccagcagtggtgtggctcgagtgccccccaccagccacgtcgggcccgtgcagtcggggcggggcagccatgcagcagagctgcgggtggaagtggagcagccccatcaccagctgccccgggaaggcagttcctcggagtactccagctcctcctccagccccatgggggtacaggcccgggaagagagctccgacagcgctgaggagaatgacagacgtgtggagattcacttggagagctctgacaaggagaagccggtgatgctgctgaatcacttcacttccagttccgccagacccacggcccaggttctccctgtgcagaatgaggccagctccaatccatcaggccaccaccccctgcccccgcagatgctgagcgcagcctcacacatcacacccatccgcatgctgaattccgtgcacaagccagaaagagggagcgcggacatgaagctcctctcgtcttctgtgcactcacttttgtctctagaagaaaggaataaaggatctggaccaagaagcagcatgaaagtggacaagagctttggcagcgccatgatggacgtgctgcccgcgtccgcaccccaccagcctgtgcaggtcctctctgggctttcggagagcagctccatgtcacccacagtctcctttggtccccggaccaaagtcgtgcatgcatccacgctggacagggtgctgaagacagcacagcaaccggccctggtcgtggagaccagcacggccgccacggggacgcccagcacagtcctccacgccgcccgtccgcccatcaaactgctgctgtcgtcatctgttcctgctgattctgccatttctgggcaaacttcctgtcctaataatgtgcaaataagtgtgccccctgcaataataaacccccggactgctctgtacacagccaacaccaaagttgccttttctgcaatgagcagtatgccagtgggccccctgcagggtggcttctgtgcaaacagcaacactgcctctcccagcagccacccctccacgtcctttgccaacatggccacgttgcccagctgcccagcccccagctccagcccggcgctgtcctccgtccctgaaagcagtttctatagcagcagtggcggtggcggctccacaggaaacattcctgcctcgaatccgaaccaccaccaccaccaccaccatcagcagcccccggcacccccgcagcccgccccacccccgccaggctgcattgtgtgcacgtcctgtggctgcagcggcagctgcggctcgagtggcctgactgtcagctacgccaactacttccagcacccgttctccggtccgtccgtgttcaccttccccttcttgcccttcagtcccatgtgcagcagcggctacgtcagcgcccagcagtacggcggcggctccaccttccccgtcgtgcacgccccttacagcagcagcgggaccccagaccctgtcctgagtgggcagtccacgtttgccgtgccacccatgcagaacttcatggcagggacagcaggggtgtaccagacccaaggactggtgggcagtagcaatggttccagtcacaaaaagagcgggaacctatcttgttacaactgcggggccactggtcaccgcgcccaggactgcaaacagccgtccatggacttcaaccggccaggtaagcgcgcgccatggccgcgcccaccaggctcccgcaggaccagtgcacacaaatgcttggtttttatgaagagtaaacttctttctttgtaaagcaaataatttttcgaatgctctttgaaagcgcgtggaaatcttcatgataggccgtgaggtccccagaaggactgctgttgggtctaaaacggccatgatgatttcagacagcctctggttctagaaggtgcttagccagtgtggacagggcctccctggactgccgtgtcctgattcgagcccagagaggcacgtgtgagggattcagtgctgccccctggcttaacactggggccctcaggctgtggcgcatcggcattccggaccttcggtagccactcacgtcccctttgactcaccctaccggtacgaccatgggtctagg

SEQ ID NO: 49164 - DNA, 388 bp, Homo sapiens
tttgggtttgtacatgtccattgcttcccgtgcaatcataataaccaaaagttggaatgtacacagtttttgatgtgtaactttctttttgtgttagaccctgattacataaataatgaatatgcacatttgtgagtatactaaaatttcaccataatgctgtaagtgatgttaaaaaaattcacgtacataaaaacaggatcatttgacttcaaggctaatgaaatggtcaggtgagccacatgtggtggataggagccagtcaccaattgcatggcttccaaatctctgtgatctaagagtttaattgtactactaatctgcttcgtttttgagtagctaccttatataggcagaggtgtacatatgcctcttagatgtgctcttt

SEQ ID NO: 49165 - DNA, 376 bp, Homo sapiens
ctcattgcctctggggaaatgctctgtaactatggccatagaagatttagtttcattgggaaatggagataatattaagtttaaatgaggtttactgagttttaaatgaggtttaaatgagtaaattcatgtaaagcacagagtaagtgctcagtaaatactaactaggagatatgaaagtaattattactattattcttatattccaccccttcactgcccagtatcaacctttctgcacataattataatctctgaagtgctctcatctaacaaaattaaagtgtctttatgcaaacaaaaatacactcgccccttctttaaagtctcaaagcccaaagagtttatacatctggctttaagtccaggctctggg

SEQ ID NO: 49166 - DNA, 1061 bp, Homo sapiens
tgtgggactattggtcatcttttcaacaaaaccagatattaacaatcaatgtcagttaaaggagagttgtagacttaaatagtgtcaattgtcctacattttcatgttgttgataacagcctaccatagaggtgttacagcttccaccattttacacaggaggaaacagagctcagctcagagaggttgagttttccaagaagccaagtcatggggccaagaatagtgcccgggtgccatgagactctgcccactactgccctgctggctgcagagcggctcagatacggctgtcatccaagccagggagcctttgagccagtgctgctgagaaaattgggaaaaagcccactgcccggttcccagcacatcttcactgttcctcgggctccctccatgtctgtttccctctgagtgtagtagattggggactcagaaccttctagaacagaagttatggttttgtaaggggaagaaatatggtcaagtgcacatctataatttagagtattaaatttccttgtacccttatgatttattctagaaggtcagcacattgattacaaagctaatgttggctaacattaatccttcaggtatgaggtaagaaataaaaaattactttcatgcttcatttctgcacaaaatttcactctggaaagatatttcatttgaaaaaaaaattaaaagttttactctgtaaaggattttcagatcttttctgctatgaaaattcttgttttctaattttcaaaatcttggtttgaaagtaattggaggctgggctggtagcttacacctgtaattccagcactttgggaggccaaggcaggtggatcacatgaggtcaggagtttgagaccagcctggccgacatggtgaaaccctgtctctactaaaaatatattagccaggcatggtggcgcatgcctgtaatcccaggttgtcgggaggctgaggcaggagaatcgcttgaactcgggaggcagaggttgcaggtgaaccaagatcatgtcactgattgcattccagcctgggtgacagagctagactctgtctcc

SEQ ID NO: 49167 - DNA, 2090 bp, Homo sapiens
gtttattaaagtatgtaattcctaaaatgcttattgaagaccttaaatctgattgttatttaaatttgtggttcagcgatattgtgttaaccactgatttcagagtagaaaaaatgcttattatttttaactttttaaagaaatggggaatgttttgtaacagtactcaaatagcacagaatatttttcaacattaaaaacatttgattgaatcctaatttagacaagccataacttgggaggatggtaaaccatcctctgaaagatttaactctttattggtttggaagtagtaaagtatacccctaaatgcctaggattagagaaataattttattcattgactctttatggaaaccaaatggtatctaactctgttccttctcagccaccttgaaggtgactattagtgtggtctttaagttgcttttagaaatcctgaagaattcagtcttcgtctatcatattcttcagatttccttttttgtttttgcagttctgaggccaaaagatgaagtttctttgccttgcctgatgtggcatcaactttctaatttttaaacatgttaccagcgcatgtctactgatcgtgtactgcaggacctgggtagacagaaacatacccacctctgccctcctcaccttccagtcagggcagcaggggatcctcatatcctctgaggcaaagcaaatggcttcactttatgtggaaatgaatttgccagtgagctttcgtgcttgtttgacaataaggcatcactgatgtgaactaatttggtggcaggtctcctctgaaggaaaccagaaattgtaacagcatggccaaggggtgtttctagggacccagtcccacaggtgcctaagggaagtgttctcctcccctttcaggaactccctgctgtgtggtgagaggctctggtggccttgcatggaagagcctgttgccccccagcttactccactgtggcgcacttggttggggttctttgggtaaagctaaatcatagatggtctttaaagaaatcgctttgcaagtgttagtccttcctgattggaagccttctccattgagccttattggaattagaaatttgcagtggttctcagtttctaggcttatcataatataagatataaaccaaaaagtatctgagacaggtctcaatcaatttagagagtttattttgccagggctaaggacacacctatgacacagcatcaggtggtcctgacaacctgtgcccaaagtggtcaagagtacactttgcttttgtacattttaaggagacataatacatcaatcaatacatgtaagatttacactggtttgatctggacaggtgagacagctcaaaggggctggggcttccaggtcataggtagatttaaacatattctgattagcagttggttgaaagagttattatctatagaaagcaatgtctgggttactataaggggttgtggagacctaggttttatcatgtagatgagcctctaagtagctggcttcagagagaagagactaaacgtttcttaccagacttaaagtgtgtgttcatgttcatgctggagggtagagtgaggaatgtctgacccccactgctcatcatggccagcaccagcctttcaggttaaattttagagtgccctggccgaaggggaggtccattcagatggttgtgggaggacttcaaattttatatttggtttaaaaaggagaaacagggctcagctggcatctgtactgattgatgtgcttacattcttcatgtggatgtggccagtgtcagcctggagaaaaaagaacgcttttagatttcaaaggagcagttgggtaataatgaactttaccatatttgcaaacctatctggtatctctcctcccttttcctttgaccacctattctgtctagggttaagaaaataacaaagccaattctggtttgtttttgtttttgtttttgttttttgagatggagtcttgctctctgtcccctaggctgcagtgcagtggcgcgattgcagtgaaccaagatcatgtcactgattgcattccagcctgggtgacagagctagactctgtctcc

SEQ ID NO: 49168 - DNA, 466 bp, Homo sapiens
gaaactatttttactctgcatgttctgttctaagcgtcatcttgagccttgcacatgatactcagattcctcacccttgcttaggagtaaaacaatatactttatgaggtgataatattttccatagttatttgaagtggcttgaaaaaggcaagattgacttttttgacattggataaaatctacaaatcagccctcgagttattcaatgataactgacaaactaaaatatttccctagaaaggaagatgaaaggagtgaagtgtggtttggcagaacaactgcatttcacagcttttccagttaaattggagcactgaatgttcagatgcataccaaattatgcatgggtcctaatcacacatataaggctggatggacttttatagcacattgcatttacagaaaaaagaatcagtgaatttaaagataaatcaatagaaattattcaatttgaagaagagag

SEQ ID NO: 49169 - DNA, 217 bp, Homo sapiens
acggggagtgttttaagaaatttgatttcctgatctaaatttgtatctttagacctttctgagaaccaaatagacttggaagggttgactgcatagactgctttttcatgctcactctgtcacaatgtggcaaatacttgttttccccaaattcacattgaaactgcctggagaaggaagttggtcctgaaaaagacgtgcctggcttcttatcctt

SEQ ID NO: 49170 - DNA, 1081 bp, Homo sapiens
cgggggccgcgcgggccgggagttgggtgggctgggggacaggcgcgcccgcgccgcccgctccagctgggctagtgctgcacattccggccagcccctcctcaagaccccattcccaagccccttctcagctccctcgggccggcagagcggctctgatcagtaaaatgctgttgaaggcccacgggcatgactgcacccctcactaattggtcattggtttggggaggacaccactgtcccagtggaaccttgagcacaccttggagccctcctcttcctctccggacctgtgccaaactgtgagtggcacagagcaaggactgtatgtgttctcttctttgttgcatactcagttccttgaccacagtgccaagcacacagcgagcactccctgtgtatctgctgagtaaataaacgaatgaacaaacccaacacatttcagccaagtcctgctgatgtttctcctccgatctagctcctcctttccagccttacttctgccactccagatttcacccccatcagcttcagactggataaaaggaaaccatttctctaaaggatcacttgctctctcatttcaggccatcctgcagccaccagaaccttccacatgaaatgaaaggctcaccacttcataggctttaaggaaattcttggccaggtgtggtgcctcactcatgtaatcccagtgctttaagaggccaagatgggaggattgtttgagccagctgtttgagaccagcctgggcaacgtcatgagaccccatctccacaaaaaaaaaaaaaaagaaaattggctgggtgcggtggctcatgtctgtaatcccagcaattttggaggctgaggcgggtggatcacttgaggtcaggagtttgagaccagcctggccaacatggtgaaaccccgtcactactaaaaatacaaaaattagccaggcgtggcggcaggtgcctgtaatcccagctacttgcgaggctgaggaagaattgcgtgaacctaggaggtggaggttgcagtgagccaagatcatgctgctgcactccagcctgggcaacagagtgagactccatctca

SEQ ID NO: 49171 - DNA, 673 bp, Homo sapiens
cgggggccgcgcgggccgggagttgggtgggctgggggacaggcgcgcccgcgccgcccgctccagctgggctagtgctgcacattccggccagcccctcctcaagaccccattcccaagccccttctcagctccctcgggccggcagagcggctctgatcagagtcttgctcagtcgccaggctgtagtgcagtggcacgatctcagctcactgcagccgccacctcccaggttcaagcgattctcctgcctcagcctcccgagtagctgagactacagagcaccatggcctggcaaggtccgacgttttccaaggatcctggctgagctcctgtggaagctgcttcttacactgatgtggtccctcggctggcaggcccttctgcggccaaccaggtgacacctgccagttatgagggacaggtaggagaggatgggctttccatcagaaaaaaaaaaaaaaaggttttccaaactgcttttctttcaaattttaatcttaagactaacctacattaatttcttatttttatctcataaagtccagaatttctgataatttcagttcttttccagagtgcaaagaagcattggctcttcaggtattatgtttaacattttgcaggaattgctttactctatagacaaataaactacacatttaagacttat

SEQ ID NO: 49172 - DNA, 796 bp, Homo sapiens
cgggggccgcgcgggccgggagttgggtgggctgggggacaggcgcgcccgcgccgcccgctccagctgggctagtgctgcacattccggccagcccctcctcaagaccccattcccaagccccttctcagctccctcgggccggcagagcggctctgatcagtaaaatgctgttgaaggcccacgggcatgactgcacccctcactaattggtcattggtttggggaggacaccactgtcccagtggaaccttgagcacaccttggagccctcctcttcctctccggacctgtgccaaactgccatcctgcagccaccagaaccttccacatgaaatgaaaggctcaccacttcataggctttaaggaaattcttggccaggtgtggtgcctcactcatgtaatcccagtgctttaagaggccaagatgggaggattgtttgagccagctgtttgagaccagcctgggcaacgtcatgagaccccatctccacaaaaaaaaaaaaaaagaaaattggctgggtgcggtggctcatgtctgtaatcccagcaattttggaggctgaggcgggtggatcacttgaggtcaggagtttgagaccagcctggccaacatggtgaaaccccgtcactactaaaaatacaaaaattagccaggcgtggcggcaggtgcctgtaatcccagctacttgcgaggctgaggaagaattgcgtgaacctaggaggtggaggttgcagtgagccaagatcatgctgctgcactccagcctgggcaacagagtgagactccatctca

SEQ ID NO: 49173 - DNA, 434 bp, Homo sapiens
cgggggccgcgcgggccgggagttgggtgggctgggggacaggcgcgcccgcgccgcccgctccagctgggctagtgctgcacattccggccagcccctcctcaagaccccattcccaagccccttctcagctccctcgggccggcagagcggctctgatcagtaaaatgctgttgaaggcccacgggcatgactgcacccctcactaattggtcattggtttggggaggacaccactgtcccagtggaaccttgagcacaccttggagccctcctcttcctctccggacctgtgccaaactgtgagtggcacagagcaaggactgtatgtgttctcttctttgttgcatactcagttccttgaccacagtgccaagcacacagcgagcactccctgtgtatctgctgagtaaataaacgaatgaacaaaccca

SEQ ID NO: 49174 - DNA, 539 bp, Homo sapiens
gattaagtttgacctctgaattttctccttatacttcttcacagtgtttaggaccttgcatgtcctatttgaaaagtacaccctggagttgctatagatagtaagaaccagcttgcaacaattggagagtgttttttttgtccttaaagtaattctgcctcttgattatgtcttaggattggtttcacagagaagtggtcattccttcacagtgaatcacaaaatgagtagttttgacaggatttcctgactcagtctggctaactcaacctgctgttctgagtttctgtcaatattggcatgccaggagcaaactcttgacttggttgtcttgggtatacagataattcctaaatccataccctcattgctgacctttggaccataggcttgtttctaaccagttcctgctggataggtctatgtttagatcctgacatcaaagtaaaccataaggagttgagagtaactctgcatcttaattgcctaccagagcaccttatattgaatagaatcctataaatgtttgttgttaatga

SEQ ID NO: 49175 - DNA, 339 bp, Homo sapiens
ggagtggggacactccaaatatatgttgaaagactaaataaattataatttctttctggcattcaatgcctccttgctctatagaacttcctctttatttgaagtcaggtaatagcctggtgacaccatatagatataaagcccactatagtcagtatttataacagcagagatggtaattcacagcatgtaaatgtctttataggaaacttccctttgaaacctgcatctttctgaggcaatatgcaagtgttaaccttttgattttatttatcaaccttcatttctgtttacaaaggcatgtgagagataggtaacgtctcataaattttaaaaaga

SEQ ID NO: 49176 - DNA, 415 bp, Homo sapiens
aagatatatgtaagtaatctcatatattatacccgcaatcaaaatgagaaatggcacatgagatccaggctctcaagagaaatattatgaaatctcaaggtattgatgaaagtttttcaaggctgatccaaatgggatttagattctgtggcagttgaaatgtgtattattaaactccttaagcaaacccgaatgactaccagtggaggattaagacattctatgtatagcaaagacgaaattctcatgtctgagttttctctcttgaattccctcttgattaggcttctgtaatatttaacttccatgccatgccataattatttaattaaaagggtaaatataaattattatttcagtgggggctatggacctttttaccttaatgtttattatttactaaagaaagacatag

SEQ ID NO: 49177 - DNA, 381 bp, Homo sapiens
ggagaatctgctgccagcttcaggcagacctttctgtccttcgctgtcaaagccagacttctaaggagtagtgaaagaaaaccctgaaataatcgaacaggaaaaagttgccctcaagcctgacctggaaccgttcctcaccttcatcctcaccatgccctgctatctccagctgctgagcagctgaggtgctgcagccccttcccttccagcccacaagtgtgtgcatattgagctcctgctgtggttaagcactgcaacagactctaccagagatgcaaagagaagcgagagaggcaccttgttctccaagaacttactgtccaatcatgctgtggtgcattcctttgaagatcatgaagaatagccaaacttgtcttt

SEQ ID NO: 49178 - DNA, 537 bp, Homo sapiens
tgaaaataccaaatcagttatttgaatatgcctaggattctaaaaccacagaaaataggcacattaatttccttagcctattactccctatggccagttggctacctcccaggtatcttcttattcttgcctgaccagcttaaccagttccatcatctgttcacatttgttcctcttcttagagcaacagagttaggtatacaagtaattaaataaagactaagcactaatgccctaatcccagctaattttaacaaggacactcaggaggataaagaatcaagaagagaaatattttttaaaaaagaatagaagtattatataacttttgttcttctaaacatcaaaatccagtcagaatggttatagaaaacattcaggaacagtgtctaagcaggaatagtagcaatttagtgagctgactaccagtgttctttctcataataattcccttaaacaactttgcattaagggagatgctgcaaaagcaaaatgatctttttacttagagtaggtaagtcctattggaatttaaga

SEQ ID NO: 49179 - DNA, 731 bp, Homo sapiens
aacagcactctgttgatcaagcaaactttctaggggccctaatccacctgggcctgcagtatgtaattccataactcatgggatgccatcaagagagacaatctacttgattgctaaagggcctttgttttctttggagttccccaggaaggagaaatgtatgtgtgtgcaggggtgaggaggggggagagtgaagaaacaatactatgcccttaaaaatgtttgtcagttttcattatgaaagaagatcaaacgtgcccactccagaaatcttggcatatgcagttattttgaagccattcagcgttcttcaagatgtcacaatgaaaagagtgatgattttttaaataaaaaattaacatgtttctcttggcaatgggactttctcaccatacttttaagttacatcacttattatgtattcaaaatactgattttttaaaagtatgttccttggagccctgggaacctgcctcaggagctggggtggctgtggggagtgagtatgaagggagctgaatgagttagtgagaatctgggtcttcatatcttttttaaaattgtggctgcttttttctgttctgtataacaactctttttgaaaacagtttcattgttgagttttaaaaccactgacctaaaataaccaccaatttaacgtaagtataacttcattgagtttttttgtattaaaaaaattaaactccattttcttcatggattaaggtgat

SEQ ID NO: 49180 - DNA, 198 bp, Homo sapiens
ggtccccacctcccagtctttgtcaccattaaacagtagctccaggacagggcagcattgcatagccctgcccacacccattctgctcatctgaccaccactcaatttcctaccaaggactggccgactactcagatgccagaccaccaagacaaatgtggctctgttctacaaaggaacagaaagtgaatgtttctt

SEQ ID NO: 49181 - DNA, 836 bp, Homo sapiens
cgaattttgagtctaagagactattcacaaagtccctaaatgtctgagccactgtaattgtgtgtcataggcatgctgacagcctctccaagttctgtctccagccacagcagtgtccttgcctggaccacctctcttccctgctcacccttcaggacctctgcacgtcacacccgtttattctgtaaatgtttgctgcatgtgactccatgccaatcatcatggtgggttcagatgatgccacctccagccttcaaggaagttacagacaagtatgttcagaaaaacagggcaaactcacacagaaaaatgggcagtatgtgaataaacattcactaatcaggtcccttgggcctgtcctgtgctgggtgctgaagaaagatgatggagacaaaagccctgactttaagaagcggatgctagggctctggtcaagggctgcatggtgattggaaacacatgggcacagtgcaggggtgctgcaccacacaagtccaggactggatggagtggcccctggagttggtaaatgcagctgctggagcagctgggcggctactctgggacctgagtgggaggctagtgatccaaggcagcttagcagcactcgtttatgtgaagttaaaattccactccagctgtttatccagtccacatgaggaagcaatcctggaagaaggtgggagggataaggtggagatttcttgtgaattccacccaaattacaaccagaggcaccccacttttccatgtgctgtgtagaaaggaccacatttgcattaagtctttgatgtgggtaagcctttcagtctgaattcatctgcaatcactaccca

SEQ ID NO: 49182 - DNA, 427 bp, Homo sapiens
attatagaatctcagcatttttgtcaaaaaatttctttttgatgattgacagatcaggagacacttaaggccatacctgctttcagtaatcaaaaatgcatttaagatccagaaacttgaggtagcagaacatcactatcacatataacatatcctttggtatagaaaattatattcccagagtgagtttcttttttaaaaccattaatgaggccaaggtgggaagatcacttgggaccaggagttcaagaccagcctgggccagatggcgagaccctgtctctacaaaaaattaactggatgtggtggtgcactcctgtagtcccacctactcagaggctgaggcaggaggatcccttgagcccaggaaattgtagtggcagtgagctatgatcatactactgtactgcagtctgggccacgaagt

SEQ ID NO: 49183 - DNA, 539 bp, Homo sapiens
aactcaattgtggtgagtgcttcacaatgtatacctatatcaaaacaagttgtacacctaaaatatatacaatttttcttgtgaagtatacctcagtaaagctcaggggcaaaaaaaagagatgagtcgatgttaacccaaactgttaaaaacagatgtcacctagttgaagctgcttccctatgtcatcaaaaggattaaaagagaattgaagaaaaagagcacttcaggaagaacaaatgataggctggaaacaaatacacaggggcctctagaagctgtgcctcttgatgaagaaggaatccctcgaggacaggagaggagctgggatgacacttgtagctctttgtgctaaaatgactcaggcagctcctgcattcattttgggtgctgaagttttagaactgttttccccacccccaccaacaccttcttatccctcctcctgggtctttcttagacttctcccagcaaagcagagtccgtatcctagtgtgttgctatggaaagaatggcaacatcacttgtgagttcatgaa

SEQ ID NO: 49184 - DNA, 286 bp, Homo sapiens
catagaggaaactttctgccactcttgagactcaaggaagaaaatcagtgggttcaggaggggaaggaaattgggggttgagtgctgtctaagaccacttctgttttgtttgctctcctccccttcaattcttcactttgaagcctagggaacagagcactgctcgttctttctgtcgatgtcacacagatagacaaccagaaaacagtgtagatgagtaggcttagattgggaatctaccagtcaggctgaatatgaaacctgggggaaacatattttacagaca

SEQ ID NO: 49185 - DNA, 426 bp, Homo sapiens
gtctttctctcccaggcactgcacacttcactaaaggccctggatagcaattgtttctaagataaattggacagttcctcattaactatgaaaggcctaaatgctgatcacctcaatcattatgttctaagctctcatcattagaaaaagaaataatcaggtcagccaaacctgattcttttgatgaaaatgtttccttctttgatgcaccccaggctacacagttccagttgcctgtgaactaagtactttctccatcagtgacacaatcttcatcttaagttctgaactcacatccattgctggtcctcccagcagctgtccaaggagccagtgggagcttctgtgctcttctggggtctctcagtagctcagagcatagatacaactcacccttctctccatcactcagcagacgggctagcc

SEQ ID NO: 49186 - DNA, 215 bp, Homo sapiens
cccccaccccgcccagcacacagtaggtgcccggcactgagtgggcacttgctctgccgtggtgccggcgcccactgctgtgactgcagcacctgccggtggcctggtcagcgtgacggtgaatgttgcaggtggtgttgccatgttggtgagacggtgtcacctgaggacatgaaggagctgcttaatgcgcccttgactttgtttttagagaa

SEQ ID NO: 49187 - DNA, 403 bp, Homo sapiens
tactggaactaataagcagttataacaagtttgcaggatataagattaatatgccaaagtgaaaagttttcctataaatcagcaatgaacaagtggaatttgaaattaaaaatacattactatttacgttaacacccccaaaaatgaaacattgggtataaatttagcaaaatatatacaaaaggcataggcagaaaactatacaactctgatgaaagaaatcaaagaagcactaaaatatgaagtgatattccatgttcatgtacagtatcgtaagactcaatattgtcaagatgtcagtttgtcccaacttgatacacagattcaatgcaagcccaatcaaaatctctataagttattttgtggatattgacaagctaattctaaagtttatgtgaagagg

SEQ ID NO: 49188 - DNA, 520 bp, Homo sapiens
tgcagtaggtctagatcaagtcactgcactccagcctgtgcaacaaaacaacagagcaagaccctgtctcaaaaaaaaaaaaaaaaaaagggtaagggtgctgattcctgaggcctagcttagactcatcgggaatctctgagagcccaggaatttgcatttttaactctattctcccatatcctgggtttagagaagtgctgccattgtggtggtcagggtcctccctgctgcttgtcacagaggccactgcggggagaggaagctgggacacccccaaggcccttctctggagaggggcctcaccttcaaaaaggctccggttgttgcctgatgctctgcacagagctgtaagtccgcagcccatgcacttctgtaatctgctgggtgcctagttatctttcttcttgtttgggcagaatccgggcctgaatgccacccaccccaggaagcccaggacaaggcagacagccttgtaaagtcccattcctgccaggcgcggtggctcatgcctgtaatc

SEQ ID NO: 49189 - DNA, 636 bp, Homo sapiens
gccatcctcctgccttggcctcccgagtagctgggactacaggcgcacaccaccatgccaagctaatttttaaatttttttgtagagatggggtctcacttttgttgcccagggtgctttagaacccctgggctcaagtgatccttgacctcccacagtgctgggattacaggtgtgagccaccgtgcctggcctcatgggttttctttgttttgttttgttttgtttttgagacagagtctcactctgtcactcaggctggagtgcagtggcacgattttggctcactgcaacctccaccttccgggttcaagcgattctcctgcctccgcctcccgagtagttggggttacaggcatgcgctaccacacctggctagttttttattgttgttgttttttgtatttttagtggtgacggggtttgctctgttggccaggctggtctcaaactcctgacctcaggtgatccccacttcagcctcccaaagtgctgggatgacaggcatgagcctctgcacctggcctcgtgttttttttttagttagccattttatacgtgtttactgaacacctgtcctgtgcccatattctaagtgccttacctgcattaaactcatgtaaccttcacaacccg

SEQ ID NO: 49190 - DNA, 799 bp, Homo sapiens
  misc_feature (639)..(639): n is a, c, g, or t
gccatcctcctgccttggcctcccgagtagctgggactacaggcgcacaccaccatgccaagctaatttttaaatttttttgtagagatggggtctcacttttgttgcccagggtgctttagaacccctgggctcaagtgatccttgacctcccacagtgctgggattacaggtgtgagccaccgtgcctggcctcatgggttttctttgttttgttttgttttgtttttgagacagagtctcactctgtcactcaggctggagtgcagtggcacgattttggctcactgcaacctccaccttccgggttcaagcgattctcctgcctccgcctcccgagtagttggggttacaggcatgcgctaccacacctggctagttttttattgttgttgttttttgtatttttagtggtgacggggtttgctctgttggccaggctggtctcaaactcctgacctcaggtgatccccacttcagcctcccaaagtgctgggatgacaggcatgagcctctgcacctggcctcgtgttttttttttagttagccattttatacgtgtttactgaacacctgtcctgtgcccatattctaagtgccttacctgcattaaactcatgtaaccttcacaacccgcgngtggaaaattatttaggatcaattaactggttaaaaaaaacttgggggggggcccggcacccaataccccttatagtgagtttattacgggccctactggccgttgttttaaaacagggttggtgggaaaaaaccctgcgtccaccaacttaattggctt

SEQ ID NO: 49191 - DNA, 428 bp, Homo sapiens
gattccagggaaagctttccaaggaggttttactggcattccattttgaagaatgagtaggagttaattgtttaggttgtttttaaattgcttatctcctaagtagttttaagaagaatgatattttgaaattatcttgtcacgcacaattctgtaggtttgatcaaagaagacagttcttatttctcctctttccatctaacgtacatgcattcacactcacaagtttggtttttcaaatgtgtggctttactatcagatttattggtaaaactatattgatgtgtatgtatgtgtgagaatagatggtaggaattacgtataagatcatcacttcaatgtaaataaaatttaccttctaggccggtcgcagtagctcacacctgtaatcccagcactttgggagggcgggcggattcagaggccga

SEQ ID NO: 49192 - DNA, 517 bp, Homo sapiens
acaaacaaacagacggtcagctttagtcattagggaagtcaaagttcctcctggaagtcccaggagcagctgttgagatttcattagcatcaatattgcacagtgtagagttgagtggaagagattctgggacttgggagaggagacaggggaaggtacccaggcgacgcagacccacgttagtccaagagcgcaggtttacacatctgcattccctagttttctccgtctgtatgtttgtgctcatgtggctttggctgttttgttttttgtttttctgtaagcactggagaattggaatatggtgatacttgtgacacattcatgcatgtaaacaaggcattttccagcttctgccgtgtgcagagcgggcagcacgcttttaccctttgagtctgtgtcctgaggcggccattacattcccacatgggcgtcacatcacgttgctgttgatgcaaacagggtattacacacaaggaaaaggggttttgaagagttaagattgaagtgtttgaga

SEQ ID NO: 49193 - DNA, 351 bp, Homo sapiens
tccccttctgattttaagtgaaattaaaacgtttttatgggtccttaaaagtattatggtctgtaatcactgtgcctattgtacctactggggaagttggcctagtgtttgggtctgtggtgaccttgagtgagctgactgactttttgggcctcagttttctcatctgtaaaatgggtatagcaacagcatctgttttaatccgtagcaagtgactagcagagaggcagctttgtggctgttagtatctagttagggctcaatcagtaaagctatctacactaccttctgctggggggtgaggggcttgtgcgtggagggggctgggcttgtagtggagaggggctgagt

SEQ ID NO: 49194 - DNA, 433 bp, Homo sapiens
cagtggtagcacgtctttatctgaataaatactcatttgctgaactcacatttactgcatcttttaggggaaaggaatgagagtgaagtggcagccttgggaatgacatggctacccaccacatcagcaactgtgtcttcttaaagttgtgtgctcccaagccctcctgaaatctactcctgtcacctaacttccagatccagaactggtacccaggtatgcaatgccccgaggtgtgtgtctgaaggaagagcagtcaccataattactcagttgtctgcatttctaatgatggctacttatttgtcagtctgagaatgatcatatgccttgattgtagtcacaggtattaaatgatttttgaggatctgctataaactgatattgtgtgaattaaacagaaaactaacttacttgagaaaacaagttggta

SEQ ID NO: 49195 - DNA, 240 bp, Homo sapiens
tagaatatttgtttgagtgtgcacatttatacctgtttagtatttgattcagttaagcctccactcttctggatcaggaggtgattctgaacctgtggttctaacatatgacttaactgtttagagggaagagaagtctttctatactgagggatttgttaaaatcataaatgtttttgccctgagacttagcccagattctattttttttttttttttggcatttgtacattaagcacc

SEQ ID NO: 49196 - DNA, 786 bp, Homo sapiens
catgtccacacagaaaacctgcacatgaatgtttatagcagctttactcaaaattgccaaaaattggaagcaaccaagatgtccttcaataggtgggcggataaagaaattgtatccaattctatttctatgaggaaaatctattcatacaatagaatactagtgtcagagatttttttttaacaaagagctatcaagccatgaaaagataaggaagaactttaatgcatattggtaagtgaaaaaagccagtttgcaaaggctagatactatatgatcccaactgtataacattctgaaaaaggcacaactatggagacaataaaaagaacagagttttggatgaagggagggatgaacaggcagaatacaaacaaattttagggcagtgaaactattattatgatactttatggatatagaatattatgcatttttcaaaacacatagaatatacaacatgaagaatgaatgctaatgtaaactctggatttttattaataatattatttaattaaaatgatttattttacttattttcattattatctaaaatgttatttaattattaaatttagatgctacttaatttttgctttattattattatgttaatatcatcaactgtaactagtgtacaacactaatgcaagatgttaataggggaaatcgtgttggagagagagatatgtgagaactctgtactttcttttcaatgtttctgtaaacataaagctgctctaaaaaattaaatctattaaaaaaaaaactgagtggaaaaaaagc

SEQ ID NO: 49197 - DNA, 309 bp, Homo sapiens
aaaataagtattactatgtcaaaaaagtcttacaaatcatgcttctagttgccatcttaaaaattatgtgatgcagtgtgctataaatgtgatttagtatgtaatttgcctgggacgggggagaagctacatttattggcattgtggatgagctggatttatattactgatgttacctttgaaaggtatatgaatatttaatgataagatttttctggttgtcaaacatttgtaaatctgcaaacttcttaacaacattacacagtaaacaaaaaatacttcctgtatactaaggaagacttctaagga

SEQ ID NO: 49198 - DNA, 448 bp, Homo sapiens
  misc_feature (237)..(240): n is a, c, g, or t
  misc_feature (243)..(243): n is a, c, g, or t
  misc_feature (313)..(313): n is a, c, g, or t
  misc_feature (390)..(390): n is a, c, g, or t
  misc_feature (431)..(431): n is a, c, g, or t
tttttagaaacctgatgtgaaattacctgaaggaatgaagttagtgtgcttttaagttaagaatatcttcactcagtatccatggataggcttcagggaatctggatctctttgaaattaaagcaaaagtttggatgtatttctttttctggaggaaggatccattgcctttatgagtatgtaacagtccagaagaagttaataaaatagctcgaggctccgtctcaaaaaaaagannnnaanaaaattgttttagcgctgggtttcccaaggtgggagagacagacccagcctgggagctggcccctggctngtgtgctgacttcttgggggtcctcaaaccactgtatttttactgttgagcctgtacttgggggagagtccagttgncttttgagggaagttaaggaggaaaagattcctgggtaccnccagggttttctttgcc

SEQ ID NO: 49199 - DNA, 1184 bp, Homo sapiens
caatgtgcaaaaaaagatttttctttttgcagattttgtgtaaaaataaggacagtgtgaaaagtttccctaaaattgcaacagacatttgagaaaaagagagaatggaaaattctcaatccagtcaatgcaaaggagtcatacacaaggccaatgattcagggagggctccaggaaggacaggattaagatgattttaggctgatgaagactaatgggaaaacactgggtcccaagatatccgagtgaaatcagtctaataaaatgacattggaagacttctggtgacttatgcaaagccactgggtttaacaaaagaggcagagtggaagggcacgaggacccaagaggatatgccactggtttcctcatctgtaaaatgaaaggtttagctttgttgcttgacatgatttacttttcccattgttccacctgaaaatatagtacttaaaaagtgttacaagaaaaaaagatgcataatctcacttcaaattttacaaaatccttccacatgcaattgaaatagctacagaattttatcaactgcagagtcagagatggaaataaagatcaacttcaaggctcttatttttaagattaaaaaactcaaaatttaagggacttgttcttggcaaaaacttggcagtcaggattcagacctactcctcctgcgtaagtgagtctataaccctccgtataccacagtgcccacctaaatgagtctgtaaccgtccctataccacactgcccatccaggcgaagtcccttctcaatctgggtgccctctttcagttcccttcacatcctcaatggggtcatgtccttgatgtcaggagtcaggatgacatcatagagctggactagctagaaaattattctacggttaagaatcagtcaaggagaagaaaaaaaatttactcactgcaggaaagcatcatattatacatgttagctctctaacaaaaaccacagtacatttagattgaaggaaggaacaaattaccagtttgaaataacagacaacttggtgttacaatacagctaccattccctgggatacacaagctgaactgctcacagcagcttcttctaaccttttcaaaggatggaagatcatctgacaggcattacattatttttcagttttgaagttgttatgaatattaaatgaagcagccttttga

SEQ ID NO: 49200 - DNA, 1829 bp, Homo sapiens
  misc_feature (402)..(402): n is a, c, g, or t
tgagacagaatctcgctctgtcgcccaggctggaatgcagtggcgcgatctctgctcactacaagctccgcctcccgggttcacgccattctcccgcctcggcctcccaaagtgctgggattacaggcgtgagccaccgcgcccggccttaaaaattgaatctgtagcttaggccatccaaattttataaatccaaattaactttagaatgtttctattactttcacttttacatatataaattttaagtgtcctgattggctgaacaatatctcacatcaaatgctttgcctggaaatagatatcccactggggatagtggtgtgtaaactatgacttggacaattctatatactcaagcaccataaaaagtatgcagttgaaaagaaaatcaaagttgantcctgggtgccaactaaatattcaaatcaggtactcatccttatcagctaaattcattttcaccaggaacagaccaccaaataaattattttatcctaataactagttttgaagcagtgtaattactctggaagaaggctctaaaaagtcatgattcccccactattttgaaatgtatcctctaacaaggatcattatagtgtaatcttaatttttatgtttatcaagatgaaatcttgtttgaattgtgatattataaaaggggactcaaaaatccaagcagtctactgtgtttaaattaacaccacaaccttccttatcagattataagagtagaaaaattaacacttggtgtgtgaatcttcaggaaaatgagctatttcataagctcaaacaagcagcttccttttccagagaatatagaattatattatggtctccttaaatgtttagtagctcttatggtcacagcatttttaatctccctatggcatctttatggaataattttctaaagggtaattctctactaaaaatatcagaccccgaccatatttaatgtggagagcaataccctcttagaaagaaaatacattgactcatacacttgttaaaagttaataaagaaatagctcatttttaaagccggaagtttatggtctctgcatcgtcaatttaatttaagcattgctgagacaatctttaatctactcccctttttgtaataccttatttatggtgcattttcatttttatttgggggaaacgttagcccaacagagccggcagatgaaagtgttgaaaagaggtcaaatggaaacaaaggctcttacccgctgtatttcagacaggactgaggcacttagccgaggagccactgggttattagattaatttcaaaagagcttttacaagttgcttaattcctttttttttttttttttcaaaaacccatgaaccacaaactcaaatttctcctcaaatggggttaatctgacaaatgaggcatggacccagccttgtggaaaaagcattccacgctaatgagatcttggtctttcttgtgaggctacgttatttatgtaaatatgtctggaggcaccttctctaagcttttagttttctatgatctattagtttagtgtttattaaagaatcaaatgtatagaattaccaggcattcgtggggaatgctgtgtagcaaatgtaaaactgacctgctcggaagaaacgtaggaacgcttcaaacccactgtaatgtttggtttgagattattttcattgctttgagagtgaactgcctaagagtaggccttataataaatgctatgtgcgtcttcagtagttccaagctaaagcaatttggcattctcccactgtgatttgtgacttttaaacccacaaaataaaagctttttggtattgat

SEQ ID NO: 49201 - DNA, 2302 bp, Homo sapiens
  misc_feature (402)..(402): n is a, c, g, or t
tgagacagaatctcgctctgtcgcccaggctggaatgcagtggcgcgatctctgctcactacaagctccgcctcccgggttcacgccattctcccgcctcggcctcccaaagtgctgggattacaggcgtgagccaccgcgcccggccttaaaaattgaatctgtagcttaggccatccaaattttataaatccaaattaactttagaatgtttctattactttcacttttacatatataaattttaagtgtcctgattggctgaacaatatctcacatcaaatgctttgcctggaaatagatatcccactggggatagtggtgtgtaaactatgacttggacaattctatatactcaagcaccataaaaagtatgcagttgaaaagaaaatcaaagttgantcctgggtgccaactaaatattcaaatcaggtactcatccttatcagctaaattcattttcaccaggaacagaccaccaaataaattattttatcctaataactagttttgaagcagtgtaattactctggaagaaggctctaaaaagtcatgattcccccactattttgaaatgtatcctctaacaaggatcattatagtgtaatcttaatttttatgtttatcaagatgaaatcttgtttgaattgtgatattataaaaggggactcaaaaatccaagcagtctactgtgtttaaattaacaccacaaccttccttatcagattataagagtagaaaaattaacacttggtgtgtgaatcttcaggaaaatgagctatttcataagctcaaacaagcagcttccttttccagagaatatagaattatattatggtctccttaaatgtttagtagctcttatggtcacagcatttttaatctccctatggcatctttatggaataattttctaaagggtaattctctactaaaaatatcagaccccgaccatatttaatgtggagagcaataccctcttagaaagaaaatacattgactcatacacttgttaaaagttaataaagaaatagctcatttttaaagccggaagtttatggtctctgcatcgtcaatttaatttaagcattgctgagacaatctttaatctactcccctttttgtaataccttatttatggtgcattttcatttttatttgggggaaacgttagcccaacagagccggcagatgaaagtgttgaaaagaggtcaaatggaaacaaaggctcttacccgctgtatttcagacaggactgaggcacttagccgaggagccactgggttattagattaatttcaaaagagcttttacaagttgcttaattcctttttttttttttttttcaaaaacccatgaaccacaaactcaaatttctcctcaaatggggttaatctgacaaatgaggcatggacccagccttgtggaaaaagcattccacgctaatgagatcttggtctttcttgtgaggctacgttatttatgtaaatatgtctggaggcaccttctctaagcttttagttttctatgatctattagtttagtgtttattaaagaatcaaatgtatagaattaccaggcattcgtggggaatgctgtgtagcaaatgtaaaactgacctgctcggaagaaacgtaggaacgcttcaaacccactgtaatgtttggtttgagattattttcattgctttgagagtgaactgcctaagagtaggccttataataaatgctatgtgcgtcttcagtagttccaagctaaagcaatttggcattctcccactgtgatttgtgacttttaaacccacaaaataaaagctttttggtattgattgtttttaattaaaaatacttccaagtataaattgaaacggatgccacccttgaagatttactggcgggaatgctcactcttgtcgttttcctcagtatcgttcatgtctttggcaacaagaacacctgatgaaagcaagcaatgctcagttcccatcaacatttctagttagggggattctcataaccccacagtttacctgagaaagttttctgtgttagaagaatggggtcgagagtattaccttttagctcagtgtggccgggccttttgttgcagtcaaatggcaaatacgcactccttgaaatggcttcttttatttggttttgttttcttagacttataaatttgaaaagaatgcaatttaaaaagtgatttctcacaaagagtaaatatgccttttgcaaatcaatttttgtaacaagttatttatatgatattacttaataaactggtttttttctaaacttgc

SEQ ID NO: 49202 - DNA, 768 bp, Homo sapiens
tgaaaggatattttaattacgcaataaaaagaaatgccatttatggcccaacagaataatttttttttttaaagacaatccttggtattagtgagaagtactgggaaatggagatgttcctgtttctttttagagataagttttcgtcatgttttcctgcatgttaaagatttattggaggaatgttcttcaggttgtttaataatagagcacttcatcgttaaaagggaagaaacaagttcattcgtttggtagacttttatatttattgaagactgttacataccagtcactcttatagcgtagttgaagtgggatatgagtagtcagatgttactctaaagtatgatagagtgagtcccgaaagatggaagaatgggaaatataggagacattgcagggggcactccattggaggcagtggttttgggagaggccttgagaccaaagggaatgtggagtgtttggggagctgctgcggtatggagaggaaggggttcatggccgtctcgaagggctgtgcccacagtatggaactggaactgtgtgttgaaacagtggagagcctttggaggattttaagcatggaagtgatgtattcaaacttgctttgacatgctgaggttcataatggactggctcttgaattaacagggaagtccacactgcaatggagattactaaaactgacatggaggatcctgaaaaagaaaaactttggaagacagtctatttttaaaagttcccaggaaatgcaaaggaattaag

SEQ ID NO: 49203 - DNA, 302 bp, Homo sapiens
atgatgcttataacactgttgacagtataggttcctaagagaacagagctagaaagttaaccaaaggtcaaattctcatataaaaggaaaaagggtgttttttaaccctttactcataaagaataaatgagcataatctctttttaagatcacatttggacagtaaacattgaaaacttttattgtgtgtgtaccctttcaagctggcaattttgttttcatggctttattgtaacaaatacgaaatatgcacaaagatgtgtctgtgtctatatgtaagtaggtttattaagcattatttg

SEQ ID NO: 49204 - DNA, 435 bp, Homo sapiens
aggggggagtacattcagtaaactgtccctgttaaaatatttaatagaaaaggttatgtattcccaaagaggcaaggtaatctcagaaattaccttaaaattttggcacagtagaaatgtgaacacactttcagagttttcctaatgaaaggtaaacctgcttttgtattagaaatgtctataacacttcagaaatgaacaggtaagatgtgttggagccacttaaaggcagttcagctctatggttctcatgacagcttaaagagatctcagccctgaacacaatccccttttccttccagagcttaactacagcagtgttccttgctcactccccatgccttctttccactgggcagaagaaagcaagtgtgggagaaaggcgctccgcagtcaccctaacatgaaggggcgggcagagaggatgcttccggg

SEQ ID NO: 49205 - DNA, 1653 bp, Homo sapiens
cttcctcccttcaggaagtttgaggctgagacccgaaaagacctgggtgcaagcctccaggcaccctgaagggagtgggctgagggctggcccaagctccctcctctccctctgtagagcctaggatgcccctctgctgcagcggctcctgagctcatggagccctcagccaccccaggggcccagatgggggtcccccctggcagcagagagccgtcccctgtgcctccagactatgaagatgagtttctccgctatctgtggcgtgattatctgtacccaaaacagtatgagtgggtcctcatcgcagcctatgtggctgtgttcgtcgtggccctggtgggcaacacgctggtctgcctggccgtgtggcggaaccaccacatgaggacagtcaccaactacttcattgtcaacctgtccctggctgacgttctggtgactgctatctgcctgccggccagcctgctggtggacatcactgagtcctggctgttcggccatgccctctgcaaggtcatcccctatctacaggctgtgtccgtgtcagtggcagtgctaactctcagcttcatcgccctggaccgctggtatgccatctgccacccactattgttcaagagcacagcccggcgggcccgtggctccatcctgggcatctgggctgtgtcgctggccatcatggtgccccaggctgcagtcatggaatgcagcagtgtgctgcctgagctagccaaccgcacacggctcttctcagtctgtgatgaacgctgggcagatgacctctatcccaagatctaccacagttgcttctttattgtcacctacctggccccactgggcctcatggccatggcctatttccagatattccgcaagctctggggccgccagatccccggcaccacctcagcactggtgcggaactggaagcgcccctcagaccagctgggggacctggagcagggcctgagtggagagccccagccccggggccgcgccttcctggctgaagtgaagcagatgcgtgcacggaggaagacagccaagatgctgatggtggtgctgctggtcttcgccctctgctacctgcccatcagcgtcctcaatgtccttaagagggtgttcgggatgttccgccaagccagtgaccgcgaagctgtctacgcctgcttcaccttctcccactggctggtgtacgccaacagcgctgccaaccccatcatctacaacttcctcagtggcaaattccgggagcagtttaaggctgccttctcctgctgcctgcctggcctgggtccctgcggctctctgaaggcccctagtccccgctcctctgccagccacaagtccttgtccttgcagagccgatgctccatctccaaaatctctgagcatgtggtgctcaccagcgtcaccacagtgctgccctgagcgagggctgccctggaggctccggctcgggggatctgcccctacccctcatggaaagacagctggatgtggtgaaaggctgtggcttcagtcctgggtttctgcctgtgtgactctggataagtcacttcctctgtctgagcttgtgtcccctaagcagggttgatgtgaggattaagcatgctgaagcaagtggaaagctccttgtaaactgtgaag

SEQ ID NO: 49206 - DNA, 1467 bp, Homo sapiens
cgcagttgccgcggatcgtgctgagccccgcgagccgaggcagcgcagcctagggagggggctgccccggccccctcctgcagtcccggcccctagaggctcggccttcctcgcaggaaggcgaagtccccggtgccaggtccggggaccagcagccgagaacgcccgggtcccggagccaacaggctccgagtgccctcgctcccccgcgccttcccggagccccgccagcccccgaggtgcaggaaggtcccgcggacggagcgggcctgccggcgttcagtggggttcttggtgaagcacttggcacgcatcggagctcattactcctcatcgtggtcctgtaaggctgtgtccgtgtcagtggcagtgctaactctcagcttcatcgccctggaccgctggtatgccatctgccacccactattgttcaagagcacagcccggcgggcccgtggctccatcctgggcatctgggctgtgtcgctggccatcatggtgccccaggctgcagtcatggaatgcagcagtgtgctgcctgagctagccaaccgcacacggctcttctcagtctgtgatgaacgctgggcagatgacctctatcccaagatctaccacagttgcttctttattgtcacctacctggccccactgggcctcatggccatggcctatttccagatattccgcaagctctggggccgccagatccccggcaccacctcagcactggtgcggaactggaagcgcccctcagaccagctgggggacctggagcagggcctgagtggagagccccagccccggggccgcgccttcctggctgaagtgaagcagatgcgtgcacggaggaagacagccaagatgctgatggtggtgctgctggtcttcgccctctgctacctgcccatcagcgtcctcaatgtccttaagagggtgttcgggatgttccgccaagccagtgaccgcgaagctgtctacgcctgcttcaccttctcccactggctggtgtacgccaacagcgctgccaaccccatcatctacaacttcctcagtggcaaattccgggagcagtttaaggctgccttctcctgctgcctgcctggcctgggtccctgcggctctctgaaggcccctagtccccgctcctctgccagccacaagtccttgtccttgcagagccgatgctccatctccaaaatctctgagcatgtggtgctcaccagcgtcaccacagtgctgccctgagcgagggctgccctggaggctccggctcgggggatctgcccctacccctcatggaaagacagctggatgtggtgaaaggctgtggcttcagtcctgggtttctgcctgtgtgactctggataagtcacttcctctgtctgagcttgtgtcccctaagcagggttgatgtgaggattaagcatgctgaagcaagtggaaagctccttgtaaactgtgaag

SEQ ID NO: 49207 - DNA, 467 bp, Homo sapiens
ctccccatccgtgtggaactgtgagtccattaaacctctttcctttataaattacccggtcttgggtatatctttattagcagaatgagaacagactaatacatgtggtttacaataacataataaccttaattatgattgatagcatatactcagacattagaatggtagacatcctatatgattttaaaacacatattaatattattcattaaaatataacctatggaagattaaacatcactttggcaatcctctgtaactaaacatgtcaaataatcctgtttacctctctcttggatgctctaggggtcctctagcatccaaaagctaggggtcaggaaagacaatttttgaagctgaagtttgattttgggaaatatgttaaatatatatgttagaggttcaaaagcatgtgatattatggaatagaattccagattaccgtaagttcttttgccaaaatg

SEQ ID NO: 49208 - DNA, 157 bp, Homo sapiens
aagatactgagtttataaagcacgctgaagtcaaggagctggagatcatcccatgggggctgtccagagagacacacggatctaggtagaacaatgcaggtgtcaacagctcataatggtagaaggaaaaacccagcagccaaagtgatgtttttgt

SEQ ID NO: 49209 - DNA, 449 bp, Homo sapiens
cttgccctcagccccagtggccactggcaaagactgttatttcccaatggataagagagcctccttcatcttcttggccatagttgggatgaggtgcgtgtggtcatccacacacttggtcacacaaccgtccagctgctgcttcacctgaagctccttactcccagtatccattgaatctttggctttgttgttgcaatgcatggcgcaccgggccaggtggtgccggaacttctccaactcactggtgagcaaagcccgggcttgagccagaggcacatggcagtgctttgatgtactggtgcacctactgcatggaggcctggctgtcctcacaacagctggtgctgcaccggaacatgagaccctgcatcttccagatgttctctctctccagactcttcaccatggagtccaccacctcctgcacccacagctgctgcagctct

SEQ ID NO: 49210 - DNA, 715 bp, Homo sapiens
tctttggtttctgtggtttgaaattggtgtgtaaatagcataaggggacatgcgctcttctgagcttgagcagctggtcacattcttatctgccacttgtgttcccacttcatctggcccagtagctcacaaagggccactggagtgatcagtgaaggggggtgcctgggcggctggcctgatggggaggctcctcctgcagatgccacgttaataagtgctgcgtcctgctacggcactggggatccaggaggtgagtccgaaaccacattggccatgccctgctggatatagtgcacacagggcatccagggcaagacagccagggaggagaagggcctgggctcggcctctccagcccctccatgagctcacctgcttactcatccaaccccatggaaagcgatgcatctggcactgccaggaagataaaaaaagaaggaaaatcctgccttcggtgtctaatgcgggagacagagtccccagtaactgtactgtgagagaatgtggcctcagccattagagatgggcccagcgaagggattcaggagttcaacagaaggaggctcccacccagatccagaaaggctgcatgggggttttggggagcctagaactggggaggaagttctgggtagagggactaagggtagaggtcccctaagtgcaggagccaggtgggaaagtgaccagctatttcagattgcggtgtttg

SEQ ID NO: 49211 - DNA, 344 bp, Homo sapiens
gaagccatgtctgaacaaggcaataacatcccctcttattccaaagtgcctctcttgtaaaactcaaacttaacaagaggctttggattcctctctcagttccttgtcttaacaggggaatacatcccatgtctaaccagaatgtttgttgcttctggagtcaaacatatgcgcctcctaggcacagccattaacgtgggtgtttcttggatggctcagacaaccagagtttggattttaatggctcttttcacctctcttctccctgaggccatctatctaggagaaatctcacctatgtatgagaggcagaaaaaggagaaatactgaaataattgcatttt

SEQ ID NO: 49212 - DNA, 534 bp, Homo sapiens
ctccgatttgttcctagagcccctcccccagcagctaccagtctagaaactgtgtctatggatttgcatatagtggatattttatataaggtagtttagtgtctagcttctggtccacttgtactggtgttgactatgtatcagcccagcttatgtggctacagggattctcgttgcacatctgaatgaagccaaaaacatacgcaaggttttaagagtatttgatgtcttattggcaatatgaggtggaccagccatacagttagtaacataaccagcattggcttctggcacttagttctgagttctttccgaagaacttatatatgcagaaactggacttagcactcacttaaagaagaaataactttgataagaaccaggtgggttgttctttctctttattggtttcatgttttcagatcttgctaactctccccagctgtgccctgcagtgggagacctatttgagactctgttatgatatgcccaagataccacacatgccctaggctctttcccctaggcgacaac

SEQ ID NO: 49213 - DNA, 268 bp, Homo sapiens
ttcaggtgtaaattttattgccttggataaataaattattgatcttttttaaggcagcagttattaaattggtaatagaagatgctgcttgcttagaattgggaaattcggctgggtgcagtgactcaatgcctgtgatcccaaagtgctgggattacaggcgtgagccaccgcacccggccaggatgggttaggtttcaatgtaccacagccccagccctcacaccttcatgaggttctgctccatgtaggaggcgaagtaccgcag

SEQ ID NO: 49214 - DNA, 917 bp, Homo sapiens
ttcaggtgtaaattttattgccttggataaataaattattgatcttttttaaggcagcagttattaaattggtaatagaagatgctgcttgcttagaattgggaaattcggctgggtgcagtgactcaatgcctgtgatcccagtactttgggaggttgaggcgggcagatcacttgaggtcaggagtttgagattggcctggtcaacatggtgaaatcctgtctctactaaaaatacaaaaattagctgggcatggtggcacatacctgtaatcccagctactcgggaggctgaaacaggagaatcgcttgaacccaggagatggagttggcagtgagccaagattagcctgggcaacagtgagtgagactcggtctcaaacaaaaaccaaattgggaaattcttcttgagttaaaaaagacactttttattatgaatcagattccaaatcattaactatttttgcaaaactggcacaagtggtttttctttttaagtatattaacagggtagctcctgagcctttccctttattggaaactttaactgcagtgttaatatatacactgcaaaagaccaaggatgcagttgaatggaaaattactcagtgtatagaaaggaaaaaaaccagaaatttaaaatagatacagaaaagtacactggtaatatttttatttcctattggagagtgaatccccacagttgctttttgtgacttgattcaaatgaggcactcattattgttaccaaacttgtaaaagcattccatgtattcagtggaggcagaatgtataatattttttccttataatttagcatacaggaaaagtatttattttttaagtaagggtatcttaattatgctcatttcttcccctaaaccacattatctatatgattggaccctttagtgaaa

SEQ ID NO: 49215 - DNA, 1329 bp, Homo sapiens
tggcatgatcatggttcactgtagcctcaacctcctaggttcaagcagtcctcccacctcagcctcccgagtagcgggactacaggcaggcaccaccatacctggctaattcttttgtattttttgtagagaagggatttcaccatgttgctcaggctggtctcaaactccagagctcaaacagtctgcctgctttgacctcccaaaggactgggattacaggccacctcacccagcctttctcagtttttgaatagaaacatctatttcaaattcatttttaagtatattttgtgaatataggattacaggttgacacttttttctttgaggaacttcagaatggcactccattatcttctcacttccatcatttctgttgacaagtgattttcagtgctattgtttctcctttgagagtaatgtgtcagtaacatgcactggctcacgcccgtcatcccagcacccttgagcccaggagttcaaaaccagcccaggcaacagagcaagatcccccccctctacaaaagaaaacgacaggagggaggcaggaaggaggagagagggagggaggggaaaagaaaaaagaaaagaagaaatgtgtccctcctacctgcctctagctgcttttactgttttttccttgtctttcatttgcagcagtttaagtatagtgtgcctgggttgggtgcggtggctcacgcctataatcccagcactttgggaggccaaggccagtggatcacctgaggtcagaagtttgagaccaacctggccaacatggtgaaaccccgtctccactaaaaaatccaaaaattagccaggcatggtggcgcgtgcctgtaatcccagctattcgggagactgaggcaggagaatcgcttgaccttggggaggcggaggttgcagtgagctgagatcgcgcgccaccgtactccagcctgggtgacaaagaaaaactccgtctcaaaaaataataataaaaaaaaagtatagtgtgcctggatgcagttttgtttttatttatcctgcttggggatcataaagctttatcagttttggaaagttctcaggctatatttatttaactgttccttctgccccatcttcctcccttctaagactccagttacatatgtgttaggcctgttcaccacctcccacaagtatcttatgttctttgctgtattttccatactctttgtctctgttcttcagcttagagtttttattctgtcctatattacagttcaaagaatgttccttctgctaaatctaattgtagttaacccatatgctaagtagttaatttcaattattgtattttta

SEQ ID NO: 49216 - DNA, 449 bp, Homo sapiens
tgacagagtgagaccctgtctcaaaataaaataaaataaaataagcagcagcagcagcagctaggttccaaaaaaaaagttggaagggtgtgatgggattttagttgctggatgctgaagttctgccaacacagtgggtttggagagtaggagtgaaagagtggagactggccataagttgggagggtaagtaattggttgtgattgaaaggaaagaaggaggtaatgatgagttttggtctgggaaccggagaatggtggtccatggacagaaatagagaaggcaagatgagaagatgcaataggcaaaggcagtgagtttaatggttgacttttggtatttgctgtgtatgccctctgtacctttgacctgggccttcaacccttggacagagcttaagatggctgcgtcccaagtggtccatcccaagcgagttttccctggactt

SEQ ID NO: 49217 - DNA, 708 bp, Homo sapiens
cagacaccacttagtaaactaatgaaagcctattgtgaaccacggggattgtcagtgaagcagatcagattccgatttggtgggcaaccaatcagtggaacagacaaacctgcacagttggaaatggaagatgaagatacaattgatgtgtttcaacagcctacgggaggtgtctactgaaaagggaacctgcttctttactccagaacgctgttctttaaagaccaagattactgcattctcaattagaaaactgcaatttggttccaccacattctgactactacagtatagttttctctattcttttgtttcccccttccacattcttttattatacatgaagtaactggtatgtgtacacaagcatattgcttttttcttcaaaccaaacagccaatggtgtgttttgattgacatcaagtggagacaggatgggaaaaaatactgattctgtgaaaataccccctttatcccattagtggcatgttccattcaggtcttatctttatattctagtaagttattttgctctcactgttttaacaacaacaaaaaaaaattctcacataccttgttcaattggaggattttcatgtttttcatttatcattgtaaaaccaaggacaattttataacttttgtgtacatagctgttacatgtagggcaatctgtctttaagtagggataaattactctaaaaaaaa

SEQ ID NO: 49218 - DNA, 354 bp, Homo sapiens
aacagggtctttgtcacccaggctggagtgcagtggtttgttcatagctcactggaacctcgaaatcctgggctcaagcaatcctgcagcctcggcctcccaaagtgctgggattacaggcatgtgacaccacacgcagcgcaattttctattttaaaataattttagacttacagaaaaattgcaaaaaataatagagttcctacttaaccttcactcagttttccttaatgttaacacctggcagtaccatagcataattattgaaaccaggaaattaacactgatgcagtactatggactaaccagcagaccttatcatgattttgctggctttcctggtaaggtcttttt

SEQ ID NO: 49219 - DNA, 403 bp, Homo sapiens
cgaaggcaaatctctgcatttttggtatggaattgaatttgggatgattagcagtcatatggagccatgttttatgtgtgaccaaagtataaaacttaatttttaaacattgtagtaaacatacacgtgtaatgtttcattaaattacataaccatagtaccagtatcaaaatcaagaagttacattgaaacatttaagtatgcagattctatttaatttaagcaatataataaatatacaataaataaaattggttatctggtatgattaaaaagtctcagtatggaccaaatatggtggttcatgccattcccagcagtttgggagggcaaggcaggaggctcgattcagtccaggagtttaggaccagcctgggcaacaaagtgaggccctgactctacc

SEQ ID NO: 49220 - DNA, 361 bp, Homo sapiens
aacttgccacttcatggtcacgggattgaattgggcagaacattttccaggccccagctggtagtgcctccttcacggaggcgggtatcttgtgccccactctggtgtatttgcactcccagaacctccttctttctctctcctcttcccccatcaggaatatatgctcatggttaaggaaacctagcttggatttccttggaatatatgtccatttaatttataattttaaggctggatgcagtgctcatgcctgtaatctcagcagtttgggaagtcaaggcagccggatcacctgaggtcaggagtttgagaggagcctggctcatgtggtgaaaccttgtctctactaaaaatacaa

SEQ ID NO: 49221 - DNA, 490 bp, Homo sapiens
tgctactttctggcaagcagccatcaaattatcccctttgtgtttttctgccttctagaaaactgaaaatgctgtctgatatggtcactttttcagtttccgtctgatacactctaggattagcagggaatttcatggaatgcagttgacagggagatcaataactgtagaagccagaagttctaggaagataggaaaaaacttaattttgcaggcagtaggaggggagacgtcctgaatactgggtatggtgcttgattctgtgcatatcatctcatttttccatccacaatagccagaagtaggtactattacctttacattttgatgaaatcgtggctcaacttaatgacttgccatgggtcctagtacctacttttttctatagtttatactatgtccataaacataaaggataagttaggcatagaggagtgagaaagccgagtaggaagtttgaacttgaaggagagggaatgacttgtgtatt

SEQ ID NO: 49222 - DNA, 445 bp, Homo sapiens
gcttcactgagtaatgtatatcttctaaatgttaatacattttgttatatactatcaaacaaattacattaataccaacactgatctcatcagaaaaatctttacatattaggaacttgtcaagcttatggtagcaggcacaagttttaaaacaatttaatggcggggagcggtgcctcaagcatgtaatcccagcactttgggaggccgaggccggcggatcacgaggtcagacaattgagatcatcctggccaacatggtgaaaccctgtctctactaaaaatacaaaaaattagctgggtatggtggcacgcgcatgtagtcccagctacttgggaggctgaggcaggggaatcgcttgaacccgggaggcagaggttgcagtgagctgagattgccccactgcactccagcctggtgacagagtgagactccgtgtcaaaa

SEQ ID NO: 49223 - DNA, 1896 bp, Homo sapiens
atttaaaatatttcagtgtgccatatagctctgtcccttggtttggttggccttgttttttcctgtgaagaatgaaagggcaaaggtgataccaaaatgaaacagctttggagtgatatctttaggagcctggaagccatttttgtaattttgttgtctatataaatgctacctttgcctggaggtagtgcgcctgtgctgtgtacatccagagggcaacagtaatagccaacaaccagacaaactagtgaagttaatctgtgagtgatgattttatgatacttatatgcaaattaaaggcagaagttagtttcttctcaagatgcctttttggctgaacattaccatttttctttccccagggtttgaaagaaaagggccttttttggatttaactatattctgtctgcattctattcttcatgcgtaggtttctactagaacctgtggaggggggacaccaaatttagattgagtcagtccatgctgataagaagcgtgaggaccttgttggacacagagcttctagatctttccacctgtagcctctaccctgttcctgcactttacctgaaactgtgcctctggtctttagaccagctgttggaacatatcactcacccactcctctgttatagcaaagggccagctgggatggtacacgctgtgtaatcagacaccttctcgacaagtacagctgatgtttctcactgttgccttaccattctctgagccatctttgatgttgatttgtaaaaaaaaacaaaaaacaaaaaaaaaacctagtagcaaaactcctgttaaactcagagcttgtatgtggtggtcattcaacatccttatttctagatttacacaaactgtaccaactgtaatctttttctggcacgcgtatgtggtcagatgcttcataaacgtgagccaacttgggttgtaaacattggacataatatacaaattggggaattttggatgactgcataatcctgtcattagagatttcataagacagaagataactgtttatttgtaatttaacacatttttagaaaagatgatctttaatttctttccctcagttgtgtatacagctatacaccatactaacaccgtactatgtcataggaacttaaagttagatgtatctaaatcccttcacttttctaagacttctctgtgctcccacccctgaagtcttcaaatcatttttcatctgtgaagtcactgaggtactgggcttgactatagtggtaacagttaaggggagttgaactattgatcttccaagaagaaagggaccagatagtgttaagatgctgcagttgtgttactgtgaagaaaagattcgcttccactttcagcaggctatataaatatatatacatatatatatatattttcactttggtaaaaaaaagttgaaaaatctgaggagaacataattaccttcacaaattatttatagatacactgggtgagaagcttactgtagggcagtcacccaaaaaaaactaattttagtgctttcaatagtgtaatatttgtatctattaccatggcagcagtgtctgctgcacactgtgtcctattactgtaaatctcctggtttataattcttatggaaactaatttgttttgtaatggaatccagagcagatatgtataatatgatcaggattgtcctacagttgtaaataagaataggtcctgtttattttgacatctttttacaaatgcattgtattagggtgtgaatattctgaaccatcctcttgtttaaagtttggaaatttttattgttaaatgtaacattttaatggttgtaataattatttgtatagatatgaatatagtattttatttaagaaaataaactttgcatttttgcattgtaaa

SEQ ID NO: 49224 - DNA, 2137 bp, Homo sapiens
ggggggctgggaaagttgaggccgcgctgccgccgggtctccggccttgagggctcgggctcgcagcggctgcggtggccgcaaaaagaggcggcgggggcggggggagaggagggcctgggcccgcgctcccccagccccggaggagcaggcggtggccgcggacggagagattcgcccagacggtcagacactcctgccttcccctcctgggatcatgacccaggcgggggtcgccgccgtcgccgccgccaccgcggccgagaccgcgcagccggcggtaagaagaaagcataacccatagaccatcttctggcagaagatgatacatttggatcagaaacgggaggcattggaagccaggaatcaaaagtgaagaaactctgcaagcccttaggttcctattactgtaaccatgccagaaatgacagagaatgagacgcctacaaaaaagcagcacagaaagaaaaaccgggagacacacaatgcagtggagaggcatagaaagaagaaaattaatgctgggataaacagaataggagagctgatcccatgttctcctgccctgaagcagagcaagaatatgatcctggaccaagcctttaaatatataacagaattgaaaaggcaaaatgatgaactcctgcttaatggaggaaacaatgaacaaggtttctactagaacctgtggaggggggacaccaaatttagattgagtcagtccatgctgataagaagcgtgaggaccttgttggacacagagcttctagatctttccacctgtagcctctaccctgttcctgcactttacctgaaactgtgcctctggtctttagaccagctgttggaacatatcactcacccactcctctgttatagcaaagggccagctgggatggtacacgctgtgtaatcagacaccttctcgacaagtacagctgatgtttctcactgttgccttaccattctctgagccatctttgatgttgatttgtaaaaaaaaacaaaaaacaaaaaaaaaacctagtagcaaaactcctgttaaactcagagcttgtatgtggtggtcattcaacatccttatttctagatttacacaaactgtaccaactgtaatctttttctggcacgcgtatgtggtcagatgcttcataaacgtgagccaacttgggttgtaaacattggacataatatacaaattggggaattttggatgactgcataatcctgtcattagagatttcataagacagaagataactgtttatttgtaatttaacacatttttagaaaagatgatctttaatttctttccctcagttgtgtatacagctatacaccatactaacaccgtactatgtcataggaacttaaagttagatgtatctaaatcccttcacttttctaagacttctctgtgctcccacccctgaagtcttcaaatcatttttcatctgtgaagtcactgaggtactgggcttgactatagtggtaacagttaaggggagttgaactattgatcttccaagaagaaagggaccagatagtgttaagatgctgcagttgtgttactgtgaagaaaagattcgcttccactttcagcaggctatataaatatatatacatatatatatatattttcactttggtaaaaaaaagttgaaaaatctgaggagaacataattaccttcacaaattatttatagatacactgggtgagaagcttactgtagggcagtcacccaaaaaaaactaattttagtgctttcaatagtgtaatatttgtatctattaccatggcagcagtgtctgctgcacactgtgtcctattactgtaaatctcctggtttataattcttatggaaactaatttgttttgtaatggaatccagagcagatatgtataatatgatcaggattgtcctacagttgtaaataagaataggtcctgtttattttgacatctttttacaaatgcattgtattagggtgtgaatattctgaaccatcctcttgtttaaagtttggaaatttttattgttaaatgtaacattttaatggttgtaataattatttgtatagatatgaatatagtattttatttaagaaaataaactttgcatttttgcattgtaaa

SEQ ID NO: 49225 - DNA, 450 bp, Homo sapiens
gtgcaggggagataaattgtgtggctcatcagaaacactgaccaatcgagaaattcatccagacatatctaccaacacttttgattgtaaagtgtcatcattcctataatgaaagggcatttgtcaggctcagctgggtccagggcctcaaaaatggcaagaagacctggtctttctccttccatctctgggctgtcccggccagctctgaggagtaagctggggctgaactgcactcagcgtcgtgtgagttacatgaccttcaccttctcctgttgtttccttcatcagctgtaaccagaacagccagtttgcattttctttttctttcaatcagcccatctaggatgagggctggacgaagccttaggaacttcgctgctgctgaaaagatctaagtgtcgcccaagtgggcagtctaggggcaaagccagggtggattttcccact

SEQ ID NO: 49226 - DNA, 424 bp, Homo sapiens
gcgataaagcctccctgagtaggcattgacttgatacccaataatggctgctaaggagccgttatgtagtgccgtgtcagtgatccgtgcgttgaggactccccgagtacgcattgacacgatagaccggaacggctcagaagaagctgttatggtctatcatgccagtgatgtgcggatattggagcggctctggcccttctgtggaaatgatggagtctctgaaggagctggggttgggccatgtgggcgccatcagttgagcctagcagcagctccattttccctttgccttgggtttacttcagaagagtcagctcggaaaagttgtccaattacttcagtggtcccaatattacaccaccaaaacgtgagcaaaagtgaaagatattcttgccattcgtctttcgtttcttctcaagag

SEQ ID NO: 49227 - DNA, 305 bp, Homo sapiens
gcctgctagaaatgcaggtcccagctcccccgccccccacccaaatcagaacctgtgtttcaacaagattccaaggtgatctgtgtgcacagtgacatttaagaagccctggttctcaggggaaaaaggccagctttggtggatggagccaatttctaggtcagacttacacgcatgctgcctagagaccaagaggcttcctcccccaccctgaaagcagcagtatgctcagctgatttaagttacaatattttgactgggtaatacttacatgattcaaagtttagaaggtgcaaaggatagtc

SEQ ID NO: 49228 - DNA, 480 bp, Homo sapiens
tgagaacgtgccactgcactccagcctgggaaagattgcgagactccctctcaaaaaaaaaaacaaaaaacaaacaaacaaaaaactcatctgtggaatatagatcatcatcgtaagggaatttttttttaaattgggcaaaaagcctggacaacatagcaagaccctatctctatcaaaaaattagctgggcagggccaggcgtggtggctcccacctgtaatcccagcactttgggaggctgaggcgggcagatcacttgagattaggagttcaagaccagcctggcaaacatggcaaaactccatctctaaaaacaagtaccaaaaaaaattagctgggtgtggtggcacacacctataatcccagctgctcctgaggctgaggcaggagaattgcttgaactcaggaggcagaggttgcagtgaaccgagattgcgccactgcattccaacctgggtgacagagcaagactccatc

SEQ ID NO: 49229 - DNA, 3585 bp, Homo sapiens
ggcatgtgagcggaagcttaggttgccagccgcgaggaccgcacggaggaggagcaggagcgcggagccgcgagccccgagccccgagcccggcgcctggctgagtagatgtccatgaggagccccatctctgcccagctggccctggatggcgttggcaccatggtgaactgcaccatcaagtcagaggagaagaaagagccttgccacgaggccccccagggctcagccactgccgctgaacctcagcctggagacccagcccgggcctcccaggatagtgctgacccccaagctccagcccaggggaatttcaggggctcctgggactgtagctctccagagggtaatgggtccccagaacccaagagaccaggagtgtcggaggctgcctctggaagccaggagaagctggacttcaaccgaaatttgaaagaagtggtgccagccatagagaagctgttgtccagtgactggaaggagaggtttctaggaaggaactctatggaagccaaagatgtcaaagggacccaagagagcctagcagagaaggagctccagcttctggtcatgattcaccagctgtccaccctgcgggaccagctcctgacagcccactcggagcagaagaacatggctgccatgctgtttgagaagcagcagcagcagatggagcttgcccggcagcagcaggagcagattgcaaagcagcagcagcagctgattcagcagcagcataagatcaacctccttcagcagcagatccagcaggttaacatgccttatgtcatgatcccagccttccccccaagccaccaacctctgcctgtcacccctgactcccagctggccttacccattcagcccattccctgcaaaccagtggagtatccgctgcagctgctgcacagcccccctgccccagtggtgaagaggcctggggccatggccacccaccaccccctgcaggagccctcccagcccctgaacctcacagccaagcccaaggcccccgagctgcccaacacctccagctccccaagcctgaagatgagcagctgtgtgccccgcccccccagccatggaggccccacgcgggacctgcagtccagccccccgagcctgcctctgggcttccttggtgaaggggacgctgtcaccaaagccatccaggatgctcggcagctgctgcacagccacagtggggccttggatggctcccccaacacccccttccgtaaggacctcatcagcctggactcatccccagccaaggagcggctggaggacggctgtgtgcacccactggaggaagccatgctgagctgcgacatggatggctcccgccacttccccgagtcccgaaacagcagccacatcaagaggcccatgaacgccttcatggtgtgggccaaggatgagcggaggaagatcctgcaagccttcccagacatgcacaactccagcatcagcaagatccttggatctcgctggaagtccatgaccaaccaggagaagcagccctactatgaggaacaggcgcggctgagccggcagcacctggagaagtatcctgactacaagtacaagccgcggcccaagcgcacctgcatcgtggagggcaagcggctgcgcgtgggagagtacaaggccctgatgaggacccggcgtcaggatgcccgccagagctacgtgatccccccgcaggctggccaggtgcagatgagctcctcagatgtcctgtaccctcgggcagcaggcatgccgctggcacagccactggtggagcactatgtccctcgtagcctggaccccaacatgcctgtgatcgtcaacacctgcagcctcagagaggagggtgagggcacagatgacaggcactcggtggctgatggcgagatgtaccggtacagcgaggacgaggactcggagggcgaagagaagagcgatggggagttggtggtgctcacagactgatcccggctgggtgggcctggccccttctcctctggggaagaccttgtcccaactcgatgggcacagccagccaacctaagactatgttggtacttggacttgttcgtgccccagagatgggcaaagctgtgcacttgcagatacattcatgaggggagaggcgccctcccttcctgaggagctgttggcctgggtgggcaggaactgcagtatggccatgggctgagcaggctgagcacctcagcctttagggcttatggccaggggacactgtatgactctcctctcctgcaggtgtctatccacctggggtatggcatctaccgacctgtctccctggggtcacatgctttgtttccattcttgtcctggctggaccagccactgtgggaccaacacccctcccacactcccccagactgctcgtctatcaccaggatcgctttgtactttgtgcaaaagggtctggctgtcccttgctgttttcatctctgccaagcctattgtgcctctggctgctgtatgtgtgcgcgtgcacgtgtgtgtgtttcatctgttcattcactgcacaagatatttattgagtgcccactacgtgccaggcactgttgctgagttcctgtgggtgtgtctctcgatgccactcctgcttctctgggggcctctttctgtgcttctctttgtccccaaattgctacctctttgtcagtctgggtgtctcaggttctgtgtgtccttgtgtgcatttctgtctctctctgtcctcgtctctctgcaaggccctctatttctctctttcttggtgtctgtcctttgccccctgtgccctctggattctctgggtctatgtaggcccctggtctgccctgggctcatcagccttcctgacctcctcctgccctccccttcactccctccctggctctgccagtcggttcccacggagccatttttagctctgatcagcatgggaatgtgcctcggcctccaaggggctttgtcctggtgcccccgcccctggtcccaacctgatcccacgagggagttgggacaggaggattgatggtgctccccttcctgccagcgtcagaggccctggagaggggctgtccatggcagctggtctttattcctccctcatgagcacagggtcgggggggtccccattcttggaagaggttgagaagactcctgggcttcagcctctcccacccagccctgcccctcacctgcctgccctcccctcccccactctatactagggactggatctcagcctctgatcagtttcacaaagtttgttccctaaggaaatcaaatcccattgtcacctaactctgaagatctaaatagcccttggatcagtacgggaaccccaaatcccacagggccagatgtggagtctgtgtctgcccccgtcttctctccatcctcaaagcccccacttctctccaggctgtttctttttttatgactgtaaacatagatagtgctttattttgttaataataagataatgatgagtaacttaaccagcacatttctcctgtttacactcgggggatttttttgttttctgatgacataataaagacagatcatttcaga

SEQ ID NO: 49230 - DNA, 3993 bp, Homo sapiens
ggcatgtgagcggaagcttaggttgccagccgcgaggaccgcacggaggaggagcaggagcgcggagccgcgagccccgagccccgagcccggcgcctggctgagtagatgtccatgaggagccccatctctgcccagctggccctggatggcgttggcaccatggtgaactgcaccatcaagtcagaggagaagaaagagccttgccacgaggccccccagggctcagccactgccgctgaacctcagcctggagacccagcccgggcctcccaggatagtgctgacccccaagctccagcccaggggaatttcaggggctcctgggactgtagctctccagagggtaatgggtccccagaacccaagagaccaggagtgtcggaggctgcctctggaagccaggagaagctggacttcaaccgaaatttgaaagaagtggtgccagccatagagaagctgttgtccagtgactggaaggagaggtttctaggaaggaactctatggaagccaaagatgtcaaagggacccaagagagcctagcagagaaggagctccagcttctggtcatgattcaccagctgtccaccctgcgggaccagctcctgacagcccactcggagcagaagaacatggctgccatgctgtttgagaagcagcagcagcagatggagcttgcccggcagcagcaggagcagattgcaaagcagcagcagcagctgattcagcagcagcataagatcaacctccttcagcagcagatccagcaggttaacatgccttatgtcatgatcccagccttccccccaagccaccaacctctgcctgtcacccctgactcccagctggccttacccattcagcccattccctgcaaaccagtggagtatccgctgcagctgctgcacagcccccctgccccagtggtgaagaggcctggggccatggccacccaccaccccctgcaggagccctcccagcccctgaacctcacagccaagcccaaggcccccgagctgcccaacacctccagctccccaagcctgaagatgagcagctgtgtgccccgcccccccagccatggaggccccacgcgggacctgcagtccagccccccgagcctgcctctgggcttccttggtgaaggggacgctgtcaccaaagccatccaggatgctcggcagctgctgcacagccacagtggggccttggatggctcccccaacacccccttccgtaaggacctcatcagcctggactcatccccagccaaggagcggctggaggacggctgtgtgcacccactggaggaagccatgctgagctgcgacatggatggctcccgccacttccccgagtcccgaaacagcagccacatcaagaggcccatgaacgccttcatggtgtgggccaaggatgagcggaggaagatcctgcaagccttcccagacatgcacaactccagcatcagcaagatccttggatctcgctggaagtccatgaccaaccaggagaagcagccctactatgaggaacaggcgcggctgagccggcagcacctggagaagtatcctgactacaagtacaagccgcggcccaagcgcacctgcatcgtggagggcaagcggctgcgcgtgggagagtacaaggccctgatgaggacccggcgtcaggatgcccgccagagctacgtgatccccccgcaggctggccaggtgcagatgagctcctcagatgtcctgtaccctcgggcagcaggcatgccgctggcacagccactggtggagcactatgtccctcgtagcctggaccccaacatgcctgtgatcgtcaacacctgcagcctcagagaggagggtgagggcacagatgacaggcactcggtggctgatggcgagatgtaccggtacagcgaggacgaggactcggagggcgaagagaagagcgatggggagttggtggtgctcacagactgatcccggctgggtgggcctggccccttctcctctggggaagaccttgtcccaactcgatgggcacagccagccaacctaagactatgttggtacttggacttgttcgtgccccagagatgggcaaagctgtgcacttgcagatacattcatgaggggagaggcgccctcccttcctgaggagctgttggcctgggtgggcaggaactgcagtatggccatgggctgagcaggctgagcacctcagcctttagggcttatggccaggggacactgtatgactctcctctcctgcaggtgtctatccacctggggtatggcatctaccgacctgtctccctggggtcacatgctttgtttccattcttgtcctggctggaccagccactgtgggaccaacacccctcccacactcccccagactgctcgtctatcaccaggatcgctttgtactttgtgcaaaagggtctggctgtcccttgctgttttcatctctgccaagcctattgtgcctctggctgctgtatgtgtgcgcgtgcacgtgtgtgtgtttcatctgttcattcactgcacaagatatttattgagtgcccactacgtgccaggcactgttgctgagttcctgtgggtgtgtctctcgatgccactcctgcttctctgggggcctctttctgtgcttctctttgtccccaaattgctacctctttgtcagtctgggtgtctcaggttctgtgtgtccttgtgtgcatttctgtctctctctgtcctcgtctctctgcaaggccctctatttctctctttcttggtgtctgtcctttgccccctgtgccctctggattctctgggtctatgtaggcccctggtctgccctgggctcatcagccttcctgacctcctcctgccctccccttcactccctccctggctctgccagtcggttcccacggagccatttttagctctgatcagcatgggaatgtgcctcggcctccaaggggctttgtcctggtgcccccgcccctggtcccaacctgatcccacgagggagttgggacaggaggattgatggtgctccccttcctgccagcgtcagaggccctggagaggggctgtccatggcagctggtctttattcctccctcatgagcacagggtcgggggggtccccattcttggaagaggttgagaagactcctgggcttcagcctctcccacccagccctgcccctcacctgcctgccctcccctcccccactctatactagggactggatctcagcctctgatcagtttcacaaagtttgttccctaaggaaatcaaatcccattgtcacctaactctgaagatctaaatagcccttggatcagtacgggaaccccaaatcccacagggccagatgtggagtctgtgtctgcccccgtcttctctccatcctcaaagcccccacttctctccaggctgtttctttttttatgactgtaaacatagatagtgctttattttgttaataataagataatgatgagtaacttaaccagcacatttctcctgtttacactcgggggatttttttgttttctgatgacataataaagacagatcatttcagaatctggcccttgtgcaggggaggagggaggctggcctaagtccagaattcccaaatatgccaccagcctgggcaccactgtcccctggtggcagcctgcaggagcttcaggcctggggcctcagaggaattggcttaatgcaagggaatcccaggccaagcttgtgagtgacacatgccctccacagagcccacgctgaatgcccctaccttgacgaggtgaggccacccggatcctaagaaagaaggcagtagtaagagcactgtaataggagtcatgaagctcggggtctctctagaactggccacatggctggggttggggagtgggagccaggtctctcctttggggcctcattgtcctcatctgacaacaagattaaaccttatacctggttcttaccattca

SEQ ID NO: 49231 - DNA, 360 bp, Homo sapiens
  misc_feature (53)..(53): n is a, c, g, or t
tgatcccagccttccccccaagccaccaacctctgcctgtcacccctgactcncagctggccttacccattcagcccattccctgcaaaccagggacccaagagagcctagcagagaaggagctccagcttctggtcatgattcaccagctgtccaccctgcgggaccagctcctgacagcccactcggagcagaagaacatggctgccatgctgtttgagaagcagcagcagcagatggagcttgcccggcagcagcaggagcagattgcaaagcagcagcagcagctgattcagcagcagcataagatcaacctccttcagcagcagatctctctcctgctcgcatctgtaagccctg

SEQ ID NO: 49232 - DNA, 2389 bp, Homo sapiens
  misc_feature (45)..(45): n is a, c, g, or t
  misc_feature (57)..(58): n is a, c, g, or t
  misc_feature (65)..(66): n is a, c, g, or t
ccagagattgtatagtcgtgcccgtgtatttcgtacggggcgtgngtactcttctannctggtgnncttcgctgccaaggagcggctggaggacggctgtgtgcacccactggaggaagccatgctgagctgcgacatggatggctcccgccacttccccgagtcccgaaacagcagccacatcaagaggcccatgaacgccttcatggtgtgggccaaggatgagcggaggaagatcctgcaagccttcccagacatgcacaactccagcatcagcaagatccttggatctcgctggaagtccatgaccaaccaggagaagcagccctactatgaggaacaggcgcggctgagccggcagcacctggagaagtatcctgactacaagtacaagccgcggcccaagcgcacctgcatcgtggagggcaagcggctgcgcgtgggagagtacaaggccctgatgaggacccggcgtcaggatgcccgccagagctacgtgatccccccgcaggctggccaggtgcagatgagctcctcagatgtcctgtaccctcgggcagcaggcatgccgctggcacagccactggtggagcactatgtccctcgtagcctggaccccaacatgcctgtgatcgtcaacacctgcagcctcagagaggagggtgagggcacagatgacaggcactcggtggctgatggcgagatgtaccggtacagcgaggacgaggactcggagggcgaagagaagagcgatggggagttggtggtgctcacagactgatcccggctgggtgggcctggccccttctcctctggggaagaccttgtcccaactcgatgggcacagccagccaacctaagactatgttggtacttggacttgttcgtgccccagagatgggcaaagctgtgcacttgcagatacattcatgaggggagaggcgccctcccttcctgaggagctgttggcctgggtgggcaggaactgcagtatggccatgggctgagcaggctgagcacctcagcctttagggcttatggccaggggacactgtatgactctcctctcctgcaggtgtctatccacctggggtatggcatctaccgacctgtctccctggggtcacatgctttgtttccattcttgtcctggctggaccagccactgtgggaccaacacccctcccacactcccccagactgctcgtctatcaccaggatcgctttgtactttgtgcaaaagggtctggctgtcccttgctgttttcatctctgccaagcctattgtgcctctggctgctgtatgtgtgcgcgtgcacgtgtgtgtgtttcatctgttcattcactgcacaagatatttattgagtgcccactacgtgccaggcactgttgctgagttcctgtgggtgtgtctctcgatgccactcctgcttctctgggggcctctttctgtgcttctctttgtccccaaattgctacctctttgtcagtctgggtgtctcaggttctgtgtgtccttgtgtgcatttctgtctctctctgtcctcgtctctctgcaaggccctctatttctctctttcttggtgtctgtcctttgccccctgtgccctctggattctctgggtctatgtaggcccctggtctgccctgggctcatcagccttcctgacctcctcctgccctccccttcactccctccctggctctgccagtcggttcccacggagccatttttagctctgatcagcatgggaatgtgcctcggcctccaaggggctttgtcctggtgcccccgcccctggtcccaacctgatcccacgagggagttgggacaggaggattgatggtgctccccttcctgccagcgtcagaggccctggagaggggctgtccatggcagctggtctttattcctccctcatgagcacagggtcgggggggtccccattcttggaagaggttgagaagactcctgggcttcagcctctcccacccagccctgcccctcacctgcctgccctcccctcccccactctatactagggactggatctcagcctctgatcagtttcacaaagtttgttccctaaggaaatcaaatcccattgtcacctaactctgaagatctaaatagcccttggatcagtacgggaaccccaaatcccacagggccagatgtggagtctgtgtctgcccccgtcttctctccatcctcaaagcccccacttctctccaggctgtttctttttttatgactgtaaacatagatagtgctttattttgttaataataagataatgatgagtaacttaaccagcacatttctcctgtttacactcgggggatttttttgttttctgatgacataataaagacagatcatttcaga

SEQ ID NO: 49233 - DNA, 2321 bp, Homo sapiens
  misc_feature (15)..(15): n is a, c, g, or t
tcttgtccccggtanacatgggacggcgctcgggtgtgtggggactgaggaagccatgctgagctgcggaatgatgctcccgccacttccccgagtcccgaaacagcagccacatcaagaggcccatgaacgccttcatggtgtgggccaaggatgagcggaggaagatcctgcaagccttcccagacatgcacaactccagcatcagcaagatccttggatctcgctggaagtccatgaccaaccaggagaagcagccctactatgaggaacaggcgcggctgagccggcagcacctggagaagtatcctgactacaagtacaagccgcggcccaagcgcacctgcatcgtggagggcaagcggctgcgcgtgggagagtacaaggccctgatgaggacccggcgtcaggatgcccgccagagctacgtgatccccccgcaggctggccaggtgcagatgagctcctcagatgtcctgtaccctcgggcagcaggcatgccgctggcacagccactggtggagcactatgtccctcgtagcctggaccccaacatgcctgtgatcgtcaacacctgcagcctcagagaggagggtgagggcacagatgacaggcactcggtggctgatggcgagatgtaccggtacagcgaggacgaggactcggagggcgaagagaagagcgatggggagttggtggtgctcacagactgatcccggctgggtgggcctggccccttctcctctggggaagaccttgtcccaactcgatgggcacagccagccaacctaagactatgttggtacttggacttgttcgtgccccagagatgggcaaagctgtgcacttgcagatacattcatgaggggagaggcgccctcccttcctgaggagctgttggcctgggtgggcaggaactgcagtatggccatgggctgagcaggctgagcacctcagcctttagggcttatggccaggggacactgtatgactctcctctcctgcaggtgtctatccacctggggtatggcatctaccgacctgtctccctggggtcacatgctttgtttccattcttgtcctggctggaccagccactgtgggaccaacacccctcccacactcccccagactgctcgtctatcaccaggatcgctttgtactttgtgcaaaagggtctggctgtcccttgctgttttcatctctgccaagcctattgtgcctctggctgctgtatgtgtgcgcgtgcacgtgtgtgtgtttcatctgttcattcactgcacaagatatttattgagtgcccactacgtgccaggcactgttgctgagttcctgtgggtgtgtctctcgatgccactcctgcttctctgggggcctctttctgtgcttctctttgtccccaaattgctacctctttgtcagtctgggtgtctcaggttctgtgtgtccttgtgtgcatttctgtctctctctgtcctcgtctctctgcaaggccctctatttctctctttcttggtgtctgtcctttgccccctgtgccctctggattctctgggtctatgtaggcccctggtctgccctgggctcatcagccttcctgacctcctcctgccctccccttcactccctccctggctctgccagtcggttcccacggagccatttttagctctgatcagcatgggaatgtgcctcggcctccaaggggctttgtcctggtgcccccgcccctggtcccaacctgatcccacgagggagttgggacaggaggattgatggtgctccccttcctgccagcgtcagaggccctggagaggggctgtccatggcagctggtctttattcctccctcatgagcacagggtcgggggggtccccattcttggaagaggttgagaagactcctgggcttcagcctctcccacccagccctgcccctcacctgcctgccctcccctcccccactctatactagggactggatctcagcctctgatcagtttcacaaagtttgttccctaaggaaatcaaatcccattgtcacctaactctgaagatctaaatagcccttggatcagtacgggaaccccaaatcccacagggccagatgtggagtctgtgtctgcccccgtcttctctccatcctcaaagcccccacttctctccaggctgtttctttttttatgactgtaaacatagatagtgctttattttgttaataataagataatgatgagtaacttaaccagcacatttctcctgtttacactcgggggatttttttgttttctgatgacataataaagacagatcatttcaga

SEQ ID NO: 49234 - DNA, 3647 bp, Homo sapiens
ggcatgtgagcggaagcttaggttgccagccgcgaggaccgcacggaggaggagcaggagcgcggagccgcgagccccgagccccgagcccggcgcctggctgagtagatgtccatgaggagccccatctctgcccagctggccctggatggcgttggcaccatggtgaactgcaccatcaagtcagaggagaagaaagagccttgccacgaggccccccagggctcagccactgccgctgaacctcagcctggagacccagcccgggcctcccaggatagtgctgacccccaagctccagcccaggggaatttcaggggctcctgggactgtagctctccagagggtaatgggtccccagaacccaagagaccaggagtgtcggaggctgcctctggaagccaggagaagctggacttcaaccgaaatttgaaagaagtggtgccagccatagagaagctgttgtccagtgactggaaggagaggtttctaggaaggaactctatggaagccaaagatgtcaaagggacccaagagagcctagcagagaaggagctccagcttctggtcatgattcaccagctgtccaccctgcgggaccagctcctgacagcccactcggagcagaagaacatggctgccatgctgtttgagaagcagcagcagcagatggagcttgcccggcagcagcaggagcagattgcaaagcagcagcagcagctgattcagcagcagcataagatcaacctccttcagcagcagatccagcaggttaacatgccttatgtcatgatcccagccttccccccaagccaccaacctctgcctgtcacccctgactcccagctggccttacccattcagcccattccctgcaaaccagtggagtatccgctgcagctgctgcacagcccccctgccccagtggtgaagaggcctggggccatggccacccaccaccccctgcaggagccctcccagcccctgaacctcacagccaagcccaaggcccccgagctgcccaacacctccagctccccaagcctgaagatgagcagctgtgtgccccgcccccccagccatggaggccccacgcgggacctgcagtccagccccccgagcctgcctctgggcttccttggtgaaggggacgctgtcaccaaagccatccaggatgctcggcagctgctgcacagccacagtggggccttggatggctcccccaacacccccttccgtaaggacctcatcagcctggactcatccccagccaaggagcggctggaggacggctgtgtgcacccactggaggaagccatgctgagctgcgacatggatggctcccgccacttccccgagtcccgaaacagcagccacatcaagaggcccatgaacgccttcatggtgtgggccaaggatgagcggaggaagatcctgcaagccttcccagacatgcacaactccagcatcagcaagatccttggatctcgctggaagtccatgaccaaccaggagaagcagccctactatgaggaacaggcgcggctgagccggcagcacctggagaagtatcctgactacaagtacaagccgcggcccaagcgcacctgcatcgtggagggcaagcggctgcgcgtgggagagtacaaggccctgatgaggacccggcgtcaggatgcccgccagagctacgtgatccccccgcaggctggccaggtgcagatgagctcctcagatgtcctgtaccctcgggcagcaggcatgccgctggcacagccactggtggagcactatgtccctcgtagcctggaccccaacatgcctgtgatcgtcaacacctgcagcctcagagaggagggtgagggcacagatgacaggcactcggtggctgatggcgagatgtaccggtacagcgaggacgaggactcggagggcgaagagaagagcgatggggagttggtggtgctcacagactgatcccggctgggtgggcctggccccttctcctctggggaagaccttgtcccaactcgatgggcacagccagccaacctaagactatgttggtacttggacttgttcgtgccccagagatgggcaaagctgtgcacttgcagatacattcatgaggggagaggcgccctcccttcctgaggagctgttggcctgggtgggcaggaactgcagtatggccatgggctgagcaggctgagcacctcagcctttagggcttatggccaggggacactgtatgactctcctctcctgcaggtgtctatccacctggggtatggcatctaccgacctgtctccctggggtcacatgctttgtttccattcttgtcctggctggaccagccactgtgggaccaacacccctcccacactcccccagactgctcgtctatcaccaggatcgctttgtactttgtgcaaaagggtctggctgtcccttgctgttttcatctctgccaagcctattgtgcctctggctgctgtatgtgtgcgcgtgcacgtgtgtgtgtttcatctgttcattcactgcacaagatatttattgagtgcccactacgtgccaggcactgttgctgagttcctgtgggtgtgtctctcgatgccactcctgcttctctgggggcctctttctgtgcttctctttgtccccaaattgctacctctttgtcagtctgggtgtctcaggttctgtgtgtccttgtgtgcatttctgtctctctctgtcctcgtctctctgcaaggccctctatttctctctttcttggtgtctgtcctttgccccctgtgccctctggattctctgggtctatgtaggcccctggtctgccctgggctcatcagccttcctgacctcctcctgccctccccttcactccctccctggcttctcagcctctgatcagtttcacaaagtttgttccctaaggaaatcaaatcccattgtcacctaactctgaagatctaaatagcccttggatcagtacgggaaccccaaatcccacagggccagatgtggagtctgtgtctgcccccgtcttctctccatcctcaaagcccccacttctctccaggctgtttctttttttatgactgtaaacatagatagtgctttattttgttaataataagataatgatgagtaacttaaccagcacatttctcctgtttacactcgggggatttttttgttttctgatgacataataaagacagatcatttcagaatctggcccttgtgcaggggaggagggaggctggcctaagtccagaattcccaaatatgccaccagcctgggcaccactgtcccctggtggcagcctgcaggagcttcaggcctggggcctcagaggaattggcttaatgcaagggaatcccaggccaagcttgtgagtgacacatgccctccacagagcccacgctgaatgcccctaccttgacgaggtgaggccacccggatcctaagaaagaaggcagtagtaagagcactgtaataggagtcatgaagctcggggtctctctagaactggccacatggctggggttggggagtgggagccaggtctctcctttggggcctcattgtcctcatctgacaacaagattaaaccttatacctggttcttaccattca

SEQ ID NO: 49235 - DNA, 862 bp, Homo sapiens
ggcatgtgagcggaagcttaggttgccagccgcgaggaccgcacggaggaggagcaggagcgcggagccgcgagccccgagccccgagcccggcgcctggctgagtagatgtccatgaggagccccatctctgcccagctggccctggatggcgttggcaccatggtgaactgcaccatcaagtcagaggagaagaaagagccttgccacgaggccccccagggctcagccactgccgctgaacctcagcctggagacccagcccgggcctcccaggatagtgctgacccccaagctccagcccaggggaatttcaggggctcctgggactgtagctctccagagggtaatgggtccccagaacccaagagaccaggagtgtcggaggctgcctctggaagccaggagaagctggacttcaaccgaaatttgaaagaagtggtgccagccatagagaagctgttgtccagtgactggaaggagaggtttctaggaaggaactctatggaagccaaagatgtcaaagggacccaagagagcctagcagagaaggagctccagcttctggtcatgattcaccagctgtccaccctgcgggaccagctcctgacagcccactcggagcagaagaacatggctgccatgctgtttgagaagcagcagcagcagatggagcttgcccggcagcagcaggagcagattgcaaagcagcagcagcagctgattcagcagcagcataagatcaacctccttcagcagcagatccagcaggttaacatgccttatgtcatgatcccagccttccccccaagccaccaacctctgcctgtcagtctcatggtaggggcgaccccccacctga

SEQ ID NO: 49236 - DNA, 388 bp, Homo sapiens
gaaaagaaaatgagtgggataggggaagagagaaaaaggatagaggtgttgttttagagacactggttagaaaagccatctcactggaactgagatttgagctgacaactatataaattctacctgggagttttccaggcagaagagcaagtgccaaggtcctgagacaggaatgtacttggaatgtttgaggacccacaaggaggccagtgtggctgaagcacacaagccacggaaataatgtcagagaagccaggtgcctgattacacagggtcctttatgttgtagtgatgactttgttggtccttaaaaaagaaaaaggattgcaggaggcatgcttcagacagactgaggatggaacttctagctctggaactcaattttttt

SEQ ID NO: 49237 - DNA, 427 bp, Homo sapiens
cagccactgttatgacagtagtatatataggcttttatatttataagcaatctataaatatgactacttgtttaaacaaagctgtcatgattttttagtgtttttagatgtaaaaaattcaacagatatgaacttagaattggtctttttgaagtcctttaaaagggctatgcgtgagccaccgcgcccggccggtgcctagactgtttcatcaggacagcatttagttttttggggggtaagaacaggttttatcctgctgaccaaccttaagcacaagaattaatccctaactccatttagtgataaggaagttggatgaacaagtgatagctctggtaaaatgttatttctttttgccatcttggatgagtaatgtgtcagcagtaaggtaggaatcttggggcaaatgtactatacatatatt

SEQ ID NO: 49238 - DNA, 162 bp, Homo sapiens
cttgccatggcctcgcaaagtgctggggggattacaaacaagagccaccgtgcctaggaagagctcacttttgttgttgttgtcttttggttgttgtgtatgtgtttttttttttttttcaagacagcgtctcactctgttgcccaggctagagtgcagtgg

SEQ ID NO: 49239 - DNA, 387 bp, Homo sapiens
atagaagactgtcattctaatgtgtgattttcccatcaaggcataagccttgtgcaaaatcacttcaaggagttacctcttacgaatatgacctatgcttcttgcttaagtcactaaacagctgtggcgatcgtaagcagaagatggcatctccagttgttggtgctcttcaggaccacctgttgacagtgtgtatagtgagaacccctgaaggcatctgtaagccctccatgagggagtgttacatagtagtagcatctagttgatgtatgtcctggctaaataaatataagttggtttagatggaataaattctttgttttggggaaagtgtcattcttttaggacgcccaagcagaaagcttttatattgttggcagtgccgtg

SEQ ID NO: 49240 - DNA, 1603 bp, Homo sapiens
cgcatgcgtgtaaccccggctatttgggagactgagacaggagaatcacttgaactgggaggtggagcctgcagtgagccaagatcgcaccattgcactccagcctggttaacaaaagcaaaactctgtctcaaaaaaagaaaaaatgagaaggggtggaaaagagggattccagagtgccaggcacacaggttttctggaaggtttacatgaggactgctgtggtttgaatgtgttccccgaagttcatgtgttggaaactcaacccctaatgcaacagtgttgaccagtggaacctttaagaggtgattaggtcatgaaggctctgcctcatgaatggatgaagctagagtgggttagttatcttgggagggggttcctgataaaaggatgaggttggcttccttccctttctctctttccccctccccccttcacatgtggtcactctcttgcccttccaccttccaccataggacggcacagtgagaccttcaccagatgcaggcccctcactttcccagtgttcagaaccataaaccaagtgaacccttataaatcacccagtctgtggtattctgttatagcaacacaaacagactaagacagggacactcagtgggctcttctctctacttgatggagcactccctgcgtggtgccttgtatttgtagacatgatgctgtaaatgctctttgaatgtcttgaaggcttttatgtttgaggagtttacagagaagcccctacaggcttcaggtcccttcttctgttgcttctttgctccttagttcctcccctaacctggtgctaaattagatcatagtgtggtccttggaccaacagtatcaatagcacctgaaaatcatgctggaaatacagattcacaggctgctccccagaatactgaagaagaaactctaggagtgagacccaacaatctgtgtttaacaagtccccaggtgagtctgatgcacacagaaatgtgagctgctgtattagatggtgttgagttcatgccaccggatcactgacacacacgtctgctcactgcttgctctttgcacaggcccctggatcctcctggaatccctgatccctgttgctcccttgcggagttttctagtccctcttatttgaagcatgtctttcagagcctcgcaccacccagcttgggtatctggtgaattctgtggtctgcatgtccatgtttttgacattctgggaagggtggccaggctgtgatttgcatctactgctgcaggctatggatggtattcagaagggaggggagatgctgtgtgcgtgttctgaagggtttcccactaaatggagagactgactctctccataagtatttgatttttactttatctcctcgttgacttcacagtgtaagtgcagtttgtctctactgggtgatgcatgcagataaatgtttatgtgaacataagaagtctgcatgtgtgggtgaactctccacatcatgtcatttattgtccatcattacgtatctgtggtgtctagcacattcctctaccttattttctgtcattgtacctacttctacctgaacacgtattaaatatcttattaaaaatacac

SEQ ID NO: 49241 - DNA, 284 bp, Homo sapiens
ccaccgaaaagttcagaagtaacataacctgtttatgtgataaattttccaaacttatttaggcttggatatcgattaacatctgagagtgcagaacatattgagagaaatgctgatacagttaggatagtctagatctctgtcatataactacacagtatttttcatgagtcagacttttcttagtttgcattttatagtcaaataaagaaagggaatctttattttctaggcttttcacccaaccacatgacccagatgtagccaagctcgttaaaccagtt

SEQ ID NO: 49242 - DNA, 337 bp, Homo sapiens
ccaactctgccttgtatcatgaaagccactgtagatgatatgtaaattatgaacctatttgtgttccagtaaaactttatttacaaaaataggatgttggctggatttggcccatggactatagtttgcctactcctgctttgtagtgcttaaactcctttgataagaatatgaaagccagtgatgcactctagtgactgcctaagaactatcaagacaccttagtatgttatagttccctgttaaaacaacgggattatggtggattataagtgcagtttaataacatcaagaatcattatatttattttgtaggatgcactgctaatttatattg

SEQ ID NO: 49243 - DNA, 1074 bp, Homo sapiens
ttccacttaatcatcaaaaccattatattagggacatatgattgttatcattaccttagttttatagatgacatgacttaggtacataacaatgttcttataaaggtattaagtggaatagaaggcagtcagtactcagagtttagtgtgcaccactactcacttgctattcatttattcatttcattattacaatatgagaaggaatgaggttcagaaaagaaacataagttctgttattaggagattatcaaggttaagctttcctaagactttaacaggtgaggtgaaaaatatatttttcctgaggaaataagtttgttttaaatcataagcacatttacgtaggcttccattcacctgttttcctccttgccttcatataaagatactcatacaaatttattcgttttttgtgattatgaaaacccagtcaatgtagatcctttatgtgctttcttaatacaagccacatgcatttttctgctgagccatattagcattggcaaaacttgagcctgtcctttgaaatgaaccaaaaatgttgattctcatcacaatgaatgtaaaattttagaagtccaagagagagactggcctgagatttgtgtatgaagggataaatttgtataccacttgcacagatttcagtcttctgcctgagagtgcccctgtgtcctggccccagagctggtgttaccaaaacaggtccgggtcattgatattattactaaggtgttatctgagctcatggtctcatgaccaagaaaattaaggagtgtggacacaaaagggtgaggttggagcaaaagtttaataagtgaaagaagaaagctctctgcagtggagaggggagtcagagtggattgccacttttacagttgaatccacaagcttttatgagaaactgctctccaacacattcaaaagctagcagacagcaagaaacaactaagatcagagcagaattgaaggagatagagacacaaaacacccttcaagaaatccatgaatccaggagttggtttttttgaaaagatcaacaaaattgatagaccagtagcaagactaata

SEQ ID NO: 49244 - DNA, 973 bp, Homo sapiens
  misc_feature (1)..(1): n is a, c, g, or t
  misc_feature (44)..(44): n is a, c, g, or t
  misc_feature (148)..(148): n is a, c, g, or t
  misc_feature (181)..(181): n is a, c, g, or t
  misc_feature (258)..(258): n is a, c, g, or t
  misc_feature (262)..(262): n is a, c, g, or t
  misc_feature (297)..(297): n is a, c, g, or t
  misc_feature (319)..(319): n is a, c, g, or t
  misc_feature (325)..(325): n is a, c, g, or t
  misc_feature (351)..(351): n is a, c, g, or t
  misc_feature (365)..(365): n is a, c, g, or t
  misc_feature (384)..(384): n is a, c, g, or t
nggaggaaaactggccttccagcacccacccccacaccccctcntcccgtccccccagccgctccggagacagatgtccctgtggacaccaacctcattgaatttgataccaagtaagaaactcattcccctacttgaccctcttggnacaaagattcctataacattcaaatctgccctnatacctcttccttgcttttggtggggagaagcggattgtagcatcaaatcaagatgccttagccttgtgaggctgcntctngctgccttttctttgtcccttcctgtaaatacctntggtcccactgctgttcgaacncctctntcccagaggcctagcttcggggaggncagggattgggagnctgggacaagattcaaaanccctcacctcacaaccctctttcccaccaccaagctatgccacagatgatgacattgtgtttgaggactttgcccggcttcggctgaaggggatgaaggatgacgactatgatgatcaactctgctaggaagcggggtgggaagaagggaggggatggggttgggagaggtgagggcaggattaagatccccactgtcaatgggggattgtcccagcccctcttcccttcccctcacctggaagcttcttcaaccaatcccttcacactctctcccccatccccccaagatacacactggaccctctcttgctgaatgtgggcattaattttttgactgcagctctgcttctccagccccgccgtgggtggcaagctgtgttcatacctaaattttctggaaggggacagtgaaaagaggagtgacaggagggaaagggggagacaaaactcctactctcaacctcacaccaacacctcccattatcactctctctgcccccattccttcaagaggagaccctttggggacaaggccgtttctttgtttctgagcataaagaagaaaataaatcttttactaagcatga

SEQ ID NO: 49245 - DNA, 390 bp, Homo sapiens
cacgcgtccgggttgaagaagcttccaggtgaggggaactggaagcttcttcaaccaatcccttcacactctctcccccatccccccaagatacacactggaccctctcttgctgaatgtgggcattaattttttgactgcagctctgcttctccagccccgccgtgggtggcaagctgtgttcatacctaaattttctggaaggggacagtgaaaagaggagtgacaggagggaaagggggagacaaaactcctactctcaacctcacaccaacacctcccattatcactctctctgcccccattccttcaagaggagaccctttggggacaaggccgtttctttgtttctgagcataaagaagaaaataaatcttttactaagcatga

SEQ ID NO: 49246 - DNA, 757 bp, Homo sapiens
attttctcttttggatttaaaaaaaaaaaaaaaaaaaaaaaaaaaaaaactcggagactagtttctcttctccaaaaagtcggagcccaaattgcaagctcaccgtgtacttgggcaagcgggacttcgtagatcacctggacaaagtggaccctgtagatggcgtggtgcttgtggaccctgactacctgaaggaccgcaaagtgtttgtgaccctcacctgcgccttccgctatggccgtgaagacctggatgtgctgggcttgtccttccgcaaagacctgttcatcgccacctaccaggccttccccccggtgcccaacccaccccggccccccacccgcctgcaggaccggctgctgaggaagctgggccagcatgcccaccccttcttcttcaccataccccagaatcttccatgctccgtcacactgcagccaggcccagaggatacaggaaaggcctgcggcgtagactttgagattcgagccttctgtgctaaatcactagaagagaaaagccacaaaaggaactctgtgcggctggtgatccgaaaggtgcagttcgccccggagaaacccggcccccagccttcagccgaaaccacacgccacttcctcatgtctgaccggtccctgcacctcgaggcttccctggacaaggagctgcccccattccttcaagaggagaccctttggggacaaggccgtttctttgtttctgagcataaagaagaaaataaatcttttactaagca

SEQ ID NO: 49247 - DNA, 402 bp, Homo sapiens
gctgggtgtctgcaacggggagctcccccggcgctgggggcaataaacggaatcggtttcacacgctttccctcttgatctaagatacctttaaatatccgccagagaatgatgttgcctggatgcgctgcatatggccatcaactgtgtgttcacgcgcggccgcagccatggagtggcggtgcgtcaagccgtgcgcaaccctgggtcctccggtatgcgcacatcgggagaaaagtggttagacacagcggcggcgtcaaaactcctactctcaacctcacaccaacacctcccattatcactctctctgcccccattccttcaagaggagaccctttggggacaaggccgtttctttgtttctgagcataaagaagaaaataaatcttttactaagca

SEQ ID NO: 49248 - DNA, 1928 bp, Homo sapiens
agccaatggccccgcgtgtctgctaggagagggcgggcagcgccgcggcgcgcgcgatccggctgacgcatctggccccggttccccaagaccagagcggggccgggagggagggggaagaggcgagagcgcggagggcgcgcgtgcgcattggcgcggggaggagcagggatcttggcagcgggcgaggaggctgcgagcgagccgcgaaccgagcgggcggcgggcgcgcgcaccatgggggagaaacccgggaccagggtcttcaagaagtcgagccctaactgcaagctcaccgtgtacttgggcaagcgggacttcgtagatcacctggacaaagtggaccctgtagatggcgtggtgcttgtggaccctgactacctgaaggaccgcaaagtgtttgtgaccctcacctgcgccttccgctatggccgtgaagacctggatgtgctgggcttgtccttccgcaaagacctgttcatcgccacctaccaggccttccccccggtgcccaacccaccccggccccccacccgcctgcaggaccggctgctgaggaagctgggccagcatgcccaccccttcttcttcaccataccccagaatcttccatgctccgtcacactgcagccaggcccagaggatacaggaaaggcctgcggcgtagactttgagattcgagccttctgtgctaaatcactagaagagaaaagccacaaaaggaactctgtgcggctggtgatccgaaaggtgcagttcgccccggagaaacccggcccccagccttcagccgaaaccacacgccacttcctcatgtctgaccggtccctgcacctcgaggcttccctggacaaggagctgtactaccatggggagcccctcaatgtaaatgtccacgtcaccaacaactccaccaagaccgtcaagaagatcaaagtctctgtgagacagtacgccgacatctgcctcttcagcaccgcccagtacaagtgtcctgtggctcaactcgaacaagatgaccaggtatctcccagctccacattctgtaaggtgtacaccataaccccactgctcagtgacaaccgggagaagcggggtctcgccctggatgggaaactcaagcacgaggacaccaacctggcttccagcaccatcgtgaaggagggtgccaacaaggaggtgctgggaatcctggtgtcctacagggtcaaggtgaagctggtggtgtctcgaggcggggatgtctctgtggagctgccttttgttcttatgcaccccaagccccacgaccacatccccctccccagaccccagtcagccgctccggagacagatgtccctgtggacaccaacctcattgaatttgataccaactatgccacagatgatgacattgtgtttgaggactttgcccggcttcggctgaaggggatgaaggatgacgactatgatgatcaactctgctaggaagcggggtgggaagaagggaggggatggggttgggagaggtgagggcaggattaagatccccactgtcaatgggggattgtcccagcccctcttcccttcccctcacctggaagcttcttcaaccaatcccttcacactctctcccccatccccccaagatacacactggaccctctcttgctgaatgtgggcattaattttttgactgcagctctgcttctccagccccgccgtgggtggcaagctgtgttcatacctaaattttctggaaggggacagtgaaaagaggagtgacaggagggaaagggggagacaaaactcctactctcaacctcacaccaacacctcccattatcactctctctgcccccattccttcaagaggagaccctttggggacaaggccgtttctttgtttctgagcataaagaagaaaataaatcttttactaagcatga

SEQ ID NO: 49249 - DNA, 1897 bp, Homo sapiens
agccaatggccccgcgtgtctgctaggagagggcgggcagcgccgcggcgcgcgcgatccggctgacgcatctggccccggttccccaagaccagagcggggccgggagggagggggaagaggcgagagcgcggagggcgcgcgtgcgcattggcgcggggaggagcagggatcttggcagcgggcgaggaggctgcgagcgagccgcgaaccgagcgggcggcgggcgcgcgcaccatgggggagaaacccgggaccagctcaccgtgtacttgggcaagcgggacttcgtagatcacctggacaaagtggaccctgtagatggcgtggtgcttgtggaccctgactacctgaaggaccgcaaagtgtttgtgaccctcacctgcgccttccgctatggccgtgaagacctggatgtgctgggcttgtccttccgcaaagacctgttcatcgccacctaccaggccttccccccggtgcccaacccaccccggccccccacccgcctgcaggaccggctgctgaggaagctgggccagcatgcccaccccttcttcttcaccataccccagaatcttccatgctccgtcacactgcagccaggcccagaggatacaggaaaggcctgcggcgtagactttgagattcgagccttctgtgctaaatcactagaagagaaaagccacaaaaggaactctgtgcggctggtgatccgaaaggtgcagttcgccccggagaaacccggcccccagccttcagccgaaaccacacgccacttcctcatgtctgaccggtccctgcacctcgaggcttccctggacaaggagctgtactaccatggggagcccctcaatgtaaatgtccacgtcaccaacaactccaccaagaccgtcaagaagatcaaagtctctgtgagacagtacgccgacatctgcctcttcagcaccgcccagtacaagtgtcctgtggctcaactcgaacaagatgaccaggtatctcccagctccacattctgtaaggtgtacaccataaccccactgctcagtgacaaccgggagaagcggggtctcgccctggatgggaaactcaagcacgaggacaccaacctggcttccagcaccatcgtgaaggagggtgccaacaaggaggtgctgggaatcctggtgtcctacagggtcaaggtgaagctggtggtgtctcgaggcggggatgtctctgtggagctgccttttgttcttatgcaccccaagccccacgaccacatccccctccccagaccccagtcagccgctccggagacagatgtccctgtggacaccaacctcattgaatttgataccaactatgccacagatgatgacattgtgtttgaggactttgcccggcttcggctgaaggggatgaaggatgacgactatgatgatcaactctgctaggaagcggggtgggaagaagggaggggatggggttgggagaggtgagggcaggattaagatccccactgtcaatgggggattgtcccagcccctcttcccttcccctcacctggaagcttcttcaaccaatcccttcacactctctcccccatccccccaagatacacactggaccctctcttgctgaatgtgggcattaattttttgactgcagctctgcttctccagccccgccgtgggtggcaagctgtgttcatacctaaattttctggaaggggacagtgaaaagaggagtgacaggagggaaagggggagacaaaactcctactctcaacctcacaccaacacctcccattatcactctctctgcccccattccttcaagaggagaccctttggggacaaggccgtttctttgtttctgagcataaagaagaaaataaatcttttactaagcatga

SEQ ID NO: 49250 - DNA, 2194 bp, Homo sapiens
agccaatggccccgcgtgtctgctaggagagggcgggcagcgccgcggcgcgcgcgatccggctgacgcatctggccccggttccccaagaccagagcggggccgggagggagggggaagaggcgagagcgcggagggcgcgcgtgcgcattggcgcggggaggagcagggatcttggcagcgggcgaggaggctgcgagcgagccgcgaaccgagcgggcggcgggcgcgcgcaccatgggggagaaacccgggaccagggtcttcaagaagtcgagccctaactgcaagctcaccgtgtacttgggcaagcgggacttcgtagatcacctggacaaagtggaccctgtagatggcgtggtgcttgtggaccctgactacctgaaggaccgcaaagtgtttgtgaccctcacctgcgccttccgctatggccgtgaagacctggatgtgctgggcttgtccttccgcaaagacctgttcatcgccacctaccaggccttccccccggtgcccaacccaccccggccccccacccgcctgcaggaccggctgctgaggaagctgggccagcatgcccaccccttcttcttcaccataccccagaatcttccatgctccgtcacactgcagccaggcccagaggatacaggaaaggcctgcggcgtagactttgagattcgagccttctgtgctaaatcactagaagagaaaagccacaaaaggaactctgtgcggctggtgatccgaaaggtgcagttcgccccggagaaacccggcccccagccttcagccgaaaccacacgccacttcctcatgtctgaccggtccctgcacctcgaggcttccctggacaaggagctgtactaccatggggagcccctcaatgtaaatgtccacgtcaccaacaactccaccaagaccgtcaagaagatcaaagtctctggtaggaggtggggtttggaagggggtcttcggggagggcgttactgcacaggtggctcctggtgtgatctcagcccaggccatttcccagtgcgggagacccaccagggctcaaagaatttaggttgttccagaatgatacggggagcctcggtgtttactgcttcagtggggagcatgggggggccacgccacggggtctggagttgtggtgtggtggtggcttgtgctccatccagagctgcctgaccccgtcccaccccacagtgagacagtacgccgacatctgcctcttcagcaccgcccagtacaagtgtcctgtggctcaactcgaacaagatgaccaggtatctcccagctccacattctgtaaggtgtacaccataaccccactgctcagtgacaaccgggagaagcggggtctcgccctggatgggaaactcaagcacgaggacaccaacctggcttccagcaccatcgtgaaggagggtgccaacaaggaggtgctgggaatcctggtgtcctacagggtcaaggtgaagctggtggtgtctcgaggcggggatgtctctgtggagctgccttttgttcttatgcaccccaagccccacgaccacatccccctccccagaccccagtcagccgctccggagacagatgtccctgtggacaccaacctcattgaatttgataccaactatgccacagatgatgacattgtgtttgaggactttgcccggcttcggctgaaggggatgaaggatgacgactatgatgatcaactctgctaggaagcggggtgggaagaagggaggggatggggttgggagaggtgagggcaggattaagatccccactgtcaatgggggattgtcccagcccctcttcccttcccctcacctggaagcttcttcaaccaatcccttcacactctctcccccatccccccaagatacacactggaccctctcttgctgaatgtgggcattaattttttgactgcagctctgcttctccagccccgccgtgggtggcaagctgtgttcatacctaaattttctggaaggggacagtgaaaagaggagtgacaggagggaaagggggagacaaaactcctactctcaacctcacaccaacacctcccattatcactctctctgcccccattccttcaagaggagaccctttggggacaaggccgtttctttgtttctgagcataaagaagaaaataaatcttttactaagcatga

SEQ ID NO: 49251 - DNA, 2242 bp, Homo sapiens
gacacacacaaacacacctcgctggttgggctgagtcctccctgaggacacacacagacacacatgcacatacatgttcacacacacacctgactggttggctgaggacacacacacacacacacacacacacacacaaacacacacacaccgggctggtgggcagaggtgtgcagagataaaggagcagctcaaaagcctaaaggtccactagtctgagaaacgccaccaccctcactttccaacactattgggaggaaacctggaacaactccttcctgatagcccagcctggagatccccgggcagggcagccagttttgagggctccgatgccctgtcaccatcctccccaatctcccctgtgaccccttgacatcctcagctcaccgtgtacttgggcaagcgggacttcgtagatcacctggacaaagtggaccctgtagatggcgtggtgcttgtggaccctgactacctgaaggaccgcaaaggtactggccccaagtccagggggcccagggaaagtgggggctagggaagtgaaatgggctggccttggaagggcgccccagagagatggaggctggaggtggaagccaggagtagggttcaggcaagtcttatgctgctgagggaggagcagcggctgctaggtgccaggggactggggaagtggggctcctgaccactcatctcaccctcccttgccagtgtttgtgaccctcacctgcgccttccgctatggccgtgaagacctggatgtgctgggcttgtccttccgcaaagacctgttcatcgccacctaccaggccttccccccggtgcccaacccaccccggccccccacccgcctgcaggaccggctgctgaggaagctgggccagcatgcccaccccttcttcttcaccataccccagaatcttccatgctccgtcacactgcagccaggcccagaggatacaggaaaggcctgcggcgtagactttgagattcgagccttctgtgctaaatcactagaagagaaaagccacaaaaggaactctgtgcggctggtgatccgaaaggtgcagttcgccccggagaaacccggcccccagccttcagccgaaaccacacgccacttcctcatgtctgaccggtccctgcacctcgaggcttccctggacaaggagctgtactaccatggggagcccctcaatgtaaatgtccacgtcaccaacaactccaccaagaccgtcaagaagatcaaagtctctgtgagacagtacgccgacatctgcctcttcagcaccgcccagtacaagtgtcctgtggctcaactcgaacaagatgaccaggtatctcccagctccacattctgtaaggtgtacaccataaccccactgctcagtgacaaccgggagaagcggggtctcgccctggatgggaaactcaagcacgaggacaccaacctggcttccagcaccatcgtgaaggagggtgccaacaaggaggtgctgggaatcctggtgtcctacagggtcaaggtgaagctggtggtgtctcgaggcggggatgtctctgtggagctgccttttgttcttatgcaccccaagccccacgaccacatccccctccccagaccccagtcagccgctccggagacagatgtccctgtggacaccaacctcattgaatttgataccaactatgccacagatgatgacattgtgtttgaggactttgcccggcttcggctgaaggggatgaaggatgacgactatgatgatcaactctgctaggaagcggggtgggaagaagggaggggatggggttgggagaggtgagggcaggattaagatccccactgtcaatgggggattgtcccagcccctcttcccttcccctcacctggaagcttcttcaaccaatcccttcacactctctcccccatccccccaagatacacactggaccctctcttgctgaatgtgggcattaattttttgactgcagctctgcttctccagccccgccgtgggtggcaagctgtgttcatacctaaattttctggaaggggacagtgaaaagaggagtgacaggagggaaagggggagacaaaactcctactctcaacctcacaccaacacctcccattatcactctctctgcccccattccttcaagaggagaccctttggggacaaggccgtttctttgtttctgagcataaagaagaaaataaatcttttactaagcatga

SEQ ID NO: 49252 - DNA, 1843 bp, Homo sapiens
agccaatggccccgcgtgtctgctaggagagggcgggcagcgccgcggcgcgcgcgatccggctgacgcatctggccccggttccccaagaccagagcggggccgggagggagggggaagaggcgagagcgcggagggcgcgcgtgcgcattggcgcggggaggagcagggatcttggcagcgggcgaggaggctgcgagcgagccgcgaaccgagcgggcggcgggcgcgcgcaccatgggggagaaacccgggaccagggtcttcaagaagtcgagccctaactgcaagctcaccgtgtacttgggcaagcgggacttcgtagatcacctggacaaagtggaccctgtagatggcgtggtgcttgtggaccctgactacctgaaggaccgcaaagtgtttgtgaccctcacctgcgccttccgctatggccgtgaagacctggatgtgctgggcttgtccttccgcaaagacctgttcatcgccacctaccaggccttccccccggtgcccaacccaccccggccccccacccgcctgcaggaccggctgctgaggaagctgggccagcatgcccaccccttcttcttcaccataccccagaatcttccatgctccgtcacactgcagccaggcccagaggatacaggaaaggcctgcggcgtagactttgagattcgagccttctgtgctaaatcactagaagagaaaagccacaaaaggaactctgtgcggctggtgatccgaaaggtgcagttcgccccggagaaacccggcccccagccttcagccgaaaccacacgccacttcctcatgtctgaccggtccctgcacctcgaggcttccctggacaaggagtgagacagtacgccgacatctgcctcttcagcaccgcccagtacaagtgtcctgtggctcaactcgaacaagatgaccaggtatctcccagctccacattctgtaaggtgtacaccataaccccactgctcagtgacaaccgggagaagcggggtctcgccctggatgggaaactcaagcacgaggacaccaacctggcttccagcaccatcgtgaaggagggtgccaacaaggaggtgctgggaatcctggtgtcctacagggtcaaggtgaagctggtggtgtctcgaggcggggatgtctctgtggagctgccttttgttcttatgcaccccaagccccacgaccacatccccctccccagaccccagtcagccgctccggagacagatgtccctgtggacaccaacctcattgaatttgataccaactatgccacagatgatgacattgtgtttgaggactttgcccggcttcggctgaaggggatgaaggatgacgactatgatgatcaactctgctaggaagcggggtgggaagaagggaggggatggggttgggagaggtgagggcaggattaagatccccactgtcaatgggggattgtcccagcccctcttcccttcccctcacctggaagcttcttcaaccaatcccttcacactctctcccccatccccccaagatacacactggaccctctcttgctgaatgtgggcattaattttttgactgcagctctgcttctccagccccgccgtgggtggcaagctgtgttcatacctaaattttctggaaggggacagtgaaaagaggagtgacaggagggaaagggggagacaaaactcctactctcaacctcacaccaacacctcccattatcactctctctgcccccattccttcaagaggagaccctttggggacaaggccgtttctttgtttctgagcataaagaagaaaataaatcttttactaagcatga

SEQ ID NO: 49253 - DNA, 1600 bp, Homo sapiens
aactcaggctagtagaggccgggtgttaatcggccgggcgaggaggctgcgagcgagccgcgaaccgagcgggcggcgggcgcgcgcaccatgggggagaaacccgggaccagctggatgtgctgggcttgtccttccgcaaagacctgttcatcgccacctaccaggccttccccccggtgcccaacccaccccggccccccacccgcctgcaggaccggctgctgaggaagctgggccagcatgcccaccccttcttcttcaccataccccagaatcttccatgctccgtcacactgcagccaggcccagaggatacaggaaaggcctgcggcgtagactttgagattcgagccttctgtgctaaatcactagaagagaaaagccacaaaaggaactctgtgcggctggtgatccgaaaggtgcagttcgccccggagaaacccggcccccagccttcagccgaaaccacacgccacttcctcatgtctgaccggtccctgcacctcgaggcttccctggacaaggagctgtactaccatggggagcccctcaatgtaaatgtccacgtcaccaacaactccaccaagaccgtcaagaagatcaaagtctctgtgagacagtacgccgacatctgcctcttcagcaccgcccagtacaagtgtcctgtggctcaactcgaacaagatgaccaggtatctcccagctccacattctgtaaggtgtacaccataaccccactgctcagtgacaaccgggagaagcggggtctcgccctggatgggaaactcaagcacgaggacaccaacctggcttccagcaccatcgtgaaggagggtgccaacaaggaggtgctgggaatcctggtgtcctacagggtcaaggtgaagctggtggtgtctcgaggcggggatgtctctgtggagctgccttttgttcttatgcaccccaagccccacgaccacatccccctccccagaccccagtcagccgctccggagacagatgtccctgtggacaccaacctcattgaatttgataccaactatgccacagatgatgacattgtgtttgaggactttgcccggcttcggctgaaggggatgaaggatgacgactatgatgatcaactctgctaggaagcggggtgggaagaagggaggggatggggttgggagaggtgagggcaggattaagatccccactgtcaatgggggattgtcccagcccctcttcccttcccctcacctggaagcttcttcaaccaatcccttcacactctctcccccatccccccaagatacacactggaccctctcttgctgaatgtgggcattaattttttgactgcagctctgcttctccagccccgccgtgggtggcaagctgtgttcatacctaaattttctggaaggggacagtgaaaagaggagtgacaggagggaaagggggagacaaaactcctactctcaacctcacaccaacacctcccattatcactctctctgcccccattccttcaagaggagaccctttggggacaaggccgtttctttgtttctgagcataaagaagaaaataaatcttttactaagcatga

SEQ ID NO: 49254 - DNA, 1591 bp, Homo sapiens
agccaatggccccgcgtgtctgctaggagagggcgggcagcgccgcggcgcgcgcgatccggctgacgcatctggccccggttccccaagaccagagcggggccgggagggagggggaagaggcgagagcgcggagggcgcgcgtgcgcattggcgcggggaggagcagggatcttggcagcgggcgaggaggctgcgagcgagccgcgaaccgagcgggcggcgggcgcgcgcaccatgggggagaaacccgggaccagggtcttcaagaagtcgagccctaactgcaagctcaccgtgtacttgggcaagcgggacttcgtagatcacctggacaaagtggaccctgtagatggcgtggtgcttgtggaccctgactacctgaaggaccgcaaagtgtttgtgaccctcacctgcgccttccgctatggccgtgaagacctggatgtgctgggcttgtccttccgcaaagacctgttcatcgccacctaccaggccttccccccggtgcccaacccaccccggccccccacccgcctgcaggaccggctgctgaggaagctgggccagcatgcccaccccttcttcttcaccataccccagaatcttccatgctccgtcacactgcagccaggcccagaggatacaggaaaggcctgcggcgtagactttgagattcgagccttctgtgctaaatcactagaagagaaaagccacaaaaggaactctgtgcggctggtgatccgaaaggtgcagttcgccccggagaaacccggcccccagccttcagccgaaaccacacgccacttcctcatgtctgaccggtccctgcacctcgaggcttccctggacaaggagctgtactaccatggggagcccctcaatgtaaatgtccacgtcaccaacaactccaccaagaccgtcaagaagatcaaagtctctgtgagacagtacgccgacatctgcctcttcagcaccgcccagtacaagtgtcctgtggctcaactcgaacaagatgaccaggtatctcccagctccacattctgtaaggtgtacaccataaccccactgctcagtgacaaccgggagaagcggggtctcgccctggatgggaaactcaagcacgaggacaccaacctggcttccagcaccatcgtgaaggagggtgccaacaaggaggtgctgggaatcctggtgtcctacagggtcaaggtgaagctggtggtgtctcgaggcggggatgtctctgtggagctgccttttgttcttatgcaccccaagccccacgaccacatccccctccccagaccccagtcagccgctccggagacagatgtccctgtggacaccaacctcattgaatttgataccaactatgccacagatgatgacattgtgtttgaggactttgcccggcttcggctgaaggggatgaaggatgacgactatgatgatcaactctgctaggaagcggggtgggaagaagggaggggatggggttgggagaggtgagggcagtttatatcgatgccctttggcaagggctgggtttcccggaagcttctatattcccgggggggcttaccgctcg

SEQ ID NO: 49255 - DNA, 864 bp, Homo sapiens
cggacgcgtgggtcgacccacgcgtcggcggggtctcgccctggatgggaaactcaagcacgaggacaccaacctggcttccagcaccatcgtgaaggagggtgccaacaaggaggtgctgggaatcctggtgtcctacagggtcaaggtgaagctggtggtgtctcgaggcggggatgtctctgtggagctgccttttgttcttatgcaccccaagccccacgaccacatccccctccccagaccccagtcagccgctccggagacagatgtccctgtggacaccaacctcattgaatttgataccaactatgccacagatgatgacattgtgtttgaggactttgcccggcttcggctgaaggggatgaaggatgacgactatgatgatcaactctgctaggaagcggggtgggaagaagggaggggatggggttgggagaggtgagggcaggattaagatccccactgtcaatgggggattgtcccagcccctcttcccttcccctcacctggaagcttcttcaaccaatcccttcacactctctcccccatccccccaagatacacactggaccctctcttgctgaatgtgggcattaattttttgactgcagctctgcttctccagccccgccgtgggtggcaagctgtgttcatacctaaattttctggaaggggacagtgaaaagaggagtgacaggagggaaagggggagacaaaactcctactctcaacctcacaccaacacctcccattatcactctctctgcccccattccttcaagaggagaccctttggggacaaggccgtttctttgtttctgagcataaagaagaaaataaatcttttactaagcatga

SEQ ID NO: 49256 - DNA, 926 bp, Homo sapiens
aaataaacaaagtatattacggctagtacgagactgagtgttgaattcggccgaggcaaggagctgtactaccatggggagcccctcaatgtaaatgtccacgtcaccaacaatccacattctgtaaggtgtacaccataaccccactgctcagtgacaaccgggagaagcggggtctcgccctggatgggaaagtcctacagggtcaaggtgaagctggtggtgtctcgaggcggggatgtctctgtggagctgccttttgttcttatgcaccccaagccccacgaccacatccccctccccagaccccagtcagccgctccggagacagatgtccctgtggacaccaacctcattgaatttgataccaactatgccacagatgatgacattgtgtttgaggactttgcccggcttcggctgaaggggatgaaggatgacgactatgatgatcaactctgctaggaagcggggtgggaagaagggaggggatggggttgggagaggtgagggcaggattaagatccccactgtcaatgggggattgtcccagcccctcttcccttcccctcacctggaagcttcttcaaccaatcccttcacactctctcccccatccccccaagatacacactggaccctctcttgctgaatgtgggcattaattttttgactgcagctctgcttctccagccccgccgtgggtggcaagctgtgttcatacctaaattttctggaaggggacagtgaaaagaggagtgacaggagggaaagggggagacaaaactcctactctcaacctcacaccaacacctcccattatcactctctctgcccccattccttcaagaggagaccctttggggacaaggccgtttctttgtttctgagcataaagaagaaaataaatcttttactaagcatga

SEQ ID NO: 49257 - DNA, 593 bp, Homo sapiens
attagaaggattatggatgcggttgcttgcgtgaggaaatacttgatggcagcttctgtggaacgagggtttatttttttggttagaactggaataaaagctagcatgtttatttctaggcctactcaggtaaaaaatcagtgggaagaagggaggggatggggttgggagaggtgagggcaggattaagatccccactgtcaatgggggattgtcccagcccctcttcccttcccctcacctggaagcttcttcaaccaatcccttcacactctctcccccatccccccaagatacacactggaccctctcttgctgaatgtgggcattaattttttgactgcagctctgcttctccagccccgccgtgggtggcaagctgtgttcatacctaaattttctggaaggggacagtgaaaagaggagtgacaggagggaaagggggagacaaaactcctactctcaacctcacaccaacacctcccattatcactctctctgcccccattccttcaagaggagaccctttggggacaaggccgtttctttgtttctgagcataaagaagaaaataaatcttttactaagcatga

SEQ ID NO: 49258 - DNA, 1564 bp, Homo sapiens
agccaatggccccgcgtgtctgctaggagagggcgggcagcgccgcggcgcgcgcgatccggctgacgcatctggccccggttccccaagaccagagcggggccgggagggagggggaagaggcgagagcgcggagggcgcgcgtgcgcattggcgcggggaggagcagggatcttggcagcgggcgaggaggctgcgagcgagccgcgaaccgagcgggcggcgggcgcgcgcaccatgggggagaaacccgggaccagggtcttcaagaagtcgagccctaactgcaagctcaccgtgtacttgggcaagcgggacttcgtagatcacctggacaaagtggaccctgtagatggcgtggtgcttgtggaccctgactacctgaaggaccgcaaagtgtttgtgaccctcacctgcgccttccgctatggccgtgaagacctggatgtgctgggcttgtccttccgcaaagacctgttcatcgccacctaccaggccttccccccggtgcccaacccaccccggccccccacccgcctgcaggaccggctgctgaggaagctgggccagcatgcccaccccttcttcttcaccataccccagaatcttccatgctccgtcacactgcagccaggcccagaggatacaggaaaggcctgcggcgtagactttgagattcgagccttctgtgctaaatcactagaagagaaaagccacaaaaggaactctgtgcggctggtgatccgaaaggtgcagttcgccccggagaaacccggcccccagccttcagccgaaaccacacgccacttcctcatgtctgaccggtccctgcacctcgaggcttccctggacaaggagctgtactaccatggggagcccctcaatgtaaatgtccacgtcaccaacaactccaccaagaccgtcaagaagatcaaagtctctggtaggaggtggggtttggaagggggtcttcggggagggcgttactgcacaggtggctcctggtgtgatctcagcccaggccatttcccagtgcgggagacccaccagggctcaaagaatttaggttgttccagaatgatacggggagcctcggtgtttactgcttcagtggggagcatgggggggccacgccacggggtctggagttgtggtgtggtggtggcttgtgctccatccagagctgcctgaccccgtcccaccccacagtgagacagtacgccgacatctgcctcttcagcaccgcccagtacaagtgtcctgtggctcaactcgaacaagatgaccaggtatctcccagctccacattctgtaaggtgtacaccataaccccactgctcagtgacaaccgggagaagcggggtctcgccctggatgggaaactcaagcacgaggacaccaacctggcttccagcaccatcgtgaaggagggtgccaacaaggaggtgctgggaatcctggtgtcctacagggtcaaggtgaagctggtggtgtctcgaggcggggatgtctctgtagagctgccttttgttcttacagaccccagcctacagaccccatggcg

SEQ ID NO: 49259 - DNA, 841 bp, Homo sapiens
  misc_feature (521)..(521): n is a, c, g, or t
agccaatggccccgcgtgtctgctaggagagggcgggcagcgccgcggcgcgcgcgatccggctgacgcatctggccccggttccccaagaccagagcggggccgggagggagggggaagaggcgagagcgcggagggcgcgcgtgcgcattggcgcggggaggagcagggatcttggcagcgggcgaggaggctgcgagcgagccgcgaaccgagcgggcggcgggcgcgcgcaccatgggggagaaacccgggaccagggtcttcaagaagtcgagccctaactgcaagctcaccgtgtacttgggcaagcgggacttcgtagatcacctggacaaagtggaccctgtagatggcgtggtgcttgtggaccctgactacctgaaggaccgcaaagtgtttgtgaccctcacctgcgccttccgctatggccgtgaagacctggatgtgctgggcttgtccttccgcaaagacctgttcatcgccacctaccaggccttcccccgctcggacgagtgggncgtgaaggccgcaggatgccagtgacgagcaatgttgcagtgcgcttttgtccgcacagcaaataatgacgatgagggaaccctgaaaccaagaggcaagaaggcaacgaagcgtgagaacggagccgcgaggatggccaacaatgcccgagagcgtctgcgggtcacgagacatacaaacgaggcttttcaaaagagctcggccgcatggatgcaggctccacctcaagagtgacacgccccaaaccaagctcctgatcctccacaggcggagagcgcatcctcagtcatggaggcagccaggtccgagaaaggaaacc

SEQ ID NO: 49260 - DNA, 540 bp, Homo sapiens
agccaatggccccgcgtgtctgctaggagagggcgggcagcgccgcggcgcgcgcgatccggctgacgcatctggccccggttccccaagaccagagcggggccgggagggagggggaagaggcgagagcgcggagggcgcgcgtgcgcattggcgcggggaggagcagggatcttggcagcgggcgaggaggctgcgagcgagccgcgaaccgagcgggcggcgggcgcgcgcaccatgggggagaaacccgggaccagggtcttcaagaagtcgagccctaactgcaagctcaccgtgtacttgggcaagcgggacttcgtagatcacctggacaaagtggaccctgtagatggcgtggtgcttgtggaccctgactacctgaaggaccgcaaagtgtttgtgaccctcacctgcgccttccgctatggccgtgaagacctggatgtgctgggcttgtccttccgcaaagacctgttcatcgccacctaccaggccttcccccgggagggggggggggggcgatgggggggtggcacg

SEQ ID NO: 49261 - DNA, 282 bp, Homo sapiens
  misc_feature (168)..(168): n is a, c, g, or t
  misc_feature (170)..(170): n is a, c, g, or t
gctgggattacaggcacgcaccaccacacacgactaattttgtatttttagtagtgatggggttttgccacgttggtcaggctggtctggaacccctgacctcaggtgatccgcccaccttagccttccaaagtgttgggattacaggcatgagccaccacacccagncngtctccagcctcttaggttgagatttggaggaagatctgggggctttctggaagaactgaagtcttctccttcctccgccacagataccccagaatcttccatgctccgtca

SEQ ID NO: 49262 - DNA, 746 bp, Homo sapiens
cacacgccacttcctcatgtctgaccggtccctgcacctcgaggcttccctggacaaggaggaggtggggcgtgagagggtgacacggatgccacggtgcagtttagaccctgggggaggggcgaagccacacatcaagaggacatttgtaaaggaggttgccttggctgggtgtggacagttgccgtgggcttgggtttgaggggagggggccagaacaatgtgtctgtgtttggggacacactgatgatgggaacagtgaaaaccagttccaattcacatgaccccctccccccaaaagctgtactaccatggggagcccctcaatgtaaatgtccacgtcaccaacaactccaccaagaccgtcaagaagatcaaagtctctggtaggaggtggggtttggaagggggtcttcggggagggcgttactgcacaggtggctcctggtgtgatctcagcccaggccatttcccagtgcgggagacccaccagggctcaaagaatttaggttgttccagaatgatacggggagcctcggtgtttactgcttcagtggggagcatgggggggccacgccacggggtctggagttgtggtgtggtggtggcttgtgctccatccagagctgcctgaccccgtcccaccccacagtgagacagtacgccgacatctgcctcttcagcaccgcccagtacaagtgtcctgtggctcaactcgaacaagagtgagtatcgggagagaccca

SEQ ID NO: 49263 - DNA, 661 bp, Homo sapiens
  misc_feature (540)..(540): n is a, c, g, or t
agccaatggccccgcgtgtctgctaggagagggcgggcagcgccgcggcgcgcgcgatccggctgacgcatctggccccggttccccaagaccagagcggggccgggagggagggggaagaggcgagagcgcggagggcgcgcgtgcgcattggcgcggggaggagcagggatcttggcagcgggcgaggaggctgcgagcgagccgcgaaccgagcgggcggcgggcgcgcgcaccatgggggagaaacccgggaccagggtcttcaagaagtcgagccctaactgcaagctcaccgtgtacttgggcaagcgggacttcgtagatcacctggacaaagtggaccctgtagatggcgtggtgcttgtggaccctgactacctgaaggaccgcaaagtgtttgtgaccctcacctgcgccttccgctatggccgtgaagacctggatgtgctgggcttgtccttccgcaaagacctgttcatcgccacctaccaggccttcccccggcggtggcggaaggagcaggtgagggtcacaaanacctggcgctcctgcaggtagatcagggctccagaagtgcccacgccattctacatgcgccaatactccgagcaagtgtgccactgcgtccgtcacgcatggagccaggtcccagacggag

SEQ ID NO: 49264 - DNA, 419 bp, Homo sapiens
aactcaggctagtagaggccgggtgttaatcggccgggcgaggaggctgcgagcgagccgcgaaccgagcgggcggcgggcgcgcgcaccatgggggagaaacccgggaccagtggggtttccctttctgttttgttagggtcttcaagaagtcgagccctaactgcaagctcaccgtgtacttgggcaagcgggacttcgtagatcacctggacaaagtggaccctgtagatggcgtggtgcttgtggaccctgactacctgaaggaccgcaaagtgtttgtgaccctcacctgcgccttccgctatggccgtgaagacctggatgtgctgggcttgtccttccgcaaagacctgttcatcgccacctaccaggccttcccccgggagggggggggggggcgatgggggggtggcacg

SEQ ID NO: 49265 - DNA, 3159 bp, Homo sapiens
agccaatggccccgcgtgtctgctaggagagggcgggcagcgccgcggcgcgcgcgatccggctgacgcatctggccccggttccccaagaccagagcggggccgggagggagggggaagaggcgagagcgcggagggcgcgcgtgcgcattggcgcggggaggagcagggatcttggcagcgggcgaggaggctgcgagcgagccgcgaaccgagcgggcggcgggcgcgcgcaccatgggggagaaacccgggaccagggtcttcaagaagtcgagccctaactgcaagctcaccgtgtacttgggcaagcgggacttcgtagatcacctggacaaagtggaccctgtagatggcgtggtgcttgtggaccctgactacctgaaggaccgcaaagtgtttgtgaccctcacctgcgccttccgctatggccgtgaagacctggatgtgctgggcttgtccttccgcaaagacctgttcatcgccacctaccaggccttccccccggtgcccaacccaccccggccccccacccgcctgcaggaccggctgctgaggaagctgggccagcatgcccaccccttcttcttcaccataccccagaatcttccatgctccgtcacactgcagccaggcccagaggatacaggaaaggcctgcggcgtagactttgagattcgagccttctgtgctaaatcactagaagagaaaagccacaaaaggaactctgtgcggctggtgatccgaaaggtgcagttcgccccggagaaacccggcccccagccttcagccgaaaccacacgccacttcctcatgtctgaccggtccctgcacctcgaggcttccctggacaaggagctgtactaccatggggagcccctcaatgtaaatgtccacgtcaccaacaactccaccaagaccgtcaagaagatcaaagtctctgtgagacagtacgccgacatctgcctcttcagcaccgcccagtacaagtgtcctgtggctcaactcgaacaagatgaccaggtatctcccagctccacattctgtaaggtgtacaccataaccccactgctcagtgacaaccgggagaagcggggtctcgccctggatgggaaactcaagcacgaggacaccaacctggcttccagcaccatcgtgaaggagggtgccaacaaggaggtgctgggaatcctggtgtcctacagggtcaaggtgaagctggtggtgtctcgaggcggggatgtctctgtggagctgccttttgttcttatgcaccccaagccccacgaccacatccccctccccagaccccagtcagccgctccggagacagatgtccctgtggacaccaacctcattgaatttgataccaactatgccacagatgatgacattgtgtttgaggactttgcccggcttcggctgaaggggatgaaggatgacgactatgatgatcaactctgctaggaagcggggtgggaagaagggaggggatggggttgggagaggtgagggcaggattaagatccccactgtcaatgggggattgtcccagcccctcttcccttcccctcacctggaagcttcttcaaccaatcccttcacactctctcccccatccccccaagatacacactggaccctctcttgctgaatgtgggcattaattttttgactgcagctctgcttctccagccccgccgtgggtggcaagctgtgttcatacctaaattttctggaaggggacagtgaaaagaggagtgacaggagggaaagggggagacaaaactcctactctcaacctcacaccaacacctcccattatcactctctctgcccccattccttcaagaggagaccctttggggacaaggccgtttctttgtttctgagcataaagaagaaaataaatcttttactaagcatgaaaaaaaaaaaaaaaaaaaaaaaaaaaaaacaaaaaaaaaaaaaaaaaaaaaaacaagagagggggggcgcgcgccacaaaaaaatccccccgggggggcgcccccagaacgcgagcgcccacccgctttctgatgaaccagggggagccccaatagaagagagagaggcgaacatatataaacagcgaagcacgacgagggcccgaagattaacaaacaagggcagaggaaagagagaggaaaacaagcggcagaaacagggagagagaatcagatagagagaaaaacacgcccacaccacgagcgcgggggggggagaacccaaacaggcggagcaacaacacctccccccacaaaaaaaatatcaaaacaccaacagaggaggacacaaaagaacgaaaaatagaacaaagagagagactagacgaagaggagaggaaaaaccaacaccagcggacagacaaacaagagcgtcgaggacaccaccaaaacaacatgcgcagcaaacaaagagaaagaaaaagaacaataaaacacacacacaactcatactaagacccgaagggggacgagcagtagagcacaacaatacaaaaccagaacacccagaagaagccagaaaaacgagcaccgcaacaccaacaaccgaccaccacaccgacggcgagaccaaccagcacaaaaacgacagcccaaacagcagacacacagaccaaccaaacagaacaccaaccacgaacagccacacgaaccaaacacgcagcacgaacacagcaagaacaacagcagaaagagacccacccaccacaaaaaagaaagagaggaacagaggaagaaaaacaagagcgggcgaagaggagcaaaaaagaaacagacgagagagcgcaacgagaggacagacgacacagaagaagcgaagaaaacaaaaagcaggaagaaagggaaaagggaacgggaaggaaagaacgcaacaaagaaagacaaaaagagaaaaagaaacacgcagagaagacacagagagaataaaaaaagcaaaaaagacgaaacagaaagacgaagaaagacaaactaagaaccgagaaaagaagaagaaaggcacaagacaaggggcacacgacacgagaatacgaagaacaacaccaagcagaaaagacagaggcgaagccaacaaacacgagaaaaaatgaaaaagcacaaggagaaaagagaagcaaaagaagcagaaagagag

SEQ ID NO: 49266 - DNA, 1964 bp, Homo sapiens
  misc_feature (1340)..(1340): n is a, c, g, or t
agccaatggccccgcgtgtctgctaggagagggcgggcagcgccgcggcgcgcgcgatccggctgacgcatctggccccggttccccaagaccagagcggggccgggagggagggggaagaggcgagagcgcggagggcgcgcgtgcgcattggcgcggggaggagcagggatcttggcagcgggcgaggaggctgcgagcgagccgcgaaccgagcgggcggcgggcgcgcgcaccatgggggagaaacccgggaccagggtcttcaagaagtcgagccctaactgcaagctcaccgtgtacttgggcaagcgggacttcgtagatcacctggacaaagtggaccctgtagatggcgtggtgcttgtggaccctgactacctgaaggaccgcaaagtgtttgtgaccctcacctgcgccttccgctatggccgtgaagacctggatgtgctgggcttgtccttccgcaaagacctgttcatcgccacctaccaggccttccccccggtgcccaacccaccccggccccccacccgcctgcaggaccggctgctgaggaagctgggccagcatgcccaccccttcttcttcaccataccccagaatcttccatgctccgtcacactgcagccaggcccagaggatacaggaaaggcctgcggcgtagactttgagattcgagccttctgtgctaaatcactagaagagaaaagccacaaaaggaactctgtgcggctggtgatccgaaaggtgcagttcgccccggagaaacccggcccccagccttcagccgaaaccacacgccacttcctcatgtctgaccggtccctgcacctcgaggcttccctggacaaggagctgtactaccatggggagcccctcaatgtaaatgtccacgtcaccaacaactccaccaagaccgtcaagaagatcaaagtctctgtgagacagtacgccgacatctgcctcttcagcaccgcccagtacaagtgtcctgtggctcaactcgaacaagatgaccaggtatctcccagctccacattctgtaaggtgtacaccataaccccactgctcagtgacaaccgggagaagcggggtctcgccctggatgggaaactcaagcacgaggacaccaacctggcttccagcaccatcgtgaaggagggtgccaacaaggaggtgctgggaatcctggtgtcctacagggtcaaggtgaagctggtggtgtctcgaggcggggatgtctctgtggagctgccttttgttcttatgcaccccaagccccacgaccacatccccctccccagaccccagtcagcacccacccccacaccccctcntcccgtccccccagccgctccggagacagatgtccctgtggacaccaacctcattgaatttgataccaactatgccacagatgatgacattgtgtttgaggactttgcccggcttcggctgaaggggatgaaggatgacgactatgatgatcaactctgctaggaagcggggtgggaagaagggaggggatggggttgggagaggtgagggcaggattaagatccccactgtcaatgggggattgtcccagcccctcttcccttcccctcacctggaagcttcttcaaccaatcccttcacactctctcccccatccccccaagatacacactggaccctctcttgctgaatgtgggcattaattttttgactgcagctctgcttctccagccccgccgtgggtggcaagctgtgttcatacctaaattttctggaaggggacagtgaaaagaggagtgacaggagggaaagggggagacaaaactcctactctcaacctcacaccaacacctcccattatcactctctctgcccccattccttcaagaggagaccctttggggacaaggccgtttctttgtttctgagcataaagaagaaaataaatcttttactaagcatga

SEQ ID NO: 49267 - DNA, 2022 bp, Homo sapiens
gacacacacaaacacacctcgctggttgggctgagtcctccctgaggacacacacagacacacatgcacatacatgttcacacacacacctgactggttggctgaggacacacacacacacacacacacacacacacaaacacacacacaccgggctggtgggcagaggtgtgcagagataaaggagcagctcaaaagcctaaaggtccactagtctgagaaacgccaccaccctcactttccaacactattgggaggaaacctggaacaactccttcctgatagcccagcctggagatccccgggcagggcagccagttttgagggctccgatgccctgtcaccatcctccccaatctcccctgtgaccccttgacatcctcagctcaccgtgtacttgggcaagcgggacttcgtagatcacctggacaaagtggaccctgtagatggcgtggtgcttgtggaccctgactacctgaaggaccgcaaagtgtttgtgaccctcacctgcgccttccgctatggccgtgaagacctggatgtgctgggcttgtccttccgcaaagacctgttcatcgccacctaccaggccttccccccggtgcccaacccaccccggccccccacccgcctgcaggaccggctgctgaggaagctgggccagcatgcccaccccttcttcttcaccataccccagaatcttccatgctccgtcacactgcagccaggcccagaggatacaggaaaggcctgcggcgtagactttgagattcgagccttctgtgctaaatcactagaagagaaaagccacaaaaggaactctgtgcggctggtgatccgaaaggtgcagttcgccccggagaaacccggcccccagccttcagccgaaaccacacgccacttcctcatgtctgaccggtccctgcacctcgaggcttccctggacaaggagctgtactaccatggggagcccctcaatgtaaatgtccacgtcaccaacaactccaccaagaccgtcaagaagatcaaagtctctgtgagacagtacgccgacatctgcctcttcagcaccgcccagtacaagtgtcctgtggctcaactcgaacaagatgaccaggtatctcccagctccacattctgtaaggtgtacaccataaccccactgctcagtgacaaccgggagaagcggggtctcgccctggatgggaaactcaagcacgaggacaccaacctggcttccagcaccatcgtgaaggagggtgccaacaaggaggtgctgggaatcctggtgtcctacagggtcaaggtgaagctggtggtgtctcgaggcggggatgtctctgtggagctgccttttgttcttatgcaccccaagccccacgaccacatccccctccccagaccccagtcagccgctccggagacagatgtccctgtggacaccaacctcattgaatttgataccaactatgccacagatgatgacattgtgtttgaggactttgcccggcttcggctgaaggggatgaaggatgacgactatgatgatcaactctgctaggaagcggggtgggaagaagggaggggatggggttgggagaggtgagggcaggattaagatccccactgtcaatgggggattgtcccagcccctcttcccttcccctcacctggaagcttcttcaaccaatcccttcacactctctcccccatccccccaagatacacactggaccctctcttgctgaatgtgggcattaattttttgactgcagctctgcttctccagccccgccgtgggtggcaagctgtgttcatacctaaattttctggaaggggacagtgaaaagaggagtgacaggagggaaagggggagacaaaactcctactctcaacctcacaccaacacctcccattatcactctctctgcccccattccttcaagaggagaccctttggggacaaggccgtttctttgtttctgagcataaagaagaaaataaatcttttactaagcatga

SEQ ID NO: 49268 - DNA, 1689 bp, Homo sapiens
aactcaggctagtagaggccgggtgttaatcggccgggcgaggaggctgcgagcgagccgcgaaccgagcgggcggcgggcgcgcgcaccatgggggagaaacccgggaccagatggcgtggtgcttgtggaccctgactacctgaaggaccgcaaagtgtttgtgaccctcacctgcgccttccgctatggccgtgaagacctggatgtgctgggcttgtccttccgcaaagacctgttcatcgccacctaccaggccttccccccggtgcccaacccaccccggccccccacccgcctgcaggaccggctgctgaggaagctgggccagcatgcccaccccttcttcttcaccataccccagaatcttccatgctccgtcacactgcagccaggcccagaggatacaggaaaggcctgcggcgtagactttgagattcgagccttctgtgctaaatcactagaagagaaaagccacaaaaggaactctgtgcggctggtgatccgaaaggtgcagttcgccccggagaaacccggcccccagccttcagccgaaaccacacgccacttcctcatgtctgaccggtccctgcacctcgaggcttccctggacaaggagctgtactaccatggggagcccctcaatgtaaatgtccacgtcaccaacaactccaccaagaccgtcaagaagatcaaagtctctgtgagacagtacgccgacatctgcctcttcagcaccgcccagtacaagtgtcctgtggctcaactcgaacaagatgaccaggtatctcccagctccacattctgtaaggtgtacaccataaccccactgctcagtgacaaccgggagaagcggggtctcgccctggatgggaaactcaagcacgaggacaccaacctggcttccagcaccatcgtgaaggagggtgccaacaaggaggtgctgggaatcctggtgtcctacagggtcaaggtgaagctggtggtgtctcgaggcggggatgtctctgtggagctgccttttgttcttatgcaccccaagccccacgaccacatccccctccccagaccccagtcagccgctccggagacagatgtccctgtggacaccaacctcattgaatttgataccaactatgccacagatgatgacattgtgtttgaggactttgcccggcttcggctgaaggggatgaaggatgacgactatgatgatcaactctgctaggaagcggggtgggaagaagggaggggatggggttgggagaggtgagggcaggattaagatccccactgtcaatgggggattgtcccagcccctcttcccttcccctcacctggaagcttcttcaaccaatcccttcacactctctcccccatccccccaagatacacactggaccctctcttgctgaatgtgggcattaattttttgactgcagctctgcttctccagccccgccgtgggtggcaagctgtgttcatacctaaattttctggaaggggacagtgaaaagaggagtgacaggagggaaagggggagacaaaactcctactctcaacctcacaccaacacctcccattatcactctctctgcccccattccttcaagaggagaccctttggggacaaggccgtttctttgtttctgagcataaagaagaaaataaatcttttactaagcatga

SEQ ID NO: 49269 - DNA, 1404 bp, Homo sapiens
tagtggatccaaagaattcggcacgaggctgaggaagctgggccagcatgcccaccccttcttcttcaccataccccagaatcttccatgctccgtcacactgcagccaggcccagaggatacaggaaaggcctgcggcgtagactttgagattcgagccttctgtgctaaatcactagaagagaaaagccacaaaaggaactctgtgcggctggtgatccgaaaggtgcagttcgccccggagaaacccggcccccagccttcagccgaaaccacacgccacttcctcatgtctgaccggtccctgcacctcgaggcttccctggacaaggagctgtactaccatggggagcccctcaatgtaaatgtccacgtcaccaacaactccaccaagaccgtcaagaagatcaaagtctctgtgagacagtacgccgacatctgcctcttcagcaccgcccagtacaagtgtcctgtggctcaactcgaacaagatgaccaggtatctcccagctccacattctgtaaggtgtacaccataaccccactgctcagtgacaaccgggagaagcggggtctcgccctggatgggaaactcaagcacgaggacaccaacctggcttccagcaccatcgtgaaggagggtgccaacaaggaggtgctgggaatcctggtgtcctacagggtcaaggtgaagctggtggtgtctcgaggcggggatgtctctgtggagctgccttttgttcttatgcaccccaagccccacgaccacatccccctccccagaccccagtcagccgctccggagacagatgtccctgtggacaccaacctcattgaatttgataccaactatgccacagatgatgacattgtgtttgaggactttgcccggcttcggctgaaggggatgaaggatgacgactatgatgatcaactctgctaggaagcggggtgggaagaagggaggggatggggttgggagaggtgagggcaggattaagatccccactgtcaatgggggattgtcccagcccctcttcccttcccctcacctggaagcttcttcaaccaatcccttcacactctctcccccatccccccaagatacacactggaccctctcttgctgaatgtgggcattaattttttgactgcagctctgcttctccagccccgccgtgggtggcaagctgtgttcatacctaaattttctggaaggggacagtgaaaagaggagtgacaggagggaaagggggagacaaaactcctactctcaacctcacaccaacacctcccattatcactctctctgcccccattccttcaagaggagaccctttggggacaaggccgtttctttgtttctgagcataaagaagaaaataaatcttttactaagcatga

SEQ ID NO: 49270 - DNA, 1953 bp, Homo sapiens
aactcaggctagtagaggccgggtgttaatcggccgggcgaggaggctgcgagcgagccgcgaaccgagcgggcggcgggcgcgcgcaccatgggggagaaacccgggaccagataccccagaatcttccatgctccgtcacactgcagccaggcccagaggatacaggaaaggcctgcggcgtagactttgagattcgagccttctgtgctaaatcactagaagagaaaagccacaaaaggaactctgtgcggctggtgatccgaaaggtgcagttcgccccggagaaacccggcccccagccttcagccgaaaccacacgccacttcctcatgtctgaccggtccctgcacctcgaggcttccctggacaaggaggaggtggggcgtgagagggtgacacggatgccacggtgcagtttagaccctgggggaggggcgaagccacacatcaagaggacatttgtaaaggaggttgccttggctgggtgtggacagttgccgtgggcttgggtttgaggggagggggccagaacaatgtgtctgtgtttggggacacactgatgatgggaacagtgaaaaccagttccaattcacatgaccccctccccccaaaagctgtactaccatggggagcccctcaatgtaaatgtccacgtcaccaacaactccaccaagaccgtcaagaagatcaaagtctctggtaggaggtggggtttggaagggggtcttcggggagggcgttactgcacaggtggctcctggtgtgatctcagcccaggccatttcccagtgcgggagacccaccagggctcaaagaatttaggttgttccagaatgatacggggagcctcggtgtttactgcttcagtggggagcatgggggggccacgccacggggtctggagttgtggtgtggtggtggcttgtgctccatccagagctgcctgaccccgtcccaccccacagtgagacagtacgccgacatctgcctcttcagcaccgcccagtacaagtgtcctgtggctcaactcgaacaagatgaccaggtatctcccagctccacattctgtaaggtgtacaccataaccccactgctcagtgacaaccgggagaagcggggtctcgccctggatgggaaactcaagcacgaggacaccaacctggcttccagcaccatcgtgaaggagggtgccaacaaggaggtgctgggaatcctggtgtcctacagggtcaaggtgaagctggtggtgtctcgaggcggggatgtctctgtggagctgccttttgttcttatgcaccccaagccccacgaccacatccccctccccagaccccagtcagccgctccggagacagatgtccctgtggacaccaacctcattgaatttgataccaactatgccacagatgatgacattgtgtttgaggactttgcccggcttcggctgaaggggatgaaggatgacgactatgatgatcaactctgctaggaagcggggtgggaagaagggaggggatggggttgggagaggtgagggcaggattaagatccccactgtcaatgggggattgtcccagcccctcttcccttcccctcacctggaagcttcttcaaccaatcccttcacactctctcccccatccccccaagatacacactggaccctctcttgctgaatgtgggcattaattttttgactgcagctctgcttctccagccccgccgtgggtggcaagctgtgttcatacctaaattttctggaaggggacagtgaaaagaggagtgacaggagggaaagggggagacaaaactcctactctcaacctcacaccaacacctcccattatcactctctctgcccccattccttcaagaggagaccctttggggacaaggccgtttctttgtttctgagcataaagaagaaaataaatcttttactaagcatga

SEQ ID NO: 49271 - DNA, 950 bp, Homo sapiens
agccaatggccccgcgtgtctgctaggagagggcgggcagcgccgcggcgcgcgcgatccggctgacgcatctggccccggttccccaagaccagagcggggccgggagggagggggaagaggcgagagcgcggagggcgcgcgtgcgcattggcgcggggaggagcagggatcttggcagcgggcgaggaggctgcgagcgagccgcgaaccgagcgggcggcgggcgcgcgcaccatgggggagaaacccgggaccagggtcttcaagaagtcgagccctaactgcaagctcaccgtgtacttgggcaagcgggacttcgtagatcacctggacaaagtggaccctgtagatggcgtggtgcttgtggaccctgactacctgaaggaccgcaaagtgtttgtgaccctcacctgcgccttccgctatggccgtgaagacctggatgtgctgggcttgtccttccgcaaagacctgttcatcgccacctaccaggccttccccccggtgcccaacccaccccggccccccacccgcctgcaggaccggctgctgaggaagctgggccagcatgcccaccccttcttcttcaccataccccagaatcttccatgctccgtcacactgcagccaggcccagaggatacaggaaaggcctgcggcgtagactttgagattcgagccttctgtgctaaatcactagaagagaaaagccacaaaaggaactctgtgcggctggtgatccgaaaggtgcagttcgccccggagaaacccggcccccagccttcagccgaaaccacacgccacttcctcatgtctgaccggtccctgcacctcgaggcttccctggacaaggagctgcccccattccttcaagaggagaccctttggggacaaggccgtttctttgtttctgagcataaagaagaaaataaatcttttactaagca

SEQ ID NO: 49272 - DNA, 610 bp, Homo sapiens
agccaatggccccgcgtgtctgctaggagagggcgggcagcgccgcggcgcgcgcgatccggctgacgcatctggccccggttccccaagaccagagcggggccgggagggagggggaagaggcgagagcgcggagggcgcgcgtgcgcattggcgcggggaggagcagggatcttggcagcgggcgaggaggctgcgagcgagccgcgaaccgagcgggcggcgggcgcgcgcaccatgggggagaaacccgggaccagctcaccgtgtacttgggcaagcgggacttcgtagatcacctggacaaagtggaccctgtagatggcgtggtgcttgtggaccctgactacctgaaggaccgcaaagtgtttgtgaccctcacctgcgccttccgctatggccgtgaagacctggatgtgctgggcttgtccttccgcaaagacctgttcatcgccacctaccaggccttcccccggcggtggcggaaggagcaggtgagggtaaaaaggggcggggggggcggaggccagcttggttgggaaaccgatctggctggggggaatggggggccaagaaaggacgggggaataggagcgacctttcggcacac

SEQ ID NO: 49273 - DNA, 1122 bp, Homo sapiens
aactcaggctagtagaggccgggtgttaatcggccgggcgaggaggctgcgagcgagccgcgaaccgagcgggcggcgggcgcgcgcaccatgggggagaaacccgggaccagataccccagaatcttccatgctccgtcacactgcagccaggcccagaggatacaggaaaggcctgcggcgtagactttgagattcgagccttctgtgctaaatcactagaagagaaaagccacaaaaggaactctgtgcggctggtgatccgaaaggtgcagttcgccccggagaaacccggcccccagccttcagccgaaaccacacgccacttcctcatgtctgaccggtccctgcacctcgaggcttccctggacaaggagctgtactaccatggggagcccctcaatgtaaatgtccacgtcaccaacaactccaccaagaccgtcaagaagatcaaagtctctgtgagacagtacgccgacatctgcctcttcagcaccgcccagtacaagtgtcctgtggctcaactcgaacaagatgaccaggtatctcccagctccacattctgtaaggtgtacaccataaccccactgctcagtgacaaccgggagaagcggggtctcgccctggatgggaaactcaagcacgaggacaccaacctggcttccagcaccatcgtgaaggagggtgccaacaaggaggtgctgggaatcctggtgtcctacagggtcaaggtgaagctggtggtgtctcgaggcggggatgtctctgtgagctgcctttgttctaatgcaccccagaggcccacagacaacattcccgactccccagagcccagcagacggtcgggaagacacacatgaccccatgggaaacagcgcaaaccctcgaagacaactgagacagacaccacataacgcccccaggaaggaagcgcccagtggaggttacgaagacaccatggccccggacaagccgcagacaaccggcgcacaacaggacagccgcaacaaagaaagaacccagaccacggccaccgcgaacgaggagacagagacaagcaacgcaccagcgagacggcacgcgacgacaagagacgggcaccacaagaaaccccaagcacaa

SEQ ID NO: 49274 - DNA, 535 bp, Homo sapiens
cagaggaagaacagtgagctggagagaagacagagaagctgtggagggtggagagagaatgcaagacaaggaggcccttgtagttctctcattctatggaaatgagacgcagtaaatactcactagatgagaactattattaatacatatttctaaaaaataattaagaaattccaaaacgttcagttcttcaagatgctatggagctagtatcattcattcattatcacttaggcattcattcaacaaatatttattaagcactgactctgtgtcagaccctatgctagccactggagtacaacgatgagcaaaaacagacatgaaccctgcctcatagagcttagagtctagtaagggagagagacattgaataggcaaatgtacaaatgaagtaactttaaggccaggtgtggtggctcatgtttggaatcccagcactttgggaggctgaggcaggtggatcacctgagatcaggagtttgagtttgagaccagcctggccaacatggcaaaaccccgtctctactaaaaa

SEQ ID NO: 49275 - DNA, 913 bp, Homo sapiens
ctggaaaatgtagatggtaaacagttaacacaggaaactatgtaaataaagtatgatatatctacacaacaaaacactatgcaactattaaaaagagagcttgatttacgtgctgaccaaaatgatattgtgatcaaaaaaacctttgagaatagtataaggagaccctgattctgctcaagccccatgccacgctgtgtgtgtcatacgtgacttgactgcacagcatgtgcaccaacttgttagtaacttgttaataatggtaatgaaggacttttatcttcttggttatgtattgttacaaggttaaatttttttttttagttagagcgtttttcaaaaaaaaagagagaagaaaaaataaacacccccaaaagaatacaggcacagatgcagataccaagtggtgaacaagtcccttacactatcaaactgaaacctcaattatttcaagtactctgtaaaggagcggagacccagcccctaattcaacattgaggctattagtgagcactcaagtcagtactagtgctgctggctgagaacagatattcaaagtgtagataataaagatgatttttttttctccagaaaattcaagaacctaactcataacctttgaccttttccatggagatgaaccagaaaaacaaaagctcaaaactccctcccaggaagcagtttaactcatatatatgaagagtcagaattaagacaattcaagatggccaaaactgaatttagtatctattccaccttacctctgtgaatggtaccactgctcattcagttcccctctctccccatcatccatcactcccccacgaatcaccgcactctatgagcacactccttactgtctctcacacccaactcttccctcaccatgcctactgccttaaatggggccctc

SEQ ID NO: 49276 - DNA, 417 bp, Homo sapiens
taaaactatgataaaaatttcccttctctataatggctacataagaaagaaagtatactcatttgtagcaggcatacttgcacagcatttcatccacctctttgtaaagaccagagggctttgtcttctctccagtaggtctttagaacaaaataacaacttgggctctcattagaactggttaatgtgctgtataggccatcctaagtgttggtatcacagcatacccaatgtccaagttgccatagtagggcatgctacagcttcatgagaaatgcttagtcagttgggtttttaagggctcttttacagcatctacaggcccctctacagaagtcccttgggttttattttagctgaggctcatttttccttctcactccaagactgacccattctttgacctcagataaaaca

SEQ ID NO: 49277 - DNA, 1996 bp, Homo sapiens
ctagaattcagcggccgctgaattctagaagccgatctagaagaccgagatggacgtgtctacgccaaagcctcagatctctatatcacgctgcccctggccttgctcttcctcatcgttcgatacttctttgagctgtacgtggctacaccactggctgccctcttgaacataaaggagaaaactcggctgcgggcacctcccaacgccaccttggaacatttctacctgaccagtggcaagcagcccaagcaggtggaagtagagcttttgtcccggcagagcgggctctctggccgccaggtagagcgttggttccgtcgccgccgcaaccaggaccggcccagtctcctcaagaagttccgagaagccagctggagattcacattttacctgattgccttcattgccggcatggccgtcattgtggataaaccctggttctatgacatgaagaaagtttgggagggatatcccatacagagcactatcccttcccagtattggtactacatgattgaactttccttctactggtccctgctcttcagcattgcctctgatgtcaagcgaaaggatttcaaggaacagatcatccaccatgtggccaccatcattctcatcagcttttcctggtttgccaattacatccgagctgggactctaatcatggctctgcatgactcttccgattacctgctggagtcagccaagatgtttaactacgcgggatggaagaacacctgcaacaacatcttcatcgtcttcgccattgtttttatcatcacccgactggtcatcctgcccttctggatcctgcattgcaccctggtgtacccactggagctctatcctgccttctttggctattacttcttcaattccatgatgggagttctacagctgctgcatatcttctgggcctacctcattttgcgcatggcccacaagttcataactggaaagctggtagaagatgaacgcagtgaccgggaagaaacagagagctcagagggggaggaggctgcagctgggggaggagcaaagagccggcccctagccaatggccaccccatcctcaataacaaccatcgtaagaatgactgaaccattattccagctgcctcccagattaatgcataaagccaaggaactaccccgctccctgcgctatagggtcactttaagctctggggaaaaaggagaaagtgagaggagagttctctgcatcctccctccttgcttgtcacccagttgcctttaaaccaaattctaaccagcctatccccaggtagggggacgttggttatattctgttagagggggacggtcgtattttcctccctacccgccaagtcatcctttctactgcttttgaggccctccctcagctctctgtgggtaggggttacaattcacattccttattctgagaatttggccccagctgtttgcctttgactccctgacctccagagccagggttgtgccttattgtcccatctgtgggcctcattctgccaaagctggaccaaggctaacctttctaagctccctaacttgggccagaaaccaaagctgagcttttaactttctccctctatgacacaaatgaattgagggtaggaggagggtgcacataacccttaccctacctctgccaaaaagtgggggctgtactggggactgctcggatgatctttcttagtgctacttctttcagctgtccctgtagcgacaggtctaagatctgactgcctcctcctttctctggcctcttcccccttccctcttctcttcagctaggctagctggtttggagtagaatggcaactaattctaatttttatttattaaatatttggggttttggttttaaagccagaattacggctagcacctagcatttcagcagagggaccattttagaccaaaatgtactgttaatgggtttttttttaaaattaaaagattaaataaaaaatattaaataaaa

SEQ ID NO: 49278 - DNA, 1631 bp, Homo sapiens
ctggcttctcggaactttttcagaagactgcgcctgtcctggttgcggcatggctgtcactgtggataaaccctggttctatgacatgaagaaagtttgggagggatatcccatacagagcactatcccttcccagtattggtactacatgattgaactttccttctactggtccctgctcttcagcattgcctctgatgtcaagcgaaaggatttcaaggaacagatcatccaccatgtggccaccatcattctcatcagcttttcctggtttgccaattacatccgagctgggactctaatcatggctctgcatgactcttccgattacctgctggagtcagccaagatgtttaactacgcgggatggaagaacacctgcaacaacatcttcatcgtcttcgccattgtttttatcatcacccgactggtcatcctgcccttctggatcctgcattgcaccctggtgtacccactggagctctatcctgccttctttggctattacttcttcaattccatgatgggagttctacagctgctgcatatcttctgggcctacctcattttgcgcatggcccacaagttcataactggaaagctggtagaagatgaacgcagtgaccgggaagaaacagagagctcagagggggaggaggctgcagctgggggaggagcaaagagccggcccctagccaatggccaccccatcctcaataacaaccatcgtaagaatgactgaaccattattccagctgcctcccagattaatgcataaagccaaggaactaccccgctccctgcgctatagggtcactttaagctctggggaaaaaggagaaagtgagaggagagttctctgcatcctccctccttgcttgtcacccagttgcctttaaaccaaattctaaccagcctatccccaggtagggggacgttggttatattctgttagagggggacggtcgtattttcctccctacccgccaagtcatcctttctactgcttttgaggccctccctcagctctctgtgggtaggggttacaattcacattccttattctgagaatttggccccagctgtttgcctttgactccctgacctccagagccagggttgtgccttattgtcccatctgtgggcctcattctgccaaagctggaccaaggctaacctttctaagctccctaacttgggccagaaaccaaagctgagcttttaactttctccctctatgacacaaatgaattgagggtaggaggagggtgcacataacccttaccctacctctgccaaaaagtgggggctgtactggggactgctcggatgatctttcttagtgctacttctttcagctgtccctgtagcgacaggtctaagatctgactgcctcctcctttctctggcctcttcccccttccctcttctcttcagctaggctagctggtttggagtagaatggcaactaattctaatttttatttattaaatatttggggttttggttttaaagccagaattacggctagcacctagcatttcagcagagggaccattttagaccaaaatgtactgttaatgggtttttttttaaaattaaaagattaaataaaaaatattaaataaaa

SEQ ID NO: 49279 - DNA, 399 bp, Homo sapiens
atcgtcgacccacgcgtccgcggacgcgtgtttcttagtgctacttctttcagctgtccctgtagcgacaggtctaagatctgactgcctcctcctttctctggcctcttcccccttccctcttctcttcagctaggctagctggtttggagtagaatggcaactaattctaatttttatttattaaatatttggggttttggttttaaagccagaattacggctagcacctagcatttcagcagagggaccattttagaccaaaatgtactgttaatgggtttttttttaaaattaaaagattaaataaaaaatattaaataaaacatggcaataagtgtcagactattaggaattgagaagggggatcaactaaataaacgaagagagtctttctta

SEQ ID NO: 49280 - DNA, 334 bp, Homo sapiens
aaattaataaagaaaaataaataagaaaaagcaaaaaaataaaataatacaaaaaatcaaatgaattaaaaataaagagaaacaaaagaatccaaaatgaagaagactctggcctcttcccccttccctcttctcttcagctaggctagctggtttggagtagaatggcaactaattctaatttttatttattaaatatttggggttttggttttaaagccagaattacggctagcacctagcatttcagcagagggaccattttagaccaaaatgtactgttaatgggtttttttttaaaattaaaagattaaataaaaaatattaaataaaa

SEQ ID NO: 49281 - DNA, 2261 bp, Homo sapiens
ttttttttttcccggctgggctcgggctcagctcgactgggctcggcgggcggcggcggcggcgccggcggctggcggaggagggagggcgagggcgggcgcgggccggcgggcgggcggaagagggaggagaggcgcggggagccaggcctcggggcctcggagcaaccacccgagcagacggagtacacggagcagcggccccggccccgccaacgctgccgccgggatgctccagaccttgtatgattacttctggtgggaacgtctgtggctgcctgtgaacttgacctgggccgatctagaagaccgagatggacgtgtctacgccaaagcctcagatctctatatcacgctgcccctggccttgctcttcctcatcgttcgatacttctttgagctgtacgtggctacaccactggctgccctcttgaacataaaggagaaaactcggctgcgggcacctcccaacgccaccttggaacatttctacctgaccagtggcaagcagcccaagcaggtggaagtagagcttttgtcccggcagagcgggctctctggccgccaggtagagcgttggttccgtcgccgccgcaaccaggaccggcccagtctcctcaagaagttccgagaagccagctggagattcacattttacctgattgccttcattgccggcatggccgtcattgtggataaaccctggttctatgacatgaagaaagtttgggagggatatcccatacagagcactatcccttcccagtattggtactacatgattgaactttccttctactggtccctgctcttcagcattgcctctgatgtcaagcgaaaggatttcaaggaacagatcatccaccatgtggccaccatcattctcatcagcttttcctggtttgccaattacatccgagctgggactctaatcatggctctgcatgactcttccgattacctgctggagtcagccaagatgtttaactacgcgggatggaagaacacctgcaacaacatcttcatcgtcttcgccattgtttttatcatcacccgactggtcatcctgcccttctggatcctgcattgcaccctggtgtacccactggagctctatcctgccttctttggctattacttcttcaattccatgatgggagttctacagctgctgcatatcttctgggcctacctcattttgcgcatggcccacaagttcataactggaaagctggtagaagatgaacgcagtgaccgggaagaaacagagagctcagagggggaggaggctgcagctgggggaggagcaaagagccggcccctagccaatggccaccccatcctcaataacaaccatcgtaagaatgactgaaccattattccagctgcctcccagattaatgcataaagccaaggaactaccccgctccctgcgctatagggtcactttaagctctggggaaaaaggagaaagtgagaggagagttctctgcatcctccctccttgcttgtcacccagttgcctttaaaccaaattctaaccagcctatccccaggtagggggacgttggttatattctgttagagggggacggtcgtattttcctccctacccgccaagtcatcctttctactgcttttgaggccctccctcagctctctgtgggtaggggttacaattcacattccttattctgagaatttggccccagctgtttgcctttgactccctgacctccagagccagggttgtgccttattgtcccatctgtgggcctcattctgccaaagctggaccaaggctaacctttctaagctccctaacttgggccagaaaccaaagctgagcttttaactttctccctctatgacacaaatgaattgagggtaggaggagggtgcacataacccttaccctacctctgccaaaaagtgggggctgtactggggactgctcggatgatctttcttagtgctacttctttcagctgtccctgtagcgacaggtctaagatctgactgcctcctcctttctctggcctcttcccccttccctcttctcttcagctaggctagctggtttggagtagaatggcaactaattctaatttttatttattaaatatttggggttttggttttaaagccagaattacggctagcacctagcatttcagcagagggaccattttagaccaaaatgtactgttaatgggtttttttttaaaattaaaagattaaataaaaaatattaaataaaa

SEQ ID NO: 49282 - DNA, 2334 bp, Homo sapiens
ttttttttttcccggctgggctcgggctcagctcgactgggctcggcgggcggcggcggcggcgccggcggctggcggaggagggagggcgagggcgggcgcgggccggcgggcgggcggaagagggaggagaggcgcggggagccaggcctcggggcctcggagcaaccacccgagcagacggagtacacggagcagcggccccggccccgccaacgctgccgccgggatgctccagaccttgtatgattacttctggtgggaacgtctgtggctgcctgtgaacttgacctgggccgatctagaagaccgagatggacgtgtctacgccaaagcctcagatctctatatcacgctgcccctggccttgctcttcctcatcgttcgatacttctttgagctgtacgtggctacaccactggctgccctcttgaacataaaggagaaaactcggctgcgggcacctcccaacgccaccttggaacatttctacctgaccagtggcaagcagcccaagcaggtggaagtagagcttttgtcccggcagagcgggctctctggccgccaggtagagcgttggttccgtcgccgccgcaaccaggaccggcccagtctcctcaagaagttccgagaagccagctggagattcacattttacctgattgccttcattgccggcatggccgtcattgtggataaaccctggttctatgacatgaagaaagtttgggagggatatcccatacagagcactatcccttcccagtattggtactacatgattgaactttccttctactggtccctgctcttcagcattgcctctgatgtcaagcgaaaggatttcaaggaacagatcatccaccatgtggccaccatcattctcatcagcttttcctggtttgccaattacatccgagctgggactctaatcatggctctgcatgactcttccgattacctgctggagtcagccaagatgtttaactacgcgggatggaagaacacctgcaacaacatcttcatcgtcttcgccattgtttttatcatcacccgactggtcatcctgcccttctggatcctgcattgcaccctggtgtacccactggagctctatcctgccttctttggctattacttcttcaattccatgatgggagttctacagctgctgcatatcttctgggcctacctcattttgcgcatggcccacaagttcataactggaaagctggtagaagatgaacgcagtgaccgggaagaaacagagagctcagagggggaggaggctgcagctgggggaggagcaaagagccggcccctagccaatggccaccccatcctcaataacaaccatcgtaagaatgactgaaccattattccagctgcctcccagattaatgcataaagccaaggaactaccccgctccctgcgctatagggtcactttaagctctggggaaaaaggagaaagtgagaggagagttctctgcatcctccctccttgcttgtcacccagttgcctttaaaccaaattctaaccagcctatccccaggtagggggacgttggttatattctgttagagggggacggtcgtattttcctccctacccgccaagtcatcctttctactgcttttgaggccctccctcagctctctgtgggtaggggttacaattcacattccttattctgagaatttggccccagctgtttgcctttgactccctgacctccagagccagggttgtgccttattgtcccatctgtgggcctcattctgccaaagctggaccaaggctaacctttctaagctccctaacttgggccagaaaccaaagctgagcttttaactttctccctctatgacacaaatgaattgagggtaggaggagggtgcacataacccttaccctacctctgccaaaaagtgggggctgtactggggactgctcggatgatctttcttagtgctacttctttcagctgtccctgtagcgacaggtctaagatctgactgcctcctcctttctctggcctcttcccccttccctcttctcttcagctaggctagctggtttggagtagaatggcaactaattctaatttttatttattaaatatttggggttttggttttaaagccagaattacggctagcacctagcatttcagcagagggaccattttagaccaaaatgtactgttaatgggtttttttttaaaattaaaagattaaataaaaaatattaaataaaacatggcaataagtgtcagactattaggaattgagaagggggatcaactaaataaacgaagagagtctttctta

SEQ ID NO: 49283 - DNA, 2153 bp, Homo sapiens
cctaggtacgggccgggggtaatcggccgaggcggggcaggcctcggggcctcggagcaaccacccgagcagacggagtacacggagcagcggccccggccccgccaacgctgccgccgggatgctccagaccttgtatgattacttctggtgggaacgtctgtggctgcctgtgaacttgacctgggccgatctagaagaccgagatggacgtgtctacgccaaagcctcagatctctatatcacgctgcccctggccttgctcttcctcatcgttcgatacttctttgagctgtacgtggctacaccactggctgccctcttgaacataaaggagaaaactcggctgcgggcacctcccaacgccaccttggaacatttctacctgaccagtggcaagcagcccaagcaggtggaagtagagcttttgtcccggcagagcgggctctctggccgccaggtagagcgttggttccgtcgccgccgcaaccaggaccggcccagtctcctcaagaagttccgagaagccagctggagattcacattttacctgattgccttcattgccggcatggccgtcattgtggataaaccctggttctatgacatgaagaaagtttgggagggatatcccatacagagcactatcccttcccagtattggtactacatgattgaactttccttctactggtccctgctcttcagcattgcctctgatgtcaagcgaaaggatttcaaggaacagatcatccaccatgtggccaccatcattctcatcagcttttcctggtttgccaattacatccgagctgggactctaatcatggctctgcatgactcttccgattacctgctggagtcagccaagatgtttaactacgcgggatggaagaacacctgcaacaacatcttcatcgtcttcgccattgtttttatcatcacccgactggtcatcctgcccttctggatcctgcattgcaccctggtgtacccactggagctctatcctgccttctttggctattacttcttcaattccatgatgggagttctacagctgctgcatatcttctgggcctacctcattttgcgcatggcccacaagttcataactggaaagctggtagaagatgaacgcagtgaccgggaagaaacagagagctcagagggggaggaggctgcagctgggggaggagcaaagagccggcccctagccaatggccaccccatcctcaataacaaccatcgtaagaatgactgaaccattattccagctgcctcccagattaatgcataaagccaaggaactaccccgctccctgcgctatagggtcactttaagctctggggaaaaaggagaaagtgagaggagagttctctgcatcctccctccttgcttgtcacccagttgcctttaaaccaaattctaaccagcctatccccaggtagggggacgttggttatattctgttagagggggacggtcgtattttcctccctacccgccaagtcatcctttctactgcttttgaggccctccctcagctctctgtgggtaggggttacaattcacattccttattctgagaatttggccccagctgtttgcctttgactccctgacctccagagccagggttgtgccttattgtcccatctgtgggcctcattctgccaaagctggaccaaggctaacctttctaagctccctaacttgggccagaaaccaaagctgagcttttaactttctccctctatgacacaaatgaattgagggtaggaggagggtgcacataacccttaccctacctctgccaaaaagtgggggctgtactggggactgctcggatgatctttcttagtgctacttctttcagctgtccctgtagcgacaggtctaagatctgactgcctcctcctttctctggcctcttcccccttccctcttctcttcagctaggctagctggtttggagtagaatggcaactaattctaatttttatttattaaatatttggggttttggttttaaagccagaattacggctagcacctagcatttcagcagagggaccattttagaccaaaatgtactgttaatgggtttttttttaaaattaaaagattaaataaaaaatattaaataaaa

SEQ ID NO: 49284 - DNA, 3036 bp, Homo sapiens
ttttttttttcccggctgggctcgggctcagctcgactgggctcggcgggcggcggcggcggcgccggcggctggcggaggagggagggcgagggcgggcgcgggccggcgggcgggcggaagagggaggagaggcgcggggagccaggcctcggggcctcggagcaaccacccgagcagacggagtacacggagcagcggccccggccccgccaacgctgccgccgggatgctccagaccttgtatgattacttctggtgggaacgtctgtggctgcctgtgaacttgacctgggccgatctagaagaccgagatggacgtgtctacgccaaagcctcagatctctatatcacgctgcccctggccttgctcttcctcatcgttcgatacttctttgagctgtacgtggctacaccactggctgccctcttgaacataaaggagaaaactcggctgcgggcacctcccaacgccaccttggaacatttctacctgaccagtggcaagcagcccaagcaggtggaagtagagcttttgtcccggcagagcgggctctctggccgccaggtagagcgttggttccgtcgccgccgcaaccaggaccggcccagtctcctcaagaagttccgagaagccagctggagattcacattttacctgattgccttcattgccggcatggccgtcattgtggataaaccctggttctatgacatgaagaaagtttgggagggatatcccatacagagcactatcccttcccagtattggtactacatgattgaactttccttctactggtccctgctcttcagcattgcctctgatgtcaagcgaaaggatttcaaggaacagatcatccaccatgtggccaccatcattctcatcagcttttcctggtttgccaattacatccgagctgggactctaatcatggctctgcatgactcttccgattacctgctggagtcagccaagatgtttaactacgcgggatggaagaacacctgcaacaacatcttcatcgtcttcgccattgtttttatcatcacccgactggtcatcctgcccttctggatcctgcattgcaccctggtgtacccactggagctctatcctgccttctttggctattacttcttcaattccatgatgggagttctacagctgctgcatatcttctgggcctacctcattttgcgcatggcccacaagttcataactggaaagctggtagaagatgaacgcagtgaccgggaagaaacagagagctcagagggggaggaggctgcagctgggggaggagcaaagagccggcccctagccaatggccaccccatcctcaataacaaccatcgtaagaatgactgaaccattattccagctgcctcccagattaatgcataaagccaaggaactaccccgctccctgcgctatagggtcactttaagctctggggaaaaaggagaaagtgagaggagagttctctgcatcctccctccttgcttgtcacccagttgcctttaaaccaaattctaaccagcctatccccaggtagggggacgttggttatattctgttagagggggacggtcgtattttcctccctacccgccaagtcatcctttctactgcttttgaggccctccctcagctctctgtgggtaggggttacaattcacattccttattctgagaatttggccccagctgtttgcctttgactccctgacctccagagccagggttgtgccttattgtcccatctgtgggcctcattctgccaaagctggaccaaggctaacctttctaagctccctaacttgggccagaaaccaaagctgagcttttaactttctccctctatgacacaaatgaattgagggtaggaggagggtgcacataacccttaccctacctctgccaaaaagtgggggctgtactggggactgctcggatgatctttcttagtgctacttctttcagctgtccctgtagcgacaggtctaagatctgactgcctcctcctttctctggcctcttcccccttccctcttctcttcagctaggctagctggtttggagtagaatggcaactaattctaatttttatttattaaatatttggggttttggttttaaagccagaattacggctagcacctagcatttcagcagagggaccattttagaccaaaatgtactgttaatgggtttttttttaaaattaaaagattaaataaaaaatattaaataaaacatggcaataagtgtcagactattaggaattgagaagggggatcaactaaataaacgaagagagtctttcttaaagaaaaaaaaaacaaaaaaaaaaaaaaaaaaaaaaaaaaaaaaaaaaaggggggggcccaaaaaattccccccagagggggacccaagttttacacgggctgccccacgttcttcttgaacaaaggagcgcgccccccaattagacgagcacggtcgttaataatagcagcagacgcgcgcagcggcggcccgcataaacaacacccgtctgctgcaaactgaggaaacaacgctgcacaccacgggaaccatctggaagaagaaagagccccctcacactggcgggcggggcgcgccaccaacatctgcgcacaacacccaccccaccaggcagcattatagaccgcccccaggcggagcaagaccatcaaccacccctgcccacgctggcgttacatcgcgctggccacccccacccgcgcaaattcgtcgtcgcgcgccagaaaaaaaacttcccccccaccggcgactatttcactccagccgcaacaactttttaccgaggagctcttagttcaaaataaccagacgccagaccacgcagatacgacgacaccacgcacacatcaacaacatacataagtatacgactgaccgacacgcgagtacgcaagacagcagacgacggacagcgcgagcggcgctagtgccagacgcacagaatcgtcagcacaacaataacaccaccccacagccacaa

SEQ ID NO: 49285 - DNA, 2549 bp, Homo sapiens
  misc_feature (2311)..(2311): n is a, c, g, or t
  misc_feature (2317)..(2317): n is a, c, g, or t
  misc_feature (2327)..(2328): n is a, c, g, or t
  misc_feature (2330)..(2330): n is a, c, g, or t
  misc_feature (2333)..(2333): n is a, c, g, or t
  misc_feature (2336)..(2336): n is a, c, g, or t
  misc_feature (2342)..(2343): n is a, c, g, or t
ttttttttttcccggctgggctcgggctcagctcgactgggctcggcgggcggcggcggcggcgccggcggctggcggaggagggagggcgagggcgggcgcgggccggcgggcgggcggaagagggaggagaggcgcggggagccaggcctcggggcctcggagcaaccacccgagcagacggagtacacggagcagcggccccggccccgccaacgctgccgccgggatgctccagaccttgtatgattacttctggtgggaacgtctgtggctgcctgtgaacttgacctgggccgatctagaagaccgagatggacgtgtctacgccaaagcctcagatctctatatcacgctgcccctggccttgctcttcctcatcgttcgatacttctttgagctgtacgtggctacaccactggctgccctcttgaacataaaggagaaaactcggctgcgggcacctcccaacgccaccttggaacatttctacctgaccagtggcaagcagcccaagcaggtggaagtagagcttttgtcccggcagagcgggctctctggccgccaggtagagcgttggttccgtcgccgccgcaaccaggaccggcccagtctcctcaagaagttccgagaagccagctggagattcacattttacctgattgccttcattgccggcatggccgtcattgtggataaaccctggttctatgacatgaagaaagtttgggagggatatcccatacagagcactatcccttcccagtattggtactacatgattgaactttccttctactggtccctgctcttcagcattgcctctgatgtcaagcgaaaggatttcaaggaacagatcatccaccatgtggccaccatcattctcatcagcttttcctggtttgccaattacatccgagctgggactctaatcatggctctgcatgactcttccgattacctgctggagtcagccaagatgtttaactacgcgggatggaagaacacctgcaacaacatcttcatcgtcttcgccattgtttttatcatcacccgactggtcatcctgcccttctggatcctgcattgcaccctggtgtacccactggagctctatcctgccttctttggctattacttcttcaattccatgatgggagttctacagctgctgcatatcttctgggcctacctcattttgcgcatggcccacaagttcataactggaaagctggtagaagatgaacgcagtgaccgggaagaaacagagagctcagagggggaggaggctgcagctgggggaggagcaaagagccggcccctagccaatggccaccccatcctcaataacaaccatcgtaagaatgactgaaccattattccagctgcctcccagattaatgcataaagccaaggaactaccccgctccctgcgctatagggtcactttaagctctggggaaaaaggagaaagtgagaggagagttctctgcatcctccctccttgcttgtcacccagttgcctttaaaccaaattctaaccagcctatccccaggtagggggacgttggttatattctgttagagggggacggtcgtattttcctccctacccgccaagtcatcctttctactgcttttgaggccctccctcagctctctgtgggtaggggttacaattcacattccttattctgagaatttggccccagctgtttgcctttgactccctgacctccagagccagggttgtgccttattgtcccatctgtgggcctcattctgccaaagctggaccaaggctaacctttctaagctccctaacttgggccagaaaccaaagctgagcttttaactttctccctctatgacacaaatgaattgagggtaggaggagggtgcacataacccttaccctacctctgccaaaaagtgggggctgtactggggactgctcggatgatctttcttagtgctacttctttcagctgtccctgtagcgacaggtctaagatctgactgcctcctcctttctctggcctcttcccccttccctcttctcttcagctaggctagctggtttggagtagaatggcaactaattctaatttttatttattaaatatttggggttttggttttaaagccagaattacggctagcacctagcatttcagcagagggaccattttagaccaaaatgtactgttaatgggtttttttttaaaattaaaagattaaataaaaaatattaaataaaaaagaaaaaaaaaacaaaaaaaaaaaactgttgggggggctggggccccgngaaaanttttttaaanncnttngtngggggnngggggcccagttgggatatggagacacaggggcaacaagcgtgtgccgaggggagaacccgggggcacggacaaaaggcgcggggatgtcccgcccgatagataaaaaacgccgcggggggaccaccgacggtttcgagaaatcccaagtggagcccgggggcccatcggggctcttcaaccgggttcaggggacgccgctccaat

SEQ ID NO: 49286 - DNA, 2608 bp, Homo sapiens
ttttttttttcccggctgggctcgggctcagctcgactgggctcggcgggcggcggcggcggcgccggcggctggcggaggagggagggcgagggcgggcgcgggccggcgggcgggcggaagagggaggagaggcgcggggagccaggcctcggggcctcggagcaaccacccgagcagacggagtacacggagcagcggccccggccccgccaacgctgccgccgggatgctccagaccttgtatgattacttctggtgggaacgtctgtggctgcctgtgaacttgacctgggccgatctagaagaccgagatggacgtgtctacgccaaagcctcagatctctatatcacgctgcccctggccttgctcttcctcatcgttcgatacttctttgagctgtacgtggctacaccactggctgccctcttgaacataaaggagaaaactcggctgcgggcacctcccaacgccaccttggaacatttctacctgaccagtggcaagcagcccaagcaggtggaagtagagcttttgtcccggcagagcgggctctctggccgccaggtagagcgttggttccgtcgccgccgcaaccaggaccggcccagtctcctcaagaagttccgagaagccagctggagattcacattttacctgattgccttcattgccggcatggccgtcattgtggataaaccctggttctatgacatgaagaaagtttgggagggatatcccatacagagcactatcccttcccagtattggtactacatgattgaactttccttctactggtccctgctcttcagcattgcctctgatgtcaagcgaaaggatttcaaggaacagatcatccaccatgtggccaccatcattctcatcagcttttcctggtttgccaattacatccgagctgggactctaatcatggctctgcatgactcttccgattacctgctggagtcagccaagatgtttaactacgcgggatggaagaacacctgcaacaacatcttcatcgtcttcgccattgtttttatcatcacccgactggtcatcctgcccttctggatcctgcattgcaccctggtgtacccactggagctctatcctgccttctttggctattacttcttcaattccatgatgggagttctacagctgctgcatatcttctgggcctacctcattttgcgcatggcccacaagttcataactggaaagctggtagaagatgaacgcagtgaccgggaagaaacagagagctcagagggggaggaggctgcagctgggggaggagcaaagagccggcccctagccaatggccaccccatcctcaataacaaccatcgtaagaatgactgaaccattattccagctgcctcccagattaatgcataaagccaaggaactaccccgctccctgcgctatagggtcactttaagctctggggaaaaaggagaaagtgagaggagagttctctgcatcctccctccttgcttgtcacccagttgcctttaaaccaaattctaaccagcctatccccaggtagggggacgttggttatattctgttagagggggacggtcgtattttcctccctacccgccaagtcatcctttctactgcttttgaggccctccctcagctctctgtgggtaggggttacaattcacattccttattctgagaatttggccccagctgtttgcctttgactccctgacctccagagccagggttgtgccttattgtcccatctgtgggcctcattctgccaaagctggaccaaggctaacctttctaagctccctaacttgggccagaaaccaaagctgagcttttaactttctccctctatgacacaaatgaattgagggtaggaggagggtgcacataacccttaccctacctctgccaaaaagtgggggctgtactggggactgctcggatgatctttcttagtgctacttctttcagctgtccctgtagcgacaggtctaagatctgactgcctcctcctttctctggcctcttcccccttccctcttctcttcagctaggctagctggtttggagtagaatggcaactaattctaatttttatttattaaatatttggggttttggttttaaagccagaattacggctagcacctagcatttcagcagagggaccattttagaccaaaatgtactgttaatgggtttttttttaaaattaaactacacactatcacacgtaacaacttgccaagacacaaacacacacacacagaacacaaacacaacacattgtggggggcacccagggacccccgagaaaaacgctttcacagaaccaaattgcggtgtggggcgagcgggcccccaagaaggacaaaagcgcgaaccagtgggcaaagacgcgggcccaaagagacaaactcggcgcccaggcaaacggcggcggggctgctcccccaaataaaaaaacgcgcgggcggggaaccgcgcgggcctcggaccaactcccacaaggggctctagagggcacacggggatccatcaacaagggagccaaggagagcaataaacgcgagccggggggtaggggatgc

SEQ ID NO: 49287 - DNA, 2197 bp, Homo sapiens
aggagggaggcggcgctggcggggggcgctgcgggcgctcatggcggcggccgccgggtaaggcgggcgcagcgcctcaagggagcggccggggccggcgggcctggcgccgcggtgtccgcggcagcgccgccctgagccggagaagctttcccgggcaacaggatgctccagaccttgtatgattacttctggtgggaacgtctgtggctgcctgtgaacttgacctgggccgatctagaagaccgagatggacgtgtctacgccaaagcctcagatctctatatcacgctgcccctggccttgctcttcctcatcgttcgatacttctttgagctgtacgtggctacaccactggctgccctcttgaacataaaggagaaaactcggctgcgggcacctcccaacgccaccttggaacatttctacctgaccagtggcaagcagcccaagcaggtggaagtagagcttttgtcccggcagagcgggctctctggccgccaggtagagcgttggttccgtcgccgccgcaaccaggaccggcccagtctcctcaagaagttccgagaagccagctggagattcacattttacctgattgccttcattgccggcatggccgtcattgtggataaaccctggttctatgacatgaagaaagtttgggagggatatcccatacagagcactatcccttcccagtattggtactacatgattgaactttccttctactggtccctgctcttcagcattgcctctgatgtcaagcgaaaggatttcaaggaacagatcatccaccatgtggccaccatcattctcatcagcttttcctggtttgccaattacatccgagctgggactctaatcatggctctgcatgactcttccgattacctgctggagtcagccaagatgtttaactacgcgggatggaagaacacctgcaacaacatcttcatcgtcttcgccattgtttttatcatcacccgactggtcatcctgcccttctggatcctgcattgcaccctggtgtacccactggagctctatcctgccttctttggctattacttcttcaattccatgatgggagttctacagctgctgcatatcttctgggcctacctcattttgcgcatggcccacaagttcataactggaaagctggtagaagatgaacgcagtgaccgggaagaaacagagagctcagagggggaggaggctgcagctgggggaggagcaaagagccggcccctagccaatggccaccccatcctcaataacaaccatcgtaagaatgactgaaccattattccagctgcctcccagattaatgcataaagccaaggaactaccccgctccctgcgctatagggtcactttaagctctggggaaaaaggagaaagtgagaggagagttctctgcatcctccctccttgcttgtcacccagttgcctttaaaccaaattctaaccagcctatccccaggtagggggacgttggttatattctgttagagggggacggtcgtattttcctccctacccgccaagtcatcctttctactgcttttgaggccctccctcagctctctgtgggtaggggttacaattcacattccttattctgagaatttggccccagctgtttgcctttgactccctgacctccagagccagggttgtgccttattgtcccatctgtgggcctcattctgccaaagctggaccaaggctaacctttctaagctccctaacttgggccagaaaccaaagctgagcttttaactttctccctctatgacacaaatgaattgagggtaggaggagggtgcacataacccttaccctacctctgccaaaaagtgggggctgtactggggactgctcggatgatctttcttagtgctacttctttcagctgtccctgtagcgacaggtctaagatctgactgcctcctcctttctctggcctcttcccccttccctcttctcttcagctaggctagctggtttggagtagaatggcaactaattctaatttttatttattaaatatttggggttttggttttaaagccagaattacggctagcacctagcatttcagcagagggaccattttagaccaaaatgtactgttaatgggtttttttttaaaattaaaagattaaataaaaaatattaaataaaa

SEQ ID NO: 49288 - DNA, 2216 bp, Homo sapiens
gggaacacagaaaagaaagaacaaaaaacgcaggccgggaccgggccggaatgcccgggacaggcctcggggcctcggagcaaccacccgagcagacggagtacacggagcagcggccccggccccgccaacgctgccgccggctactccctcttgatgccctcccctttgcccctcactcaggatgctccagaccttgtatgattacttctggtgggaacgtctgtggctgcctgtgaacttgacctgggccgatctagaagaccgagatggacgtgtctacgccaaagcctcagatctctatatcacgctgcccctggccttgctcttcctcatcgttcgatacttctttgagctgtacgtggctacaccactggctgccctcttgaacataaaggagaaaactcggctgcgggcacctcccaacgccaccttggaacatttctacctgaccagtggcaagcagcccaagcaggtggaagtagagcttttgtcccggcagagcgggctctctggccgccaggtagagcgttggttccgtcgccgccgcaaccaggaccggcccagtctcctcaagaagttccgagaagccagctggagattcacattttacctgattgccttcattgccggcatggccgtcattgtggataaaccctggttctatgacatgaagaaagtttgggagggatatcccatacagagcactatcccttcccagtattggtactacatgattgaactttccttctactggtccctgctcttcagcattgcctctgatgtcaagcgaaaggatttcaaggaacagatcatccaccatgtggccaccatcattctcatcagcttttcctggtttgccaattacatccgagctgggactctaatcatggctctgcatgactcttccgattacctgctggagtcagccaagatgtttaactacgcgggatggaagaacacctgcaacaacatcttcatcgtcttcgccattgtttttatcatcacccgactggtcatcctgcccttctggatcctgcattgcaccctggtgtacccactggagctctatcctgccttctttggctattacttcttcaattccatgatgggagttctacagctgctgcatatcttctgggcctacctcattttgcgcatggcccacaagttcataactggaaagctggtagaagatgaacgcagtgaccgggaagaaacagagagctcagagggggaggaggctgcagctgggggaggagcaaagagccggcccctagccaatggccaccccatcctcaataacaaccatcgtaagaatgactgaaccattattccagctgcctcccagattaatgcataaagccaaggaactaccccgctccctgcgctatagggtcactttaagctctggggaaaaaggagaaagtgagaggagagttctctgcatcctccctccttgcttgtcacccagttgcctttaaaccaaattctaaccagcctatccccaggtagggggacgttggttatattctgttagagggggacggtcgtattttcctccctacccgccaagtcatcctttctactgcttttgaggccctccctcagctctctgtgggtaggggttacaattcacattccttattctgagaatttggccccagctgtttgcctttgactccctgacctccagagccagggttgtgccttattgtcccatctgtgggcctcattctgccaaagctggaccaaggctaacctttctaagctccctaacttgggccagaaaccaaagctgagcttttaactttctccctctatgacacaaatgaattgagggtaggaggagggtgcacataacccttaccctacctctgccaaaaagtgggggctgtactggggactgctcggatgatctttcttagtgctacttctttcagctgtccctgtagcgacaggtctaagatctgactgcctcctcctttctctggcctcttcccccttccctcttctcttcagctaggctagctggtttggagtagaatggcaactaattctaatttttatttattaaatatttggggttttggttttaaagccagaattacggctagcacctagcatttcagcagagggaccattttagaccaaaatgtactgttaatgggtttttttttaaaattaaaagattaaataaaaaatattaaataaaa

SEQ ID NO: 49289 - DNA, 2472 bp, Homo sapiens
ttttttttttcccggctgggctcgggctcagctcgactgggctcggcgggcggcggcggcggcgccggcggctggcggaggagggagggcgagggcgggcgcgggccggcgggcgggcggaagagggaggagaggcgcggggagccaggcctcggggcctcggagcaaccacccgagcagacggagtacacggagcagcggccccggccccgccaacgctgccgccgggatgctccagaccttgtatgattacttctggtgggaacgtctgtggctgcctgtgaacttgacctgggccgatctagaagaccgagatggacgtgtctacgccaaagcctcagatctctatatcacgctgcccctggccttgctcttcctcatcgttcgatacttctttgagctgtacgtggctacaccactggctgccctcttgaacataaaggagaaaactcggctgcgggcacctcccaacgccaccttggaacatttctacctgaccagtggcaagcagcccaagcaggtggaagtagagcttttgtcccggcagagcgggctctctggccgccaggtagagcgttggttccgtcgccgccgcaaccaggaccggcccagtctcctcaagaagttccgagaagccagctggagattcacattttacctgattgccttcattgccggcatggccgtcattgtggataaaccctggttctatgacatgaagaaagtttgggagggatatcccatacagagcactatcccttcccagtattggtactacatgattgaactttccttctactggtccctgctcttcagcattgcctctgatgtcaagcgaaaggatttcaaggaacagatcatccaccatgtggccaccatcattctcatcagcttttcctggtttgccaattacatccgagctgggactctaatcatggctctgcatgactcttccgattacctgctggaggtcaggcttcctcaaatctagagaccctggtgcaggttcttctgtccctttggttttctttgggagggaggtgcggggtgggaatttggaggatgacattcctgggaccaaggaggagggcacagagtcagtgctcctaactggagtgtacatatgaatgtactcgagggagtcaggagcccatgatgatggatgggggctctctatgcagtcagccaagatgtttaactacgcgggatggaagaacacctgcaacaacatcttcatcgtcttcgccattgtttttatcatcacccgactggtcatcctgcccttctggatcctgcattgcaccctggtgtacccactggagctctatcctgccttctttggctattacttcttcaattccatgatgggagttctacagctgctgcatatcttctgggcctacctcattttgcgcatggcccacaagttcataactggaaagctggtagaagatgaacgcagtgaccgggaagaaacagagagctcagagggggaggaggctgcagctgggggaggagcaaagagccggcccctagccaatggccaccccatcctcaataacaaccatcgtaagaatgactgaaccattattccagctgcctcccagattaatgcataaagccaaggaactaccccgctccctgcgctatagggtcactttaagctctggggaaaaaggagaaagtgagaggagagttctctgcatcctccctccttgcttgtcacccagttgcctttaaaccaaattctaaccagcctatccccaggtagggggacgttggttatattctgttagagggggacggtcgtattttcctccctacccgccaagtcatcctttctactgcttttgaggccctccctcagctctctgtgggtaggggttacaattcacattccttattctgagaatttggccccagctgtttgcctttgactccctgacctccagagccagggttgtgccttattgtcccatctgtgggcctcattctgccaaagctggaccaaggctaacctttctaagctccctaacttgggccagaaaccaaagctgagcttttaactttctccctctatgacacaaatgaattgagggtaggaggagggtgcacataacccttaccctacctctgccaaaaagtgggggctgtactggggactgctcggatgatctttcttagtgctacttctttcagctgtccctgtagcgacaggtctaagatctgactgcctcctcctttctctggcctcttcccccttccctcttctcttcagctaggctagctggtttggagtagaatggcaactaattctaatttttatttattaaatatttggggttttggttttaaagccagaattacggctagcacctagcatttcagcagagggaccattttagaccaaaatgtactgttaatgggtttttttttaaaattaaaagattaaataaaaaatattaaataaaa

SEQ ID NO: 49290 - DNA, 2288 bp, Homo sapiens
ttttttttttcccggctgggctcgggctcagctcgactgggctcggcgggcggcggcggcggcgccggcggctggcggaggagggagggcgagggcgggcgcgggccggcgggcgggcggaagagggaggagaggcgcggggagccaggcctcggggcctcggagcaaccacccgagcagacggagtacacggagcagcggccccggccccgccaacgctgccgccgggatgctccagaccttgtatgattacttctggtgggaacgtctgtggctgcctgtgaacttgacctgggccgatctagaagaccgagatggacgtgtctacgccaaagcctcagatctctatatcacgctgcccctggccttgctcttcctcatcgttcgatacttctttgagctgtacgtggctacaccactggctgccctcttgaacataaaggagaaaactcggctgcgggcacctcccaacgccaccttggaacatttctacctgaccagtggcaagcagcccaagcaggtggaagtagagcttttgtcccggcagagcgggctctctggccgccaggtagagcgttggttccgtcgccgccgcaaccaggaccggcccagtctcctcaagaagttccgagaagccagctggagattcacattttacctgattgccttcattgccggcatggccgtcattgtggataaaccctggttctatgacatgaagaaagtttgggagggatatcccatacagagcactatcccttcccagtattggtactacatgattgaactttccttctactggtccctgctcttcagcattgcctctgatgtcaagcgaaaggatttcaaggaacagatcatccaccatgtggccaccatcattctcatcagcttttcctggtttgccaattacatccgagctgggactctaatcatggctctgcatgactcttccgattacctgctggagtcagccaagatgtttaactacgcgggatggaagaacacctgcaacaacatcttcatcgtcttcgccattgtttttatcatcacccgactggtcatcctgcccttctggatcctgcattgcaccctggtgtacccactggagctctatcctgccttctttggctattacttcttcaattccatgatgggagttctacagctgctgcatatcttctgggcctacctcattttgcgcatggcccacaagttcataactggaaagctggtagaagatgaacgcagtgaccgggaagaaacagagagctcagagggggaggaggctgcagctgggggaggagcaaagagccggcccctagccaatggccaccccatcctcaataacaaccatcgtaagaatgactgaaccattattccagctgcctcccagattaatgcataaagccaaggaactaccccgctccctgcgctatagggtcactttaagctctggggaaaaaggagaaagtgagaggagagttctctgcatcctccctccttgcttgtcacccagttgcctttaaaccaaattctaaccagcctatccccaggtagggggacgttggttatattctgttagagggggacggtcgtattttcctccctacccgccaagtcatcctttctactgcttttgaggccctccctcagctctctgtgggtaggggttacaattcacattccttattctgagaatttggccccagctgtttgcctttgactccctgacctccagagccagggttgtgccttattgtcccatctgtgggcctcattctgccaaagctggaccaaggctaacctttctaagctccctaacttgggccagaaaccaaagctgagcttttaactttctccctctatgacacaaatgaattgagggtaggaggagggtgcacataacccttaccctacctctgccaaaaagtgggggctgtactggggactgctcggatgatctttcttagtgctacttctttcagctgtccctgtagcgacaggtctaagatctgactgcctcctcctttctctggcctcttcccccttccctcttctcttcagctaggctagctggtttggagtagaatggcaactaattctaatttttatttattaaatatttggggttttggttttaaagccagaattacggctagcacctaagattaaataaaaaatattaaataaaacatggcaataagtgtcagactattaggaattgagaagggggatcaactaaataaacgaagagagtctttcttaaaacaccaccaacacacaag

SEQ ID NO: 49291 - DNA, 1882 bp, Homo sapiens
gtgggggtggactaagacacaccctagtgaagagacggtttgtggaatccatggcagagggattagagtgatggaatgaagaacctcaggggctagggggtttgtggagtggggacacccttgcggctggttgctcttacctctctctcctctcccagagcactatcccttcccagtattggtactacatgattgaactttccttctactggtccctgctcttcagcattgcctctgatgtcaagcgaaaggatttcaaggaacagatcatccaccatgtggccaccatcattctcatcagcttttcctggtttgccaattacatccgagctgggactctaatcatggctctgcatgactcttccgattacctgctggaggtcaggcttcctcaaatctagagaccctggtgcaggttcttctgtccctttggttttctttgggagggaggtgcggggtgggaatttggaggatgacattcctgggaccaaggaggagggcacagagtcagtgctcctaactggagtgtacatatgaatgtactcgagggagtcaggagcccatgatgatggatgggggctctctatgcagtcagccaagatgtttaactacgcgggatggaagaacacctgcaacaacatcttcatcgtcttcgccattgtttttatcatcacccgactggtcatcctgcccttctggatcctgcattgcaccctggtgtacccactggagctctatcctgccttctttggctattacttcttcaattccatgatgggagttctacagctgctgcatatcttctgggcctacctcattttgcgcatggcccacaagttcataactggaaagctggtagaagatgaacgcagtgaccgggaagaaacagagagctcagagggggaggaggctgcagctgggggaggagcaaagagccggcccctagccaatggccaccccatcctcaataacaaccatcgtaagaatgactgaaccattattccagctgcctcccagattaatgcataaagccaaggaactaccccgctccctgcgctatagggtcactttaagctctggggaaaaaggagaaagtgagaggagagttctctgcatcctccctccttgcttgtcacccagttgcctttaaaccaaattctaaccagcctatccccaggtagggggacgttggttatattctgttagagggggacggtcgtattttcctccctacccgccaagtcatcctttctactgcttttgaggccctccctcagctctctgtgggtaggggttacaattcacattccttattctgagaatttggccccagctgtttgcctttgactccctgacctccagagccagggttgtgccttattgtcccatctgtgggcctcattctgccaaagctggaccaaggctaacctttctaagctccctaacttgggccagaaaccaaagctgagcttttaactttctccctctatgacacaaatgaattgagggtaggaggagggtgcacataacccttaccctacctctgccaaaaagtgggggctgtactggggactgctcggatgatctttcttagtgctacttctttcagctgtccctgtagcgacaggtctaagatctgactgcctcctcctttctctggcctcttcccccttccctcttctcttcagctaggctagctggtttggagtagaatggcaactaattctaatttttatttattaaatatttggggttttggttttaaagccagaattacggctagcacctagcatttcagcagagggaccattttagaccaaaatgtactgttaatgggtttttttttaaaattaaaagattaaataaaaaatattaaataaaa

SEQ ID NO: 49292 - DNA, 2058 bp, Homo sapiens
ttttttttttcccggctgggctcgggctcagctcgactgggctcggcgggcggcggcggcggcgccggcggctggcggaggagggagggcgagggcgggcgcgggccggcgggcgggcggaagagggaggagaggcgcggggagccaggcctcggggcctcggagcaaccacccgagcagacggagtacacggagcagcggccccggccccgccaacgctgccgccgggatgctccagaccttgtatgattacttctggtgggaacgtctgtggctgcctgtgaacttgacctgggccgatctagaagaccgagatggacgtgtctacgccaaagcctcagatctctatatcacgctgcccctggccttgctcttcctcatcgttcgatacttctttgagctgtacgtggctacaccactggctgccctcttgaacataaaggagaaaactcggctgcgggcacctcccaacgccaccttggaacatttctacctgaccagtggcaagcagcccaagcaggtggaagtagagcttttgtcccggcagagcgggctctctggccgccaggtagagcgttggttccgtcgccgccgcaaccaggaccggcccagtctcctcaagaagttccgagaagccagctggagattcacattttacctgattgccttcattgccggcatggccgtcattgtggataaaccctggttctatgacatgaagaaagtttgggagggatatcccatacagagcactatcccttcccagtattggtactacatgattgaactttccttctactggtccctgctcttcagcattgcctctgatgtcaagcgaaaggatttcaaggaacagatcatccaccatgtggccaccatcattctcatcagcttttcctggtttgccaattacatccgagctgggactctaatcatggctctgcatgactcttccgattacctgctggagtcagccaagatgtttaactacgcgggatggaagaacacctgcaacaacatcttcatcgtcttcgccattgtttttatcatcacccgactggtcatcctgcccttctggatcctgcattgcaccctggtgtacccactggagctctatcctgccttctttggctattacttcttcaattccatgatgggagttctacagctgctgcatatcttctgggcctacctcattttgcgcatggcccacaagttcataactggaaagctggtagaagatgaacgcagtgaccgggaagaaacagagagctcagagggggaggaggctgcagctgggggaggagcaaagagccggcccctagccaatggccaccccatcctcaataacaaccatcgtaagaatgactgaaccattattccagctgcctcccagattaatgcataaagccaaggaactaccccgctccctgcgctatagggtcactttaagctctggggaaaaaggagaaagtgagaggagagttctctgcatcctccctccttgcttgtcacccagttgcctttaaaccaaattctaaccagcctatccccaggtagggggacgttggttatattctgttagagggggacggtcgtattttcctccctacccgccaagtcatcctttctactgcttttgaggccctccctcagctctctgtgggtaggggttacaattcacattccttattctgagaatttggccccagctgtttgcctttgactccctgacctccagagccagggttgtgccttattgtcccatctgtgggcctcattctgccaaagctggaccaaggctaacctttctaagctccctaacttgggccagaaaccaaagctgagcttttaactttctccctctatgacacaaatgaattgagggtaggaggagggtgcacataacccttaccctacctctgccaaaaagtgggggctgtactggggactgctcggatgatcgcatttcagcagagggaccattttagaccaaaatgtactgttaatgggtttttttttaaaattaaaagattaaataaaaaatattaaataaaa

SEQ ID NO: 49293 - DNA, 2173 bp, Homo sapiens
ttttttttttcccggctgggctcgggctcagctcgactgggctcggcgggcggcggcggcggcgccggcggctggcggaggagggagggcgagggcgggcgcgggccggcgggcgggcggaagagggaggagaggcgcggggagccaggcctcggggcctcggagcaaccacccgagcagacggagtacacggagcagcggccccggccccgccaacgctgccgccgggatgctccagaccttgtatgattacttctggtgggaacgtctgtggctgcctgtgaacttgacctgggccgatctagaagaccgagatggacgtgtctacgccaaagcctcagatctctatatcacgctgcccctggccttgctcttcctcatcgttcgatacttctttgagctgtacgtggctacaccactggctgccctcttgaacataaaggagaaaactcggctgcgggcacctcccaacgccaccttggaacatttctacctgaccagtggcaagcagcccaagcaggtggaagtagagcttttgtcccggcagagcgggctctctggccgccaggtagagcgttggttccgtcgccgccgcaaccaggaccggcccagtctcctcaagaagttccgagaagccagctggagattcacattttacctgattgccttcattgccggcatggccgtcattgtggataaaccctggttctatgacatgaagaaagtttgggagggatatcccatacagagcactatcccttcccagtattggtactacatgattgaactttccttctactggtccctgctcttcagcattgcctctgatgtcaagcgaaaggatttcaaggaacagatcatccaccatgtggccaccatcattctcatcagcttttcctggtttgccaattacatccgagctgggactctaatcatggctctgcatgactcttccgattacctgctggagtcagccaagatgtttaactacgcgggatggaagaacacctgcaacaacatcttcatcgtcttcgccattgtttttatcatcacccgactggtcatcctgcccttctggatcctgcattgcaccctggtgtacccactggagctctatcctgccttctttggctattacttcttcaattccatgatgggagttctacagctgctgcatatcttctgggcctacctcattttgcgcatggcccacaagttcataactggaaagctggtagaagatgaacgcagtgaccgggaagaaacagagagctcagagggggaggaggctgcagctgggggaggagcaaagagccggcccctagccaatggccaccccatcctcaataacaaccatcgtaagaatgactgaaccattattccagctgcctcccagattaatgcataaagccaaggaactaccccgctccctgcgctatagggtcactttaagctctggggaaaaaggagaaagtgagaggagagttctctgcatcctccctccttgcttgtcacccagttgcctttaaaccaaattctaaccagcctatccccaggtagggggacgttggttatattctgttagagggggacggtcgtattttcctccctacccgccaagtcatcctttctactgcttttgaggccctccctcagctctctgtgggtaggggttacaattcacattcctcattctgccaaagctggaccaaggctaacctttctaagctccctaacttgggccagaaaccaaagctgagcttttaactttctccctctatgacacaaatgaattgagggtaggaggagggtgcacataacccttaccctacctctgccaaaaagtgggggctgtactggggactgctcggatgatctttcttagtgctacttctttcagctgtccctgtagcgacaggtctaagatctgactgcctcctcctttctctggcctcttcccccttccctcttctcttcagctaggctagctggtttggagtagaatggcaactaattctaatttttatttattaaatatttggggttttggttttaaagccagaattacggctagcacctagcatttcagcagagggaccattttagaccaaaatgtactgttaatgggtttttttttaaaattaaaagattaaataaaaaatattaaataaaa

SEQ ID NO: 49294 - DNA, 1245 bp, Homo sapiens
tgcactgcaagggtcgacgtactagtaggatcaccccagagtggtaccactgcccttactggatcctgcattgcaccctggtgtacccactggagctctatcctgccttctttggctattacttcttcaattccatgatgggagttctacagctgctgcatatcttctgggcctacctcattttgcgcatggcccacaagttcataactggaaagctggtagaagatgaacgcagtgaccgggaagaaacagagagctcagagggggaggaggctgcagctgggggaggagcaaagagccggcccctagccaatggccaccccatcctcaataacaaccatcgtaagaatgactgaaccattattccagctgcctcccagattaatgcataaagccaaggaactaccccgctccctgcgctatagggtcactttaagctctggggaaaaaggagaaagtgagaggagagttctctgcatcctccctccttgcttgtcacccagttgcctttaaaccaaattctaaccagcctatccccaggtagggggacgttggttatattctgttagagggggacggtcgtattttcctccctacccgccaagtcatcctttctactgcttttgaggccctccctcagctctctgtgggtaggggttacaattcacattccttattctgagaatttggccccagctgtttgcctttgactccctgacctccagagccagggttgtgccttattgtcccatctgtgggcctcattctgccaaagctggaccaaggctaacctttctaagctccctaacttgggccagaaaccaaagctgagcttttaactttctccctctatgacacaaatgaattgagggtaggaggagggtgcacataacccttaccctacctctgccaaaaagtgggggctgtactggggactgctcggatgatctttcttagtgctacttctttcagctgtccctgtagcgacaggtctaagatctgactgcctcctcctttctctggcctcttcccccttccctcttctcttcagctaggctagctggtttggagtagaatggcaactaattctaatttttatttattaaatatttggggttttggttttaaagccagaattacggctagcacctagcatttcagcagagggaccattttagaccaaaatgtactgttaatgggtttttttttaaaattaaaagattaaataaaaaatattaaataaaa

SEQ ID NO: 49295 - DNA, 1854 bp, Homo sapiens
ttttttttttcccggctgggctcgggctcagctcgactgggctcggcgggcggcggcggcggcgccggcggctggcggaggagggagggcgagggcgggcgcgggccggcgggcgggcggaagagggaggagaggcgcggggagccaggcctcggggcctcggagcaaccacccgagcagacggagtacacggagcagcggccccggccccgccaacgctgccgccgggatgctccagaccttgtatgattacttctggtgggaacgtctgtggctgcctgtgaacttgacctgggccgatctagaagaccgagatggacgtgtctacgccaaagcctcagatctctatatcacgctgcccctggccttgctcttcctcatcgttcgatacttctttgagctgtacgtggctacaccactggctgccctcttgaacataaaggagaaaactcggctgcgggcacctcccaacgccaccttggaacatttctacctgaccagtggcaagcagcccaagcaggtggaagtagagcttttgtcccggcagagcgggctctctggccgccaggtagagcgttggttccgtcgccgccgcaaccaggaccggcccagtctcctcaagaagttccgagaagccagctggagattcacattttacctgattgccttcattgccggcatggccgtcattgtggataaaccctggttctatgacatgaagaaagtttgggagggatatcccatacagagcactatcccttcccagtattggtactacatgattgaactttccttctactggtccctgctcttcagcattgcctctgatgtcaagcgaaaggatttcaaggaacagatcatccaccatgtggccaccatcattctcatcagcttttcctggtttgccaattacatccgagctgggactctaatcatggctctgcatgactcttccgattacctgctggagtcagccaagatgtttaactacgcgggatggaagaacacctgcaacaacatcttcatcgtcttcgccattgtttttatcatcacccgactggtcatcctgcccttctggatcctgcattgcaccctggtgtacccactggagctctatcctgccttctttggctattacttcttcaattccatgatgggagttctacagctgctgcatatcttctgggcctacctcattttgcgcatggcccacaagttcataactggaaagctggtagaagatgaacgcagtgaccgggaagaaacagagagctcagagggggaggaggctgcagctgggggaggagcaaagagccggcccctagccaatggccaccccatcctcaataacaaccatcgtaagaatgactgaaccattattccagctgcctcccagattaatgcataaagccaaggaactaccccgctccctgcgctatagggtcactttaagctctggggaaaaaggagaaagtgagaggagagttctctgcatcctccctccttgcttgtcacccagttgcctttaaaccaaattctaaccagcctatccccaggtagggggacgttggttatattctgttagagggggacggtcgtattttcctccctacccgccaagtcatcctctggcctcttcccccttccctcttctcttcagctaggctagctggtttggagtagaatggcaactaattctaatttttatttattaaatatttggggttttggttttaaagccagaattacggctagcacctagcatttcagcagagggaccattttagaccaaaatgtactgttaatgggtttttttttaaaattaaaagattaaataaaaaatattaaataaaa

SEQ ID NO: 49296 - DNA, 1349 bp, Homo sapiens
ttttttttttcccggctgggctcgggctcagctcgactgggctcggcgggcggcggcggcggcgccggcggctggcggaggagggagggcgagggcgggcgcgggccggcgggcgggcggaagagggaggagaggcgcggggagccaggcctcggggcctcggagcaaccacccgagcagacggagtacacggagcagcggccccggccccgccaacgctgccgccgggatgctccagaccttgtatgattacttctggtgggaacgtctgtggctgcctgtgaacttgacctgggccgatctagaagaccgagatggacgtgtctacgccaaagcctcagatctctatatcacgctgcccctggccttgctcttcctcatcgttcgatacttctttgagctgtacgtggctacaccactggctgccctcttgaacataaaggagaaaactcggctgcgggcacctcccaacgccaccttggaacatttctacctgaccagtggcaagcagcccaagcaggtggaagtagagcttttgtcccggcagagcgggctctctggccgccaggtagagcgttggttccgtcgccgccgcaaccaggaccggcccagtctcctcaagaagttccgagaagccagctggagattcacattttacctgattgccttcattgccggcatggccgtcattgtggataaaccctggttctatgacatgaagaaagtttgggagggatatcccatacagagcactatcccttcccagtattggtactacatgattgaactttccttctactggtccctgctcttcagcattgcctctgatgtcaagcgaaaggatttcaaggaacagatcatccaccatgtggccaccatcattctcatcagcttttcctggtttgccaattacatccgagctgggactctaatcatggctctgcatgactcttccgattacctgctggagtcagccaagatgtttaactacgcgggatggaagaacacctgcaacaacatcttcatcgtcttcgccattgtttttatcatcacccgactggtcatcctgcccttctggatcctgcattgcaccctggtgtacccactggagctctatcctgcctttcgtttggtttactctgtactctcttcactgcacgacgtcactcagtacatataacacaagagatggacattagtgggatcgcgtttgaggtacaaggagctgcagcctaaatggtgaggagatgagccctcaaacagttcctcgactattttaagacagagcacaaagttagagactcaccatgctgtgcccagggcgtgtccatgctctattcctcttcatg

SEQ ID NO: 49297 - DNA, 761 bp, Homo sapiens
gggaacacagaaaagaaagaacaaaaaacgcaggccgggaccgggccggaatgcccgggacaggcctcggggcctcggagcaaccacccgagcagacggagtacacggagcagcggccccggccccgccaacgctgccgccggctactccctcttgatgccctcccctttgcccctcactcaggatgctccagaccttgtatgattacttctggtgggaacgtctgtggctgcctgtgaacttgacctgggccgatctagaagaccgagatggacgtgtctacgccaaagcctcagatctctatatcacgctgcccctggccttgctcttcctcatcgttcgatacttctttgagctgtaagcatgccagcctaccctcatgccttcccctgttgccagttgcagtttcttggacttcaagtttgttccttgctgtttaattagcccttgaccctgatgttctggctactcaggttcctgcccactgtgcaccccctcccctgaaggcaccattgtcttcctgaaggctcagcacccccaggccctttccatcaatggttatttgttctcaccctctacccgccgcccgcctggccactagtgaacacacaggcagctttgtcagctgtgggcagccctggaggctagagaaaagggggttgccaggaagctggggaaactgaggccagggtaaagttgccttagcttgcagccctttcccttcccagcaagctagataccttactcatatcccttcccca

SEQ ID NO: 49298 - DNA, 2087 bp, Homo sapiens
ttttttttttcccggctgggctcgggctcagctcgactgggctcggcgggcggcggcggcggcgccggcggctggcggaggagggagggcgagggcgggcgcgggccggcgggcgggcggaagagggaggagaggcgcggggagccaggcctcggggcctcggagcaaccacccgagcagacggagtacacggagcagcggccccggccccgccaacgctgccgccgggtacgtggctacaccactggctgccctcttgaacataaaggagaaaactcggctgcgggcacctcccaacgccaccttggaacatttctacctgaccagtggcaagcagcccaagcaggtggaagtagagcttttgtcccggcagagcgggctctctggccgccaggtagagcgttggttccgtcgccgccgcaaccaggaccggcccagtctcctcaagaagttccgagaagccagctggagattcacattttacctgattgccttcattgccggcatggccgtcattgtggataaaccctggttctatgacatgaagaaagtttgggagggatatcccatacagagcactatcccttcccagtattggtactacatgattgaactttccttctactggtccctgctcttcagcattgcctctgatgtcaagcgaaaggatttcaaggaacagatcatccaccatgtggccaccatcattctcatcagcttttcctggtttgccaattacatccgagctgggactctaatcatggctctgcatgactcttccgattacctgctggagtcagccaagatgtttaactacgcgggatggaagaacacctgcaacaacatcttcatcgtcttcgccattgtttttatcatcacccgactggtcatcctgcccttctggatcctgcattgcaccctggtgtacccactggagctctatcctgccttctttggctattacttcttcaattccatgatgggagttctacagctgctgcatatcttctgggcctacctcattttgcgcatggcccacaagttcataactggaaagctggtagaagatgaacgcagtgaccgggaagaaacagagagctcagagggggaggaggctgcagctgggggaggagcaaagagccggcccctagccaatggccaccccatcctcaataacaaccatcgtaagaatgactgaaccattattccagctgcctcccagattaatgcataaagccaaggaactaccccgctccctgcgctatagggtcactttaagctctggggaaaaaggagaaagtgagaggagagttctctgcatcctccctccttgcttgtcacccagttgcctttaaaccaaattctaaccagcctatccccaggtagggggacgttggttatattctgttagagggggacggtcgtattttcctccctacccgccaagtcatcctttctactgcttttgaggccctccctcagctctctgtgggtaggggttacaattcacattccttattctgagaatttggccccagctgtttgcctttgactccctgacctccagagccagggttgtgccttattgtcccatctgtgggcctcattctgccaaagctggaccaaggctaacctttctaagctccctaacttgggccagaaaccaaagctgagcttttaactttctccctctatgacacaaatgaattgagggtaggaggagggtgcacataacccttaccctacctctgccaaaaagtgggggctgtactggggactgctcggatgatctttcttagtgctacttctttcagctgtccctgtagcgacaggtctaagatctgactgcctcctcctttctctggcctcttcccccttccctcttctcttcagctaggctagctggtttggagtagaatggcaactaattctaatttttatttattaaatatttggggttttggttttaaagccagaattacggctagcacctagcatttcagcagagggaccattttagaccaaaatgtactgttaatgggtttttttttaaaattaaaagattaaataaaaaatattaaataaaa

SEQ ID NO: 49299 - DNA, 2236 bp, Homo sapiens
  misc_feature (16)..(16): n is a, c, g, or t
  misc_feature (23)..(23): n is a, c, g, or t
tcaggctggtaccccncgagtantgggatatcgtcgaccacggcggctggcggaggagggagggcgagggcgggcgcgggccggcgggcgggcggaagagggaggagaggcgcggggagccaggcctcggggcctcggagcaaccacccgagcagacggagtacacggagcagcggccccggccccgccaacgctgccgccgggatgctccagaccttgtatgattacttctggtgggaacgtctgtggctgcctgtgaacttgacctgggccgatctagaagaccgagatggacgtgtctacgccaaagcctcagatctctatatcacgctgcccctggccttgctcttcctcatcgttcgatacttctttgagctgtacgtggctacaccactggctgccctcttgaacataaaggagaaaactcggctgcgggcacctcccaacgccaccttggaacatttctacctgaccagtggcaagcagcccaagcaggtggaagtagagcttttgtcccggcagagcgggctctctggccgccaggtagagcgttggttccgtcgccgccgcaaccaggaccggcccagtctcctcaagaagttccgagaagccagctggagattcacattttacctgattgccttcattgccggcatggccgtcattgtggataaaccctggttctatgacatgaagaaagtttgggagggatatcccatacagagcactatcccttcccagtattggtactacatgattgaactttccttctactggtccctgctcttcagcattgcctctgatgtcaagcgaaaggatttcaaggaacagatcatccaccatgtggccaccatcattctcatcagcttttcctggtttgccaattacatccgagctgggactctaatcatggctctgcatgactcttccgattacctgctggagtcagccaagatgtttaactacgcgggatggaagaacacctgcaacaacatcttcatcgtcttcgccattgtttttatcatcacccgactggtcatcctgcccttctggatcctgcattgcaccctggtgtacccactggagctctatcctgccttctttggctattacttcttcaattccatgatgggagttctacagctgctgcatatcttctgggcctacctcattttgcgcatggcccacaagttcataactggaaagctggtagaagatgaacgcagtgaccgggaagaaacagagagctcagagggggaggaggctgcagctgggggaggagcaaagagccggcccctagccaatggccaccccatcctcaataacaaccatcgtaagaatgactgaaccattattccagctgcctcccagattaatgcataaagccaaggaactaccccgctccctgcgctatagggtcactttaagctctggggaaaaaggagaaagtgagaggagagttctctgcatcctccctccttgcttgtcacccagttgcctttaaaccaaattctaaccagcctatccccaggtagggggacgttggttatattctgttagagggggacggtcgtattttcctccctacccgccaagtcatcctttctactgcttttgaggccctccctcagctctctgtgggtaggggttacaattcacattccttattctgagaatttggccccagctgtttgcctttgactccctgacctccagagccagggttgtgccttattgtcccatctgtgggcctcattctgccaaagctggaccaaggctaacctttctaagctccctaacttgggccagaaaccaaagctgagcttttaactttctccctctatgacacaaatgaattgagggtaggaggagggtgcacataacccttaccctacctctgccaaaaagtgggggctgtactggggactgctcggatgatctttcttagtgctacttctttcagctgtccctgtagcgacaggtctaagatctgactgcctcctcctttctctggcctcttcccccttccctcttctcttcagctaggctagctggtttggagtagaatggcaactaattctaatttttatttattaaatatttggggttttggttttaaagccagaattacggctagcacctagcatttcagcagagggaccattttagaccaaaatgtactgttaatgggtttttttttaaaattaaaagattaaataaaaaatattaaataaaa

SEQ ID NO: 49300 - DNA, 2176 bp, Homo sapiens
gggaacacagaaaagaaagaacaaaaaacgcaggccgggaccgggccggaatgcccgggacaggcctcggggcctcggagcaaccacccgagcagacggagtacacggagcagcggccccggccccgccaacgctgccgccgggatgctccagaccttgtatgattacttctggtgggaacgtctgtggctgcctgtgaacttgacctgggccgatctagaagaccgagatggacgtgtctacgccaaagcctcagatctctatatcacgctgcccctggccttgctcttcctcatcgttcgatacttctttgagctgtacgtggctacaccactggctgccctcttgaacataaaggagaaaactcggctgcgggcacctcccaacgccaccttggaacatttctacctgaccagtggcaagcagcccaagcaggtggaagtagagcttttgtcccggcagagcgggctctctggccgccaggtagagcgttggttccgtcgccgccgcaaccaggaccggcccagtctcctcaagaagttccgagaagccagctggagattcacattttacctgattgccttcattgccggcatggccgtcattgtggataaaccctggttctatgacatgaagaaagtttgggagggatatcccatacagagcactatcccttcccagtattggtactacatgattgaactttccttctactggtccctgctcttcagcattgcctctgatgtcaagcgaaaggatttcaaggaacagatcatccaccatgtggccaccatcattctcatcagcttttcctggtttgccaattacatccgagctgggactctaatcatggctctgcatgactcttccgattacctgctggagtcagccaagatgtttaactacgcgggatggaagaacacctgcaacaacatcttcatcgtcttcgccattgtttttatcatcacccgactggtcatcctgcccttctggatcctgcattgcaccctggtgtacccactggagctctatcctgccttctttggctattacttcttcaattccatgatgggagttctacagctgctgcatatcttctgggcctacctcattttgcgcatggcccacaagttcataactggaaagctggtagaagatgaacgcagtgaccgggaagaaacagagagctcagagggggaggaggctgcagctgggggaggagcaaagagccggcccctagccaatggccaccccatcctcaataacaaccatcgtaagaatgactgaaccattattccagctgcctcccagattaatgcataaagccaaggaactaccccgctccctgcgctatagggtcactttaagctctggggaaaaaggagaaagtgagaggagagttctctgcatcctccctccttgcttgtcacccagttgcctttaaaccaaattctaaccagcctatccccaggtagggggacgttggttatattctgttagagggggacggtcgtattttcctccctacccgccaagtcatcctttctactgcttttgaggccctccctcagctctctgtgggtaggggttacaattcacattccttattctgagaatttggccccagctgtttgcctttgactccctgacctccagagccagggttgtgccttattgtcccatctgtgggcctcattctgccaaagctggaccaaggctaacctttctaagctccctaacttgggccagaaaccaaagctgagcttttaactttctccctctatgacacaaatgaattgagggtaggaggagggtgcacataacccttaccctacctctgccaaaaagtgggggctgtactggggactgctcggatgatctttcttagtgctacttctttcagctgtccctgtagcgacaggtctaagatctgactgcctcctcctttctctggcctcttcccccttccctcttctcttcagctaggctagctggtttggagtagaatggcaactaattctaatttttatttattaaatatttggggttttggttttaaagccagaattacggctagcacctagcatttcagcagagggaccattttagaccaaaatgtactgttaatgggtttttttttaaaattaaaagattaaataaaaaatattaaataaaa

SEQ ID NO: 49301 - DNA, 2354 bp, Homo sapiens
ttttttttttcccggctgggctcgggctcagctcgactgggctcggcgggcggcggcggcggcgccggcggctggcggaggagggagggcgagggcgggcgcgggccggcgggcgggcggaagagggaggagaggcgcggggagccaggcctcggggcctcggagcaaccacccgagcagacggagtacacggagcagcggccccggccccgccaacgctgccgccgggatgctccagaccttgtatgattacttctggtgggaacgtctgtggctgcctgtgaacttgacctgggccgatctagaagaccgagatggacgtgtctacgccaaagcctcagatctctatatcacgctgcccctggccttgctcttcctcatcgttcgatacttctttgagctgtacgtggctacaccactggctgccctcttgaacataaaggagaaaactcggctgcgggcacctcccaacgccaccttggaacatttctacctgaccagtggcaagcagcccaagcaggtggaagtagagcttttgtcccggcagagcgggctctctggccgccaggtagagcgttggttccgtcgccgccgcaaccaggaccggcccagtctcctcaagaagttccgagaagccagctggagattcacattttacctgattgccttcattgccggcatggccgtcattgtggataaaccctggttctatgacatgaagaaagtttgggagggatatcccatacagagcactatcccttcccagtattggtactacatgattgaactttccttctactggtccctgctcttcagcattgcctctgatgtcaagcgaaaggatttcaaggaacagatcatccaccatgtggccaccatcattctcatcagcttttcctggtttgccaattacatccgagctgggactctaatcatggctctgcatgactcttccgattacctgctggagtcagccaagatgtttaactacgcgggatggaagaacacctgcaacaacatcttcatcgtcttcgccattgtttttatcatcacccgactggtcatcctgcccttctggatcctgcattgcaccctggtgtacccactggagctctatcctgccttctttggctattacttcttcaattccatgatgggagttctacagctgctgcatatcttctgggcctacctcattttgcgcatggcccacaagttcataactggaaagctggtagaagatgaacgcagtgaccgggaagaaacagagagctcagagggggaggaggctgcagctgggggaggagcaaagagccggcccctagccaatggccaccccatcctcaataacaaccatcgtaagaatgactgaaccattattccagctgcctcccagattaatgcataaagccaaggaactaccccgctccctgcgctatagggtcactttaagctctggggaaaaaggagaaagtgagaggagagttctctgcatcctccctccttgcttgtcacccagttgcctttaaaccaaattctaaccagcctatccccaggtagggggacgttggttatattctgttagagggggacggtcgtattttcctccctacccgccaagtcatcctttctactgcttttgaggccctccctcagctctctgtgggtaggggttacaattcacattccttattctgagaatttggccccagctgtttgcctttgactccctgacctccagagccagggttgtgccttattgtcccatctgtgggcctcattctgccaaagctggaccaaggctaacctttctaagctccctaacttgggccagaaaccaaagctgagcttttaactttctccctctatgacacaaatgaattgagggtaggaggagggtgcacataacccttaccctacctctgccaaaaagtgggggctgtactggggactgctcggatgatctttcttagtgctacttctttcagctgtccctgtagcgacaggtctaagatctgactgcctcctcctttctctggcctcttcccccttccctcttctcttcagctaggctagctggtttggagtagaatggcaactaattctaatttttatttattaaatatttggggttttggttttaaagccagaattacggctagcacctagcatttcagcagagggaccattttagaccaaaatgtactgttaatgggtttttttttaaaattaaaagattaaataaaaaatattaaataaaacatggcaataagtgtcagactattaggaattgagaagggggatcaactaaataaacgaagagagtctttcttaaaacaccaccaacacacaag

SEQ ID NO: 49302 - DNA, 2237 bp, Homo sapiens
aggagggaggcggcgctggcggggggcgctgcgggcgctcatggcggcggccgccgggtaaggcgggcgcagcgcctcaagggagcggccggggccggcgggcctggcgccgcggtgtccgcggcagcgccgccctgagccggagaagctttcccgggcaacagctactccctcttgatgccctcccctttgcccctcactcaggatgctccagaccttgtatgattacttctggtgggaacgtctgtggctgcctgtgaacttgacctgggccgatctagaagaccgagatggacgtgtctacgccaaagcctcagatctctatatcacgctgcccctggccttgctcttcctcatcgttcgatacttctttgagctgtacgtggctacaccactggctgccctcttgaacataaaggagaaaactcggctgcgggcacctcccaacgccaccttggaacatttctacctgaccagtggcaagcagcccaagcaggtggaagtagagcttttgtcccggcagagcgggctctctggccgccaggtagagcgttggttccgtcgccgccgcaaccaggaccggcccagtctcctcaagaagttccgagaagccagctggagattcacattttacctgattgccttcattgccggcatggccgtcattgtggataaaccctggttctatgacatgaagaaagtttgggagggatatcccatacagagcactatcccttcccagtattggtactacatgattgaactttccttctactggtccctgctcttcagcattgcctctgatgtcaagcgaaaggatttcaaggaacagatcatccaccatgtggccaccatcattctcatcagcttttcctggtttgccaattacatccgagctgggactctaatcatggctctgcatgactcttccgattacctgctggagtcagccaagatgtttaactacgcgggatggaagaacacctgcaacaacatcttcatcgtcttcgccattgtttttatcatcacccgactggtcatcctgcccttctggatcctgcattgcaccctggtgtacccactggagctctatcctgccttctttggctattacttcttcaattccatgatgggagttctacagctgctgcatatcttctgggcctacctcattttgcgcatggcccacaagttcataactggaaagctggtagaagatgaacgcagtgaccgggaagaaacagagagctcagagggggaggaggctgcagctgggggaggagcaaagagccggcccctagccaatggccaccccatcctcaataacaaccatcgtaagaatgactgaaccattattccagctgcctcccagattaatgcataaagccaaggaactaccccgctccctgcgctatagggtcactttaagctctggggaaaaaggagaaagtgagaggagagttctctgcatcctccctccttgcttgtcacccagttgcctttaaaccaaattctaaccagcctatccccaggtagggggacgttggttatattctgttagagggggacggtcgtattttcctccctacccgccaagtcatcctttctactgcttttgaggccctccctcagctctctgtgggtaggggttacaattcacattccttattctgagaatttggccccagctgtttgcctttgactccctgacctccagagccagggttgtgccttattgtcccatctgtgggcctcattctgccaaagctggaccaaggctaacctttctaagctccctaacttgggccagaaaccaaagctgagcttttaactttctccctctatgacacaaatgaattgagggtaggaggagggtgcacataacccttaccctacctctgccaaaaagtgggggctgtactggggactgctcggatgatctttcttagtgctacttctttcagctgtccctgtagcgacaggtctaagatctgactgcctcctcctttctctggcctcttcccccttccctcttctcttcagctaggctagctggtttggagtagaatggcaactaattctaatttttatttattaaatatttggggttttggttttaaagccagaattacggctagcacctagcatttcagcagagggaccattttagaccaaaatgtactgttaatgggtttttttttaaaattaaaagattaaataaaaaatattaaataaaa

SEQ ID NO: 49303 - DNA, 2205 bp, Homo sapiens
ttttttttttcccggctgggctcgggctcagctcgactgggctcggcgggcggcggcggcggcgccggcggctggcggaggagggagggcgagggcgggcgcgggccggcgggcgggcggaagagggaggagaggcgcggggagccaggcctcggggcctcggagcaaccacccgagcagacggagtacacggagcagcggccccggccccgccaacgctgccgccgggatgctccagaccttgtatgattacttctggtgggaacgtctgtggctgcctgtgaacttgacctgggccgatctagaagaccgagatggacgtgtctacgccaaagcctcagatctctatatcacgctgcccctggccttgctcttcctcatcgttcgatacttctttgagctgtacgtggctacaccactggctgccctcttgaacataaaggagaaaactcggctgcgggcacgtggaagtagagcttttgtcccggcagagcgggctctctggccgccaggtagagcgttggttccgtcgccgccgcaaccaggaccggcccagtctcctcaagaagttccgagaagccagctggagattcacattttacctgattgccttcattgccggcatggccgtcattgtggataaaccctggttctatgacatgaagaaagtttgggagggatatcccatacagagcactatcccttcccagtattggtactacatgattgaactttccttctactggtccctgctcttcagcattgcctctgatgtcaagcgaaaggatttcaaggaacagatcatccaccatgtggccaccatcattctcatcagcttttcctggtttgccaattacatccgagctgggactctaatcatggctctgcatgactcttccgattacctgctggagtcagccaagatgtttaactacgcgggatggaagaacacctgcaacaacatcttcatcgtcttcgccattgtttttatcatcacccgactggtcatcctgcccttctggatcctgcattgcaccctggtgtacccactggagctctatcctgccttctttggctattacttcttcaattccatgatgggagttctacagctgctgcatatcttctgggcctacctcattttgcgcatggcccacaagttcataactggaaagctggtagaagatgaacgcagtgaccgggaagaaacagagagctcagagggggaggaggctgcagctgggggaggagcaaagagccggcccctagccaatggccaccccatcctcaataacaaccatcgtaagaatgactgaaccattattccagctgcctcccagattaatgcataaagccaaggaactaccccgctccctgcgctatagggtcactttaagctctggggaaaaaggagaaagtgagaggagagttctctgcatcctccctccttgcttgtcacccagttgcctttaaaccaaattctaaccagcctatccccaggtagggggacgttggttatattctgttagagggggacggtcgtattttcctccctacccgccaagtcatcctttctactgcttttgaggccctccctcagctctctgtgggtaggggttacaattcacattccttattctgagaatttggccccagctgtttgcctttgactccctgacctccagagccagggttgtgccttattgtcccatctgtgggcctcattctgccaaagctggaccaaggctaacctttctaagctccctaacttgggccagaaaccaaagctgagcttttaactttctccctctatgacacaaatgaattgagggtaggaggagggtgcacataacccttaccctacctctgccaaaaagtgggggctgtactggggactgctcggatgatctttcttagtgctacttctttcagctgtccctgtagcgacaggtctaagatctgactgcctcctcctttctctggcctcttcccccttccctcttctcttcagctaggctagctggtttggagtagaatggcaactaattctaatttttatttattaaatatttggggttttggttttaaagccagaattacggctagcacctagcatttcagcagagggaccattttagaccaaaatgtactgttaatgggtttttttttaaaattaaaagattaaataaaaaatattaaataaaa

SEQ ID NO: 49304 - DNA, 1613 bp, Homo sapiens
atgggaggaggctgcagcttggggaggagcaaagagccggcccctagccaatggccaccccatcctcaataacaaccatcgtaagaatgactgaaccattagcactatcccttcccagtattggtactacatgattgaactttccttctactggtccctgctcttcagcattgcctctgatgtcaagcgaaaggatttcaaggaacagatcatccaccatgtggccaccatcattctcatcagcttttcctggtttgccaattacatccgagctgggactctaatcatggctctgcatgactcttccgattacctgctggagtcagccaagatgtttaactacgcgggatggaagaacacctgcaacaacatcttcatcgtcttcgccattgtttttatcatcacccgactggtcatcctgcccttctggatcctgcattgcaccctggtgtacccactggagctctatcctgccttctttggctattacttcttcaattccatgatgggagttctacagctgctgcatatcttctgggcctacctcattttgcgcatggcccacaagttcataactggaaagctggtagaagatgaacgcagtgaccgggaagaaacagagagctcagagggggaggaggctgcagctgggggaggagcaaagagccggcccctagccaatggccaccccatcctcaataacaaccatcgtaagaatgactgaaccattattccagctgcctcccagattaatgcataaagccaaggaactaccccgctccctgcgctatagggtcactttaagctctggggaaaaaggagaaagtgagaggagagttctctgcatcctccctccttgcttgtcacccagttgcctttaaaccaaattctaaccagcctatccccaggtagggggacgttggttatattctgttagagggggacggtcgtattttcctccctacccgccaagtcatcctttctactgcttttgaggccctccctcagctctctgtgggtaggggttacaattcacattccttattctgagaatttggccccagctgtttgcctttgactccctgacctccagagccagggttgtgccttattgtcccatctgtgggcctcattctgccaaagctggaccaaggctaacctttctaagctccctaacttgggccagaaaccaaagctgagcttttaactttctccctctatgacacaaatgaattgagggtaggaggagggtgcacataacccttaccctacctctgccaaaaagtgggggctgtactggggactgctcggatgatctttcttagtgctacttctttcagctgtccctgtagcgacaggtctaagatctgactgcctcctcctttctctggcctcttcccccttccctcttctcttcagctaggctagctggtttggagtagaatggcaactaattctaatttttatttattaaatatttggggttttggttttaaagccagaattacggctagcacctagcatttcagcagagggaccattttagaccaaaatgtactgttaatgggtttttttttaaaattaaaagattaaataaaaaatattaaataaaa

SEQ ID NO: 49305 - DNA, 2297 bp, Homo sapiens
ttttttttttcccggctgggctcgggctcagctcgactgggctcggcgggcggcggcggcggcgccggcggctggcggaggagggagggcgagggcgggcgcgggccggcgggcgggcggaagagggaggagaggcgcggggagccaggcctcggggcctcggagcaaccacccgagcagacggagtacacggagcagcggccccggccccgccaacgctgccgccgggatgctccagaccttgtatgattacttctggtgggaacgtctgtggctgcctgtgaacttgacctgggccgatctagaagaccgagatggacgtgtctacgccaaagcctcagatctctatatcacgctgcccctggccttgctcttcctcatcgttcgatacttctttgagctgtacgtggctacaccactggctgccctcttgaacataaaggagaaaactcggctgcgggcacctcccaacgccaccttggaacatttctacctgaccagtggcaagcagcccaagcaggtggaagtagagcttttgtcccggcagagcgggctctctggccgccaggtagagcgttggttccgtcgccgccgcaaccaggaccggcccagtctcctcaagaagttccgagaagccagctggagattcacattttacctgattgccttcattgccggcatggccgtcattgtggataaaccctggttctatgacatgaagaaagtttgggagggatatcccatacagagcactatcccttcccagtattggtactacatgattgaactttccttctactggtccctgctcttcagcattgcctctgatgtcaagcgaaaggatttcaaggaacagatcatccaccatgtggccaccatcattctcatcagcttttcctggtttgccaattacatccgagctgggactctaatcatggctctgcatgactcttccgattacctgctggagtcagccaagatgtttaactacgcgggatggaagaacacctgcaacaacatcttcatcgtcttcgccattgtttttatcatcacccgactggtcatcctgcccttctggatcctgcattgcaccctggtgtacccactggagctctatcctgccttctttggctattacttcttcaattccatgatgggagttctacagctgctgcatatcttctgggcctacctcattttgcgcatggcccacaagttcataactggaaagctggtagaagatgaacgcagtgaccgggaagaaacagagagctcagagggggaggaggctgcagctgggggaggagcaaagagccggcccctagccaatggccaccccatcctcaataacaaccatcgtaagaatgactgaaccattattccagctgcctcccagattaatgcataaagccaaggaactaccccgctccctgcgctatagggtcactttaagctctggggaaaaaggagaaagtgagaggagagttctctgcatcctccctccttgcttgtcacccagttgcctttaaaccaaattctaaccagcctatccccaggtagggggacgttggttatattctgttagagggggacggtcgtattttcctccctacccgccaagtcatcctttctactgcttttgaggccctccctcagctctctgtgggtaggggttacaattcacattccttattctgagaatttggccccagctgtttgcctttgactccctgacctccagagccagggttgtgccttattgtcccatctgtgggcctcattctgccaaagctggaccaaggctaacctttctaagctccctaacttgggccagaaaccaaagctgagcttttaactttctccctctatgacacaaatgaattgagggtaggaggagggtgcacataacccttaccctacctctgccatttcttagtgctacttctttcagctgtccctgtagcgacaggtctaagatctgactgcctcctcctttctctggcctcttcccccttccctcttctcttcagctaggctagctggtttggagtagaatggcaactaattctaatttttatttattaaatatttggggttttggttttaaagccagaattacggctagcacctagcatttcagcagagggaccattttagaccaaaatgtactgttaatgggtttttttttaaaattaaaagattaaataaaaaatattaaataaaacatggcaataagtgtcagactattaggaattgagaagggggatcaactaaataaacgaagagagtctttctta

SEQ ID NO: 49306 - DNA, 1299 bp, Homo sapiens
ctgaaactccagtttttatatgtgctacagcgggatggaagaacacctgcaacaacatcttcatcgtcttcgccattgtttttatcatcacccgactggtcatcctgcccttctggatcctgcattgcaccctggtgtacccactggagctctatcctgccttctttggctattacttcttcaattccatgatgggagttctacagctgctgcatatcttctgggcctacctcattttgcgcatggcccacaagttcataactggaaagctggtagaagatgaacgcagtgaccgggaagaaacagagagctcagagggggaggaggctgcagctgggggaggagcaaagagccggcccctagccaatggccaccccatcctcaataacaaccatcgtaagaatgactgaaccattattccagctgcctcccagattaatgcataaagccaaggaactaccccgctccctgcgctatagggtcactttaagctctggggaaaaaggagaaagtgagaggagagttctctgcatcctccctccttgcttgtcacccagttgcctttaaaccaaattctaaccagcctatccccaggtagggggacgttggttatattctgttagagggggacggtcgtattttcctccctacccgccaagtcatcctttctactgcttttgaggccctccctcagctctctgtgggtaggggttacaattcacattccttattctgagaatttggccccagctgtttgcctttgactccctgacctccagagccagggttgtgccttattgtcccatctgtgggcctcattctgccaaagctggaccaaggctaacctttctaagctccctaacttgggccagaaaccaaagctgagcttttaactttctccctctatgacacaaatgaattgagggtaggaggagggtgcacataacccttaccctacctctgccaaaaagtgggggctgtactggggactgctcggatgatctttcttagtgctacttctttcagctgtccctgtagcgacaggtctaagatctgactgcctcctcctttctctggcctcttcccccttccctcttctcttcagctaggctagctggtttggagtagaatggcaactaattctaatttttatttattaaatatttggggttttggttttaaagccagaattacggctagcacctagcatttcagcagagggaccattttagaccaaaatgtactgttaatgggtttttttttaaaattaaaagattaaataaaaaatattaaataaaa

SEQ ID NO: 49307 - DNA, 2035 bp, Homo sapiens
ttttttttttcccggctgggctcgggctcagctcgactgggctcggcgggcggcggcggcggcgccggcggctggcggaggagggagggcgagggcgggcgcgggccggcgggcgggcggaagagggaggagaggcgcggggagccaggcctcggggcctcggagcaaccacccgagcagacggagtacacggagcagcggccccggccccgccaacgctgccgccgggatgctccagaccttgtatgattacttctggtgggaacgtctgtggctgcctgtgaacttgacctgggccgatctagaagaccgagatggacgtgtctacgccaaagcctcagatctctatatcacgctgcccctggccttgctcttcctcatcgttcgatacttctttgagctgtacgtggctacaccactggctgccctcttgaacataaaggagaaaactcggctgcgggcacctcccaacgccaccttggaacatttctacctgaccagtggcaagcagcccaagcaggtggaagtagagcttttgtcccggcagagcgggctctctggccgccaggtagagcgttggttccgtcgccgccgcaaccaggaccggcccagtctcctcaagaagttccgagaagccagctggagattcacattttacctgattgccttcattgccggcatggccgtcattgtggataaaccctggttctatgacatgaagaaagtttgggagggatatcccatacagagcactatcccttcccagtattggtactacatgattgaactttccttctactggtccctgctcttcagcattgcctctgatgtcaagcgaaaggatttcaaggaacagatcatccaccatgtggccaccatcattctcatcagcttttcctggtttgccaattacatccgagctgggactctaatcatggctctgcatgactcttccgattacctgctggagtcagccaagatgtttaactacgcgggatggaagaacacctgcaacaacatcttcatcgtcttcgccattgtttttatcatcacccgactggtcatcctgcccttctggatcctgcattgcaccctggtgtacccactggagctctatcctgccttctttggctattacttcttcaattccatgatgggagttctacagctgctgcatatcttctgggcctacctcattttgcgcatggcccacaagttcataactggaaagctggtagaagatgaacgcagtgaccgggaagaaacagagagctcagagggggaggaggctgcagctgggggaggagcaaagagccggcccctagccaatggccaccccatcctcaataacaaccatcgtaagaatgactgaaccattattccagctgcctcccagattaatgcataaagccaaggaactaccccgctccctgcgctatagggtcactttaagctctggggaaaaaggagaaagtgagaggagagttctctgcatcctccctccttgcttgtcacccagttgcctttaaaccaaattctaaccagcctatccccaggtagggggacgttggttatattctgttagagggggacggtcgtattttcctccctacccgccaagtcatcctttctactgcttttgaggccctccctcagctctctgtgggtaggggttacaattcacattccttattctgagaatttggccccagctgtttgcctttgactccctgacctccagagccagggttgtgccttattgtcccatctgtgggcctcattctgccaaagctggaccaaggctaacctctggcctcttcccccttccctcttctcttcagctaggctagctggtttggagtagaatggcaactaattctaatttttatttattaaatatttggggttttggttttaaagccagaattacggctagcacctagcatttcagcagagggaccattttagaccaaaatgtactgttaatgggtttttttttaaaattaaaagattaaataaaaaatattaaataaaa

SEQ ID NO: 49308 - DNA, 1674 bp, Homo sapiens
ttttttttttcccggctgggctcgggctcagctcgactgggctcggcgggcggcggcggcggcgccggcggctggcggaggagggagggcgagggcgggcgcgggccggcgggcgggcggaagagggaggagaggcgcggggagccaggcctcggggcctcggagcaaccacccgagcagacggagtacacggagcagcggccccggccccgccaacgctgccgccgggatgctccagaccttgtatgattacttctggtgggaacgtctgtggctgcctgtgaacttgacctgggccgatctagaagaccgagatggacgtgtctacgccaaagcctcagatctctatatcacgctgcccctggccttgctcttcctcatcgttcgatacttctttgagctgtacgtggctacaccactggctgccctcttgaacataaaggagaaaactcggctgcgggcacctcccaacgccaccttggaacatttctacctgaccagtggcaagcagcccaagcaggtggaagtagagcttttgtcccggcagagcgggctctctggccgccaggtagagcgttggttccgtcgccgccgcaaccaggaccggcccagtctcctcaagaagttccgagaagccagctggagattcacattttacctgattgccttcattgccggcatggccgtcattgtggataaaccctggttctatgacatgaagaaagtttgggagggatatcccatacagagcactatcccttcccagtattggtactacatgattgaactttccttctactggtccctgctcttcagcattgcctctgatgtcaagcgaaaggatttcaaggaacagatcatccaccatgtggccaccatcattctcatcagcttttcctggtttgccaattacatccgagctgggactctaatcatggctctgcatgactcttccgattacctgctggagtcagccaagatgtttaactacgcgggatggaagaacacctgcaacaacatcttcatcgtcttcgccattgtttttatcatcacccgactggtcatcctgcccttctggatcctgcattgcaccctggtgtacccactggagctctatcctgccttctttggctattacttcttcaattccatgatgggagttctacagctgctgcatatcttctgggcctacctcattttgcgcatggcccacaagttcataactggaaagctggtagaagatgaacgcagtgaccgggaagaaacagagagctcagagggggaggaggctgcagctgggggaggagcaaagagccggcccctagccaatggccaccccatcctcaataacaaccatcgtaagaatgactgaaccattattccagctgcctcccagattaatgcataaagccaaggaactaccccgctccctgcgctatagggtcactttaagctctggggaaacgcgcaagggagggagcctggatctccctgtgacccatgcttaacaattatccgcatccggaggggactcgaaaacgaagcgagcacaaccaacgcaaacaccaggaggccccaccgagggggcacactcctgcaggccgggcggaccacacaagtctacgaccccagaggacacgaaagctcacacagaccgggcgcctcacacaccca

SEQ ID NO: 49309 - DNA, 1169 bp, Homo sapiens
ttttttttttcccggctgggctcgggctcagctcgactgggctcggcgggcggcggcggcggcgccggcggctggcggaggagggagggcgagggcgggcgcgggccggcgggcgggcggaagagggaggagaggcgcggggagccaggcctcggggcctcggagcaaccacccgagcagacggagtacacggagcagcggccccggccccgccaacgctgccgccgggatgctccagaccttgtatgattacttctggtgggaacgtctgtggctgcctgtgaacttgacctgggccgatctagaagaccgagatggacgtgtctacgccaaagcctcagatctctatatcacgctgcccctggccttgctcttcctcatcgttcgatacttctttgagctgtacgtggctacaccactggctgccctcttgaacataaaggagaaaactcggctgcgggcacctcccaacgccaccttggaacatttctacctgaccagtggcaagcagcccaagcaggtggaagtagagcttttgtcccggcagagcgggctctctggccgccaggtagagcgttggttccgtcgccgccgcaaccaggaccggcccagtctcctcaagaagttccgagaagccagctggagattcacattttacctgattgccttcattgccggcatggccgtcattgtggataaaccctggttctatgacatgaagaaagtttgggagggatatcccatacagagcactatcccttcccagtattggtactacatgattgaactttccttctactggtccctgctcttcagcattgcctctgatgtcaagcgaaaggatttcaaggaacagatcatccaccatgtggccaccatcattctcatcagcttttcctggtttgccaattacatccgagctgggactctaatcatggctctgcatgactcttccgattacctgctggagtcagccaagatgtttaactacgcgggatggaagaacacctgcaacaacatcttcatcgtcttcgccattgtttttatcatcacccgactggtcatcctgcccttctggtgagtaggcagctaggctacactcctgttctgaagaaatcaggagccttgcctttcttcccctcctgtatctccccggtgtctgacctgct

SEQ ID NO: 49310 - DNA, 494 bp, Homo sapiens
cccagtgtagtaaagatactctgccatgtctaatttgggagctggggaggggagggcaggcaagagaaactagacatgaccctgtatcctagtggtttgcaatctggttgggagaacaatgggtgcaaatgcgtgataaattatattttaaaaaaactcatctccatcccacctctgtgcactgattagagcccagctccagaaaattcctctctgagcagcaggaaggactaagggataaggaaggtggtgctacctggctggacccccaaaaatgctcttgggagaggcagagcacttgccagggtgggggacagccatgcagatggaaagggacaaaggcagaaatggagtcggggaggggttagattttctgccttatgggttatctgtttagtttgtatttagcacgttgtgagtgtacccatatcaataattttcctgttttctctacgaaaatctgcactttggctaacaaaatggtgcatatttct

SEQ ID NO: 49311 - DNA, 902 bp, Homo sapiens
ggtggaccccgctcccagaaaaggcaaatgcatttctatttcaagggtatctgaaacgtaaacattcaaaactgaaggctgactgacttgagatgttttgcaggtggctggagagaagagggaaggtaatagagacaacttagtcccatgggagcgcagcaaccgtgtcaggttctttctcctgtcccattagtgacctcagtaacatgcagggtacgtctggcttctgcatggccagtgctgacactagcacagctgttcttctccttctgttgaacctcatcttctgaagaaaggccaagtggcccttgtccatacacttagctgcattaggatgaatatcacgcgtctcacatctttaatccagcctttcgtgacatgttggaaagatacatgtgaaacctacccagttaccctttctgaattgggaggaaaaccaaccaatgtatgtatgagaaactcagaagtctgaatagaaaaacaaagtaaatggcagaagattctcgagtttatgcccgcgtaggtttggagtgttgaaaaagctaaaatgtttagtttcacttggccctgaggtatggttgagaaggctgactgccagcagttgaggattgagtccgaccatgtttacatgcagggttcccaacaccagtggtgacactgggaagcagccccagcactttcctctcctgagtcctccagacccaaaatccttaatgtcaaaccaggtcagtgtttcttactgtgtttcaagtcgttaaaaagactgagagtagaggcactttatgctgctataggtggggttctgtcagcgttaggaaaaaatgacagtttagggtaaggaagatctcataatgagtttttcaaacataattatgcaaacatgagatttttcaaaacatgcc

SEQ ID NO: 49312 - DNA, 750 bp, Homo sapiens
cagaagtaaactggaaatcggagtgtcgccatcctagcatccagaggctgggcctttgttctcccaggcacagttccattttgactccactgtcaatgaattgatagcagagctcagtatccaaatgcatgttttaaaacaggtttttacatttgatttcccatttctcatatttaggtaaaacattgtcctataaattggggttgccacctgatagctctttttatgtggccaggtgcctccataaaattagatgcttgagatatcagatataccagctgtcctggagagagaaaagtttcctatcttttgcgcatttttccataaaggagtttttcttatctgaagagaagtaatggatcttgttttaatgactattttgtttttcccttcagtgtattccacaacagaaaaacgacagtgactgtggagtctttgtgctccaggtaaagaaacacttgcttttcggaacttacaatgtgtgaattgagtctgttgggttgagaggggagagatggcagttcctgtatgtgtatatgatgctaggtacgagcaacggagtactttccctcccctttattgctgaggagcagtagtttctgcatgttcagatgttatcattaggaagaaccaccttccagggatcaagagtgaagtgtgggtatcatccatgtctcactggaggttattagtaagccacattggagactgacttgaatttgtccatatcataaccattggcatttgcag

SEQ ID NO: 49313 - DNA, 518 bp, Homo sapiens
cagaagtaaactggaaatcggagtgtcgccatcctagcatccagaggctgggcctttgttctcccaggcacagttccattttgactccactgtcaatgaattgatagcagagctcagtatccaaatgcatgttttaaaacaggtttttacatttgatttcccatttctcatatttaggtaaaacattgtcctataaattggggttgccacctgatagctctttttatgtggccaggtgcctccataaaattagatgcttgagatatcagatataccagctgtcctggagtgcagtgacatgatctcggctcacggcaacttccactcccagggctcaagcaattctccagcctcagcctcctgagtagctaggatgatgggcacccacaaccaatgcttggctaatttttgtatttttgtagagacagggtttcaccatgttgccctggctggtctagaactcctgagctcaaagtgatgcacctgcctcggcctcccgatgtacaggtgtgagccac

SEQ ID NO: 49314 - DNA, 2346 bp, Homo sapiens
cagaagtaaactggaaatcggagtgtcgccatcctagcatccagaggctgggcctttgttctcccaggcacagttccattttgactccactgtcaatgaattgatagcagagctcagtatccaaatgcatgttttaaaacaggtttttacatttgatttcccatttctcatatttaggtaaaacattgtcctataaattggggttgccacctgatagctctttttatgtggccaggtgcctccataaaattagatgcttgagatatcagatataccagctgtcctggagagagaaaagtttcctatcttttgcgcatttttccataaaggagtttttcttatctgaagagaagtaatggatcttgttttaatgactattttgtttttcccttcagtgtattccacaacagaaaaacgacagtgactgtggagtctttgtgctccagtactgcaagtgcctcgccttagagcagcctttccagttttcacaagaagacatgccccgagtgcggaagaggatttacaaggagctatgtgagtgccggctcatggactgaaactcagcagggactctgggaagtctgaccaagttggagcagatggtttgttacttgaatctccaaacacttagttgaatttttacagatatttcagatcagtggtgttgggccactattgttacctcaaatttattttttgcccttattcatttctccagctaccatgtactattgtttaatgttcagtttggtttcatttttaattttatggttctgtgcgtcccccatatttaatatttattattcaaacgcatgcatatagacagagcatgcagtgaagagtattaaaaaaaaaagcttagtagatttggtgcagcttttgaaacttagttagacgtgaactgaatacaggtttcaaatttactcccagaacctaaaaatgcaagatgtttttgatacaacataactctgagaatagtaagtgttccctggggcattaagggtagctgggggtggttttgacaaatccagtcctgttttactttaccagcggcaactttcaccaacttccctctccaagtgagtcttagagagtgcagtccattccttttgaagggtgagatggaagtggtcgtaaactgactggtgtcttctgtttctggaggcacacttgtaagcacagtggctgctttgggaggagtaaggtgtgagaaaaagcaaccttggaggccagtaacaatgacagatttcaatcgtggttttaggaattataatacgtggcatacatctcataaaggcttttgctgggatattgaattccctgaatttttctgttttcgacctgttaaaaaaatcttaacatccatcaaactagtggtcaaacaaatgagaatgcagctgttctcagagtaatttttaagttgtcatttccctgtgttgcctcccaattggaagaagttaaggtttaccaaatgcatttctatttcaagggtatctgaaacgtaaacattcaaaactgaaggctgactgacttgagatgttttgcaggtggctggagagaagagggaaggtaatagagacaacttagtcccatgggagcgcagcaaccgtgtcaggttctttctcctgtcccattagtgacctcagtaacatgcagggtacgtctggcttctgcatggccagtgctgacactagcacagctgttcttctccttctgttgaacctcatcttctgaagaaaggccaagtggcccttgtccatacacttagctgcattaggatgaatatcacgcgtctcacatctttaatccagcctttcgtgacatgttggaaagatacatgtgaaacctacccagttaccctttctgaattgggaggaaaaccaaccaatgtatgtatgagaaactcagaagtctgaatagaaaaacaaagtaaatggcagaagattctcgagtttatgcccgcgtaggtttggagtgttgaaaaagctaaaatgtttagtttcacttggccctgaggtatggttgagaaggctgactgccagcagttgaggattgagtccgaccatgtttacatgcagggttcccaacaccagtggtgacactgggaagcagccccagcactttcctctcctgagtcctccagacccaaaatccttaatgtcaaaccaggtcagtgtttcttactgtgtttcaagtcgttaaaaagactgagagtagaggcactttatgctgctataggtggggttctgtcagcgttaggaaaaaatgacagtttagggtaaggaagatctcataatgagtttttcaaacataattatgcaaacatgagatttttcaaaacatgcc

SEQ ID NO: 49315 - DNA, 2741 bp, Homo sapiens
aagtgacgcgataagccagcgccggcgtcgcggcagccgcttcagaggaagctcggcggctgtggccgcggcgaacaggccggacgcctcgtcgctggcggggcttcccttggagctgacgaaggcggggtccgcggtccaggctgctgccgcgacggggccggcggcggggcagctgccaggaacgagggtagcaggattcctagatgaggttatgaagaagtatggcagtttggttccactcagtgaaaaagaagtccttggaagattaaaagatgtctttaatgaagacttttctaatagaaaaccatttatcaatagggaaataacaaactatcgggccagacatcaaaaatgtaacttccgtatcttctataataaacacatgctggatatggacgacctggcgactctggatggtcagaactggctgaatgaccaggtcattaatatgtatggtgagctgataatggatgcagtcccagacaaagttcacttcttcaacagcttttttcatagacagctggtaaccaaaggatataatggagtaaaaagatggactaaaaaggtggatttgtttaaaaagagtcttctgttgattcctattcacctggaagtccactggtctctcattactgtgacactctctaatcgaattatttcattttatgattcccaaggcattcattttaagttttgtgtagagaatataagaaagtatttgctgactgaagccagagaaaaaaatagacctgaatttcttcagggttggcagactgctgttacgaagtgtattccacaacagaaaaacgacagtgactgtggagtctttgtgctccagtactgcaagtgcctcgccttagagcagcctttccagttttcacaagaagacatgccccgagtgcggaagaggatttacaaggagctatgtgagtgccggctcatggactgaaactcagcagggactctgggaagtctgaccaagttggagcagatggtttgttacttgaatctccaaacacttagttgaatttttacagatatttcagatcagtggtgttgggccactattgttacctcaaatttattttttgcccttattcatttctccagctaccatgtactattgtttaatgttcagtttggtttcatttttaattttatggttctgtgcgtcccccatatttaatatttattattcaaacgcatgcatatagacagagcatgcagtgaagagtattaaaaaaaaaagcttagtagatttggtgcagcttttgaaacttagttagacgtgaactgaatacaggtttcaaatttactcccagaacctaaaaatgcaagatgtttttgatacaacataactctgagaatagtaagtgttccctggggcattaagggtagctgggggtggttttgacaaatccagtcctgttttactttaccagcggcaactttcaccaacttccctctccaagtgagtcttagagagtgcagtccattccttttgaagggtgagatggaagtggtcgtaaactgactggtgtcttctgtttctggaggcacacttgtaagcacagtggctgctttgggaggagtaaggtgtgagaaaaagcaaccttggaggccagtaacaatgacagatttcaatcgtggttttaggaattataatacgtggcatacatctcataaaggcttttgctgggatattgaattccctgaatttttctgttttcgacctgttaaaaaaatcttaacatccatcaaactagtggtcaaacaaatgagaatgcagctgttctcagagtaatttttaagttgtcatttccctgtgttgcctcccaattggaagaagttaaggtttaccaaatgcatttctatttcaagggtatctgaaacgtaaacattcaaaactgaaggctgactgacttgagatgttttgcaggtggctggagagaagagggaaggtaatagagacaacttagtcccatgggagcgcagcaaccgtgtcaggttctttctcctgtcccattagtgacctcagtaacatgcagggtacgtctggcttctgcatggccagtgctgacactagcacagctgttcttctccttctgttgaacctcatcttctgaagaaaggccaagtggcccttgtccatacacttagctgcattaggatgaatatcacgcgtctcacatctttaatccagcctttcgtgacatgttggaaagatacatgtgaaacctacccagttaccctttctgaattgggaggaaaaccaaccaatgtatgtatgagaaactcagaagtctgaatagaaaaacaaagtaaatggcagaagattctcgagtttatgcccgcgtaggtttggagtgttgaaaaagctaaaatgtttagtttcacttggccctgaggtatggttgagaaggctgactgccagcagttgaggattgagtccgaccatgtttacatgcagggttcccaacaccagtggtgacactgggaagcagccccagcactttcctctcctgagtcctccagacccaaaatccttaatgtcaaaccaggtcagtgtttcttactgtgtttcaagtcgttaaaaagactgagagtagaggcactttatgctgctataggtggggttctgtcagcgttaggaaaaaatgacagtttagggtaaggaagatctcataatgagtttttcaaacataattatgcaaacatgagatttttcaaaacatgcc

SEQ ID NO: 49316 - DNA, 3273 bp, Homo sapiens
aagtgacgcgataagccagcgccggcgtcgcggcagccgcttcagaggaagctcggcggctgtggccgcggcgaacaggccggacgcctcgtcgctggcggggcttcccttggagctgacgaaggcggggtccgcggtccaggctgctgccgcgacggggccggcggcggggcagctgccaggaacgagggtagcagctgcatccagatctcattatgcatcagaaaaatgaaaaaacagaggaaaattctatggaggaaaggaatccacttagccttttctgagaaatggaatactgggtttggaggctttaagaagttttattttcaccaacacttgtgcattctgaaagctaagctgggaaggccagttacttggaatagacagttgagacatttccagggtagaaagaaagctcttcaaatccagaaaacgtggatcaaggatgaacccctttgtgctaagaccaagttcaatgtggctactcaaaatgttagtactttgtcctctaaagtgaaacagaaaggacgctaaacacttcatttcctcctcaaagactctcctgagactccaagcagagaagctgttgtcatcagcaaagaattctgaccatgaatactgcagagagaaaaatctcttgaaggcagttactgactttccatcaaatagtgctttaggtcaggccaatggtcacagacctaggacagacccacaaccttctgactttcccatgaagttcaatggggagagccaaagtccaggtgagagtggcacgattgtggtcaccttgaacaaccataagagaaagggcttttgttacggctgctgccaagggccggagcaccacaggaatgggggacccttgattccaaaaaagttccaacttaaccaacatagaaggataaaattatctcctcttatgatgtatgagaaattatccatgattagatttcggtacaggattctcagatcccagcacttcagaaccaaaagcaaggtttgcaagctaagaaaagcccagcgaagctgggtacagaaagtcactggggaccatcaagagacccgtagggagaacggtgagggtggcagttgcagcccatttccttccccagaacctaaagacccttcttgtcggcatcagccgtactttccagatatggacagcagtgctgtggtgaaggggacgaactctcatgtgcctgattgccacactaaaggaagctctttcttgggcaaggagcttagtttagacgaagcattccctgaccaacagaatggcagtgccacaaacgcctgggaccagtcatcctgttcttctcctaagtgggagtgtacagagctgattcatgacatccccttaccagaacatcgttctaataccatgttcatttcagaaactgaaagagaaattatgactctgggtcaggaaaatcagacaagttctgtcagtgatgacagagtaaaactgtcagtgtctggagcagatacatctgtgagtagcgtagatgggcctgtgtcccaaaaggctgttcaaaatgagaactcataccagatggaggaggatggatctctcaagcagagcattcttagttctgagttgctggaccacccttactgtaaaagtccactggaggctcccttggtgtgcagtggactcaaactagaaaatcaagtaggaggtggaaagaacagtcagaaagcctctccagtggatgatgaacagctgtcagtctgtctttctggattcctagatgaggttatgaagaagtatggcagtttggttccactcagtgaaaaagaagtccttggaagattaaaagatgtctttaatgaagacttttctaatagaaaaccatttatcaatagggaaataacaaactatcgggccagacatcaaaaatgtaacttccgtatcttctataataaacacatgctggatatggacgacctggcgactctggatggtcagaactggctgaatgaccaggtcattaatatgtatggtgagctgataatggatgcagtcccagacaaagttcacttcttcaacagcttttttcatagacagctggtaaccaaaggatataatggagtaaaaagatggactaaaaaggtggatttgtttaaaaagagtcttctgttgattcctattcacctggaagtccactggtctctcattactgtgacactctctaatcgaattatttcattttatgattcccaaggcattcattttaagttttgtgtagagaatataagaaagtatttgctgactgaagccagagaaaaaaatagacctgaatttcttcagggttggcagactgctgttacgaagtgtattccacaacagaaaaacgacagtgactgtggagtctttgtgctccagtactgcaagtgcctcgccttagagcagcctttccagttttcacaagaagacatgccccgagtgcggaagaggatttacaaggagctatgtggctggagagaagagggaaggtaatagagacaacttagtcccatgggagcgcagcaaccgtgtcaggttctttctcctgtcccattagtgacctcagtaacatgcagggtacgtctggcttctgcatggccagtgctgacactagcacagctgttcttctccttctgttgaacctcatcttctgaagaaaggccaagtggcccttgtccatacacttagctgcattaggatgaatatcacgcgtctcacatctttaatccagcctttcgtgacatgttggaaagatacatgtgaaacctacccagttaccctttctgaattgggaggaaaaccaaccaatgtatgtatgagaaactcagaagtctgaatagaaaaacaaagtaaatggcagaagattctcgagtttatgcccgcgtaggtttggagtgttgaaaaagctaaaatgtttagtttcacttggccctgaggtatggttgagaaggctgactgccagcagttgaggattgagtccgaccatgtttacatgcagggttcccaacaccagtggtgacactgggaagcagccccagcactttcctctcctgagtcctccagacccaaaatccttaatgtcaaaccaggtcagtgtttcttactgtgtttcaagtcgttaaaaagactgagagtagaggcactttatgctgctataggtggggttctgtcagcgttaggaaaaaatgacagtttagggtaaggaagatctcataatgagtttttcaaacataattatgcaaacatgagatttttcaaaacatgcc

SEQ ID NO: 49317 - DNA, 2690 bp, Homo sapiens
aagtgacgcgataagccagcgccggcgtcgcggcagccgcttcagaggaagctcggcggctgtggccgcggcgaacaggccggacgcctcgtcgctggcggggcttcccttggagctgacgaaggcggggtccgcggtccaggctgctgccgcgacggggccggcggcggggcagctgccaggaacgagggtagcagctgcatccagatctcattatgcatcagaaaaatgaaaaaacagaggaaaattctatggaggaaaggaatccacttagccttttctgagaaatggaatactgggtttggaggctttaagaagttttattttcaccaacacttgtgcattctgaaagctaagctgggaaggccagttacttggaatagacagttgagacatttccagggtagaaagaaagctcttcaaatccagaaaacgtggatcaaggatgaacccctttgtgctaagaccaagttcaatgtggctactcaaaatgttagtactttgtcctctaaagtgaaacagaaaggacgctaaacacttcatttcctcctcaaagactctcctgagactccaagcagagaagctgttgtcatcagcaaagaattctgaccatgaatactgcagagagaaaaatctcttgaaggcagttactgactttccatcaaatagtgctttaggtcaggccaatggtcacagacctaggacagacccacaaccttctgactttcccatgaagttcaatggggagagccaaagtccaggtgagagtggcacgattgtggtcaccttgaacaaccataagagaaagggcttttgttacggctgctgccaagggccggagcaccacaggaatgggggacccttgattccaaaaaagttccaacttaaccaacatagaaggataaaattatctcctcttatgatgtatgagaaattatccatgattagatttcggtacaggattctcagatcccagcacttcagaaccaaaagcaaggtttgcaagctaagaaaagcccagcgaagctgggtacagaaagtcactggggaccatcaagagacccgtagggagaacggtgagggtggcagttgcagcccatttccttccccagaacctaaagacccttcttgtcggcatcagccgtactttccagatatggacagcagtgctgtggtgaaggggacgaactctcatgtgcctgattgccacactaaaggaagctctttcttgggcaaggagcttagtttagacgaagcattccctgaccaacagaatggcagtgccacaaacgcctgggaccagtcatcctgttcttctcctaagtgggagtgtacagagctgattcatgacatccccttaccagaacatcgttctaataccatgttcatttcagaaactgaaagagaaattatgactctgggtcaggaaaatcagacaagttctgtcagtgatgacagagtaaaactgtcagtgtctggagcagatacatctgtgagtagcgtagatgggcctgtgtcccaaaaggctgttcaaaatgagaactcataccagatggaggaggatggatctctcaagcagagcattcttagttctgagttgctggaccacccttactgtaaaagtccactggaggctcccttggtgtgcagtggactcaaactagaaaatcaagtaggaggtggaaagaacagtcagaaagcctctccagtggatgatgaacagctgtcagtctgtctttctggattcctagatgaggttatgaagaagtatggcagtttggttccactcagtgaaaaagaagtccttggaagattaaaagatgtctttaatgaagacttttctaatagaaaaccatttatcaatagggaaataacaaactatcgggccagacatcaaaaatgtaacttccgtatcttctataataaacacatgctggatatggacgacctggcgactctggatggtcagaactggctgaatgaccaggtcattaatatgtatggtgagctgataatggatgcagtcccagacaaagttcacttcttcaacagcttttttcatagacagctggtaaccaaaggatataatggagtaaaaagatggactaaaaaggtggatttgtttaaaaagagtcttctgttgattcctattcacctggaagtccactggtctctcattactgtgacactctctaatcgaattatttcattttatgattcccaaggcattcattttaagttttgtgtagagaatataagaaagtatttgctgactgaagccagagaaaaaaatagacctgaatttcttcagggttggcagactgctgttacgaagtgtattccacaacagaaaaacgacagtgactgtggagtctttgtgctccaggtaaagaaacacttgcttttcggaacttacaatgtgtgaattgagtctgttgggttgagaggggagagatggcagttcctgtatgtgtatatgatgctaggtacgagcaacggagtactttccctcccctttattgctgaggagcagtagtttctgcatgttcagatgttatcattaggaagaaccaccttccagggatcaagagtgaagtgtgggtatcatccatgtctcactggaggttattagtaagccacattggagactgacttgaatttgtccatatcataaccattggcatttgcag

SEQ ID NO: 49318 - DNA, 430 bp, Homo sapiens
gtggatttgtttaaaaagagtcttctgttgattcctattcacctggaagtccactggtctctcattactgtgacactctctaatcgaattatttcattttatgattcccaaggcattcattttaagttttgtgtagaggtaagttaatatactgcctattttttcatttattttgtaattggccaaatagcatcttagctctagatagaacagcagcagtcaaaaccatataggaacagtttatgtcatgaaaatcctccaaagtgttagctgagaaaaggactagaagaggaatctctggctgaggagaggatctgtctaggatccagatccccctctgagatactccacttggattttctctgcttttcccttaaaactacatcttgaatgtggttagaaattgtttttctttgatcatcttagagct

SEQ ID NO: 49319 - DNA, 4286 bp, Homo sapiens
aagtgacgcgataagccagcgccggcgtcgcggcagccgcttcagaggaagctcggcggctgtggccgcggcgaacaggccggacgcctcgtcgctggcggggcttcccttggagctgacgaaggcggggtccgcggtccaggctgctgccgcgacggggccggcggcggggcagctgccaggaacgagggtagcagctgcatccagatctcattatgcatcagaaaaatgaaaaaacagaggaaaattctatggaggaaaggaatccacttagccttttctgagaaatggaatactgggtttggaggctttaagaagttttattttcaccaacacttgtgcattctgaaagctaagctgggaaggccagttacttggaatagacagttgagacatttccagggtagaaagaaagctcttcaaatccagaaaacgtggatcaaggatgaacccctttgtgctaagaccaagttcaatgtggctactcaaaatgttagtactttgtcctctaaagtgaaacagaaaggacgctaaacacttcatttcctcctcaaagactctcctgagactccaagcagagaagctgttgtcatcagcaaagaattctgaccatgaatactgcagagagaaaaatctcttgaaggcagttactgactttccatcaaatagtgctttaggtcaggccaatggtcacagacctaggacagacccacaaccttctgactttcccatgaagttcaatggggagagccaaagtccaggtgagagtggcacgattgtggtcaccttgaacaaccataagagaaagggcttttgttacggctgctgccaagggccggagcaccacaggaatgggggacccttgattccaaaaaagttccaacttaaccaacatagaaggataaaattatctcctcttatgatgtatgagaaattatccatgattagatttcggtacaggattctcagatcccagcacttcagaaccaaaagcaaggtttgcaagctaagaaaagcccagcgaagctgggtacagaaagtcactggggaccatcaagagacccgtagggagaacggtgagggtggcagttgcagcccatttccttccccagaacctaaagacccttcttgtcggcatcagccgtactttccagatatggacagcagtgctgtggtgaaggggacgaactctcatgtgcctgattgccacactaaaggaagctctttcttgggcaaggagcttagtttagacgaagcattccctgaccaacagaatggcagtgccacaaacgcctgggaccagtcatcctgttcttctcctaagtgggagtgtacagagctgattcatgacatccccttaccagaacatcgttctaataccatgttcatttcagaaactgaaagagaaattatgactctgggtcaggaaaatcagacaagttctgtcagtgatgacagagtaaaactgtcagtgtctggagcagatacatctgtgagtagcgtagatgggcctgtgtcccaaaaggctgttcaaaatgagaactcataccagatggaggaggatggatctctcaagcagagcattcttagttctgagttgctggaccacccttactgtaaaagtccactggaggctcccttggtgtgcagtggactcaaactagaaaatcaagtaggaggtggaaagaacagtcagaaagcctctccagtggatgatgaacagctgtcagtctgtctttctggattcctagatgaggttatgaagaagtatggcagtttggttccactcagtgaaaaagaagtccttggaagattaaaagatgtctttaatgaagacttttctaatagaaaaccatttatcaatagggaaataacaaactatcgggccagacatcaaaaatgtaacttccgtatcttctataataaacacatgctggatatggacgacctggcgactctggatggtcagaactggctgaatgaccaggtcattaatatgtatggtgagctgataatggatgcagtcccagacaaagttcacttcttcaacagcttttttcatagacagctggtaaccaaaggatataatggagtaaaaagatggactaaaaaggtggatttgtttaaaaagagtcttctgttgattcctattcacctggaagtccactggtctctcattactgtgacactctctaatcgaattatttcattttatgattcccaaggcattcattttaagttttgtgtagagaatataagaaagtatttgctgactgaagccagagaaaaaaatagacctgaatttcttcagggttggcagactgctgttacgaagtgtattccacaacagaaaaacgacagtgactgtggagtctttgtgctccagtactgcaagtgcctcgccttagagcagcctttccagttttcacaagaagacatgccccgagtgcggaagaggatttacaaggagctatgtgagtgccggctcatggactgaaactcagcagggactctgggaagtctgaccaagttggagcagatggtttgttacttgaatctccaaacacttagttgaatttttacagatatttcagatcagtggtgttgggccactattgttacctcaaatttattttttgcccttattcatttctccagctaccatgtactattgtttaatgttcagtttggtttcatttttaattttatggttctgtgcgtcccccatatttaatatttattattcaaacgcatgcatatagacagagcatgcagtgaagagtattaaaaaaaaaagcttagtagatttggtgcagcttttgaaacttagttagacgtgaactgaatacaggtttcaaatttactcccagaacctaaaaatgcaagatgtttttgatacaacataactctgagaatagtaagtgttccctggggcattaagggtagctgggggtggttttgacaaatccagtcctgttttactttaccagcggcaactttcaccaacttccctctccaagtgagtcttagagagtgcagtccattccttttgaagggtgagatggaagtggtcgtaaactgactggtgtcttctgtttctggaggcacacttgtaagcacagtggctgctttgggaggagtaaggtgtgagaaaaagcaaccttggaggccagtaacaatgacagatttcaatcgtggttttaggaattataatacgtggcatacatctcataaaggcttttgctgggatattgaattccctgaatttttctgttttcgacctgttaaaaaaatcttaacatccatcaaactagtggtcaaacaaatgagaatgcagctgttctcagagtaatttttaagttgtcatttccctgtgttgcctcccaattggaagaagttaaggtttaccaaatgcatttctatttcaagggtatctgaaacgtaaacattcaaaactgaaggctgactgacttgagatgttttgcaggtggctggagagaagagggaaggtaatagagacaacttagtcccatgggagcgcagcaaccgtgtcaggttctttctcctgtcccattagtgacctcagtaacatgcagggtacgtctggcttctgcatggccagtgctgacactagcacagctgttcttctccttctgttgaacctcatcttctgaagaaaggccaagtggcccttgtccatacacttagctgcattaggatgaatatcacgcgtctcacatctttaatccagcctttcgtgacatgttggaaagatacatgtgaaacctacccagttaccctttctgaattgggaggaaaaccaaccaatgtatgtatgagaaactcagaagtctgaatagaaaaacaaagtaaatggcagaagattctcgagtttatgcccgcgtaggtttggagtgttgaaaaagctaaaatgtttagtttcacttggccctgaggtatggttgagaaggctgactgccagcagttgaggattgagtccgaccatgtttacatgcagggttcccaacaccagtggtgacactgggaagcagccccagcactttcctctcctgagtcctccagacccaaaatccttaatgtcaaaccaggtcagtgtttcttactgtgtttcaagtcgttaaaaagactgagagtagaggcactttatgctgctataggtggggttctgtcagcgttaggaaaaaatgacagtttagggtaaggaagatctcataatgagtttttcaaacataattatgcaaacatgagatttttcaaaacatgcc

SEQ ID NO: 49320 - DNA, 4202 bp, Homo sapiens
aagtgacgcgataagccagcgccggcgtcgcggcagccgcttcagaggaagctcggcggctgtggccgcggcgaacaggccggacgcctcgtcgctggcggggcttcccttggagctgacgaaggcggggtccgcggtccaggctgctgccgcgacggggccggcggcggggcagctgccaggaacgagggtagcagctgcatccagatctcattatgcatcagaaaaatgaaaaaacagaggaaaattctatggaggaaaggaatccacttagccttttctgagaaatggaatactgggtttggaggctttaagaagttttattttcaccaacacttgtgcattctgaaagctaagctgggaaggccagttacttggaatagacagttgagacatttccagggtagaaagaaagctcttcaaatccagaaaacgtggatcaaggatgaacccctttgtgctaagaccaagttcaatgtggctactcaaaatgttagtactttgtcctctaaagtgaaacagaaaggacgctaaacacttcatttcctcctcaaagactctcctgagactccaagcagagaagctgttgtcatcagcaaagaattctgaccatgaatactgcagagagaaaaatctcttgaaggcagttactgactttccatcaaatagtgctttaggtcaggccaatggtcacagacctaggacagacccacaaccttctgactttcccatgaagttcaatggggagagccaaagtccaggtgagagtggcacgattgtggtcaccttgaacaaccataagagaaagggcttttgttacggctgctgccaagggccggagcaccacaggaatgggggacccttgattccaaaaaagttccaacttaaccaacatagaaggataaaattatctcctcttatgatgtatgagaaattatccatgattagatttcggtacaggattctcagatcccagcacttcagaaccaaaagcaaggtttgcaagctaagaaaagcccagcgaagctgggtacagaaagtcactggggaccatcaagagacccgtagggagaacggtgagggtggcagttgcagcccatttccttccccagaacctaaagacccttcttgtcggcatcagccgtactttccagatatggacagcagtgctgtggtgaaggggacgaactctcatgtgcctgattgccacactaaaggaagctctttcttgggcaaggagcttagtttagacgaagcattccctgaccaacagaatggcagtgccacaaacgcctgggaccagtcatcctgttcttctcctaagtgggagtgtacagagctgattcatgacatccccttaccagaacatcgttctaataccatgttcatttcagaaactgaaagagaaattatgactctgggtcaggaaaatcagacaagttctgtcagtgatgacagagtaaaactgtcagtgtctggagcagatacatctgtgagtagcgtagatgggcctgtgtcccaaaaggctgttcaaaatgagaactcataccagatggaggaggatggatctctcaagcagagcattcttagttctgagttgctggaccacccttactgtaaaagtccactggaggctcccttggtgtgcagtggactcaaactagaaaatcaagtaggaggtggaaagaacagtcagaaagcctctccagtggatgatgaacagctgtcagtctgtctttctggattcctagatgaggttatgaagaagtatggcagtttggttccactcagtgaaaaagaagtccttggaagattaaaagatgtctttaatgaagacttttctaatagaaaaccatttatcaatagggaaataacaaactatcgggccagacatcaaaaatgtaacttccgtatcttctataataaacacatgctggatatggacgacctggcgactctggatggtcagaactggctgaatgaccaggtcattaatatgtatggtgagctgataatggatgcagtcccagacaaagttcacttcttcaacagcttttttcatagacagctggtaaccaaaggatataatggagtaaaaagatggactaaaaaggtggatttgtttaaaaagagtcttctgttgattcctattcacctggaagtccactggtctctcattactgtgacactctctaatcgaattatttcattttatgattcccaaggcattcattttaagttttgtgtagagtgtattccacaacagaaaaacgacagtgactgtggagtctttgtgctccagtactgcaagtgcctcgccttagagcagcctttccagttttcacaagaagacatgccccgagtgcggaagaggatttacaaggagctatgtgagtgccggctcatggactgaaactcagcagggactctgggaagtctgaccaagttggagcagatggtttgttacttgaatctccaaacacttagttgaatttttacagatatttcagatcagtggtgttgggccactattgttacctcaaatttattttttgcccttattcatttctccagctaccatgtactattgtttaatgttcagtttggtttcatttttaattttatggttctgtgcgtcccccatatttaatatttattattcaaacgcatgcatatagacagagcatgcagtgaagagtattaaaaaaaaaagcttagtagatttggtgcagcttttgaaacttagttagacgtgaactgaatacaggtttcaaatttactcccagaacctaaaaatgcaagatgtttttgatacaacataactctgagaatagtaagtgttccctggggcattaagggtagctgggggtggttttgacaaatccagtcctgttttactttaccagcggcaactttcaccaacttccctctccaagtgagtcttagagagtgcagtccattccttttgaagggtgagatggaagtggtcgtaaactgactggtgtcttctgtttctggaggcacacttgtaagcacagtggctgctttgggaggagtaaggtgtgagaaaaagcaaccttggaggccagtaacaatgacagatttcaatcgtggttttaggaattataatacgtggcatacatctcataaaggcttttgctgggatattgaattccctgaatttttctgttttcgacctgttaaaaaaatcttaacatccatcaaactagtggtcaaacaaatgagaatgcagctgttctcagagtaatttttaagttgtcatttccctgtgttgcctcccaattggaagaagttaaggtttaccaaatgcatttctatttcaagggtatctgaaacgtaaacattcaaaactgaaggctgactgacttgagatgttttgcaggtggctggagagaagagggaaggtaatagagacaacttagtcccatgggagcgcagcaaccgtgtcaggttctttctcctgtcccattagtgacctcagtaacatgcagggtacgtctggcttctgcatggccagtgctgacactagcacagctgttcttctccttctgttgaacctcatcttctgaagaaaggccaagtggcccttgtccatacacttagctgcattaggatgaatatcacgcgtctcacatctttaatccagcctttcgtgacatgttggaaagatacatgtgaaacctacccagttaccctttctgaattgggaggaaaaccaaccaatgtatgtatgagaaactcagaagtctgaatagaaaaacaaagtaaatggcagaagattctcgagtttatgcccgcgtaggtttggagtgttgaaaaagctaaaatgtttagtttcacttggccctgaggtatggttgagaaggctgactgccagcagttgaggattgagtccgaccatgtttacatgcagggttcccaacaccagtggtgacactgggaagcagccccagcactttcctctcctgagtcctccagacccaaaatccttaatgtcaaaccaggtcagtgtttcttactgtgtttcaagtcgttaaaaagactgagagtagaggcactttatgctgctataggtggggttctgtcagcgttaggaaaaaatgacagtttagggtaaggaagatctcataatgagtttttcaaacataattatgcaaacatgagatttttcaaaacatgcc

SEQ ID NO: 49321 - DNA, 2442 bp, Homo sapiens
aagtgacgcgataagccagcgccggcgtcgcggcagccgcttcagaggaagctcggcggctgtggccgcggcgaacaggccggacgcctcgtcgctggcggggcttcccttggagctgacgaaggcggggtccgcggtccaggctgctgccgcgacggggccggcggcggggcagctgccaggaacgagggtagcagctgcatccagatctcattatgcatcagaaaaatgaaaaaacagaggaaaattctatggaggaaaggaatccacttagccttttctgagaaatggaatactgggtttggaggctttaagaagttttattttcaccaacacttgtgcattctgaaagctaagctgggaaggccagttacttggaatagacagttgagacatttccagggtagaaagaaagctcttcaaatccagaaaacgtggatcaaggatgaacccctttgtgctaagaccaagttcaatgtggctactcaaaatgttagtactttgtcctctaaagtgaaacagaaaggacgctaaacacttcatttcctcctcaaagactctcctgagactccaagcagagaagctgttgtcatcagcaaagaattctgaccatgaatactgcagagagaaaaatctcttgaaggcagttactgactttccatcaaatagtgctttaggtcaggccaatggtcacagacctaggacagacccacaaccttctgactttcccatgaagttcaatggggagagccaaagtccaggtgagagtggcacgattgtggtcaccttgaacaaccataagagaaagggcttttgttacggctgctgccaagggccggagcaccacaggaatgggggacccttgattccaaaaaagttccaacttaaccaacatagaaggataaaattatctcctcttatgatgtatgagaaattatccatgattagatttcggtacaggattctcagatcccagcacttcagaaccaaaagcaaggtttgcaagctaagaaaagcccagcgaagctgggtacagaaagtcactggggaccatcaagagacccgtagggagaacggtgagggtggcagttgcagcccatttccttccccagaacctaaagacccttcttgtcggcatcagccgtactttccagatatggacagcagtgctgtggtgaaggggacgaactctcatgtgcctgattgccacactaaaggaagctctttcttgggcaaggagcttagtttagacgaagcattccctgaccaacagaatggcagtgccacaaacgcctgggaccagtcatcctgttcttctcctaagtgggagtgtacagagctgattcatgacatccccttaccagaacatcgttctaataccatgttcatttcagaaactgaaagagaaattatgactctgggtcaggaaaatcagacaagttctgtcagtgatgacagagtaaaactgtcagtgtctggagcagatacatctgtgagtagcgtagatgggcctgtgtcccaaaaggctgttcaaaatgagaactcataccagatggaggaggatggatctctcaagcagagcattcttagttctgagttgctggaccacccttactgtaaaagtccactggaggctcccttggtgtgcagtggactcaaactagaaaatcaagtaggaggtggaaagaacagtcagaaagcctctccagtggatgatgaacagctgtcagtctgtctttctggattcctagatgaggttatgaagaagtatggcagtttggttccactcagtgaaaaagaagtccttggaagattaaaagatgtctttaatgaagacttttctaatagaaaaccatttatcaatagggaaataacaaactatcgggccagacatcaaaaatgtaacttccgtatcttctataataaacacatgctggatatggacgacctggcgactctggatggtcagaactggctgaatgaccaggtcattaatatgtatggtgagctgataatggatgcagtcccagacaaagttcacttcttcaacagcttttttcatagacagctggtaaccaaaggatataatggagtaaaaagatggactaaaaaggtggatttgtttaaaaagagtcttctgttgattcctattcacctggaagtccactggtctctcattactgtgacactctctaatcgaattatttcattttatgattcccaaggcattcattttaagttttgtgtagagaatataagaaagtatttgctgactgaagccagagaaaaaaatagacctgaatttcttcagggttggcagactgctgttacgaagtgtattccacaacagaaaaacgacagtgactgtggagtctttgtgctccagtactgcagtactcccttagacgcctttccgttttcgggatcctctagaacgccatc

SEQ ID NO: 49322 - DNA, 472 bp, Homo sapiens
tggaaatggagtctcgcactggtcgcccaggctggagtgcagtggcgtgatcttggctcactgcaaccttcgcctcccgggttcaagcgattctcctgtctcagcctcctgagtagctgggattacaagcgtgcgccaccacacctggctaatttttgtatttttattagagacaggctggtctcgaactcctgacctcatgatccgcccgcctcgacctcccaaagtactgggattacagcgtgagccaccacgcccagcctgctgaagtctcagtttctttaactatgaaatgagaagttaggtttgatccagtgaaattttattcagcacctactgcatgcatgctcctcttgattaggtaagtgttatgggcatagaaagatgaatgacatgttttgactcccgataactgcctaattggtgatcttctaagggtctgtaaatcttgtcttgttattttttaattaaa

SEQ ID NO: 49323 - DNA, 853 bp, Homo sapiens
atcttgtgaggaccgagcccccgaacaggcaaaaagtggcggtgcctggcacataggaggcactcccacagctgtggtcagctcaactacagggacccgcatctccctacagggttggcccccagcaaggctcaggacagcaaagcctacacgtccatcctgtacggcaatggcccgggctacgtgttcaactcaggcgtgcgaccagacgtgaatgagagcgagagcgagactgcagatttgtgccatgcggctgcctgcaccccagacaataaagggaccaaaaccacccaacccccaccctgcctctatcctaaggaagaccaagcaggcctggacccagagacgtcccccatcgtgggacacgacacacccagaccgcgtgccccaccgtcttagcttcaatcctggcagcacctggtagacccaaggacttgggtggatcaggacacctgaagaagagaagcttccggcaaccctgcaacccacccaaggaggctactggatcggggattcccaggggggctttgacacagtcctctgctgtctccccactaggatcattccacacccctgcacctgaccaagggaccaatgaggcagaggcttgccccaagtcacagccactcagatgcttcctgccccccagtgcccattccaggtcaccagatccaaggagcgcttgaggagctctgggtacagggcagcaacccagagcccatgggcctcccgggacatctggatgctgggcatagatttctcaacaaggaagactcccctgcctcctcaaggtctccattctcctaggagacaaagcaataataaaaggtgttagacaatgtaaaaaaaaaac

SEQ ID NO: 49324 - DNA, 2638 bp, Homo sapiens
  misc_feature (1195)..(1195): n is a, c, g, or t
ttaaacccaggcagcctgcgctgcagccggttcctggtgtccccacttcgcctccctcctgctgcccccaagacatgcaggggccctgggtgctgctgctgctgggcctgaggctacagctctccctgggcgtcatcccaggtaatgaggctccccaagctgttccacacacagggcaccccctcagccaggctgacctgatctctactctccccctggccagctgaggaggagaacccggccttctggaaccgccaggcagctgaggccctggatgctgccaagaagctgcagcccatccagaaggtcgccaagaacctcatcctcttcctgggcgatgggttgggggtgcccacggtgacagccaccaggatcctaaaggggcagaagaatggcaaactggggcctgagacgcccctggccatggaccgcttcccatacctggctctgtccaagacatacaatgtggacagacaggtgccagacagcgcagccacagccacggcctacctgtgcggggtcaaggccaacttccagaccatcggcttgagtgcagccgcccgctttaaccagtgcaacacgacacgcggcaatgaggtcatctccgtgatgaaccgggccaagcaagcaggaaagtcagtaggagtggtgaccaccacacgggtgcagcacgcctcgccagccggcacctacgcacacacagtgaaccgcaactggtactcagatgctgacatgcctgcctcagcccgccaggaggggtgccaggacatcgccactcagctcatctccaacatggacattgacgtgatccttggcggaggccgcaagtacatgtttcccatggggaccccagaccctgagtacccagctgatgccagccagaatggaatcaggctggacgggaagaacctggtgcaggaatggctggcaaagcaccagggtgcctggtatgtgtggaaccgcactgagctcatgcaggcgtccctggaccagtctgtgacccatctcatgggcctctttgagcccggagacacgaaatatgagatccaccgagaccccacactggacccctccctgatggagatgacagaggctgccctgcgcctgctgagcaggaacccccgcggcttctacctctttgtggagggcggccgcatcgaccatggtcatcatgagggtgtggcttaccaggcantcactgaggcggtcatgttcgacgacgccattgagagggcgggccagctcaccagcgaggaggacacgctgaccctcgtcaccgctgaccactcccatgtcttctcctttggtggctacaccttgcgagggagctccatcttcgggttggcccccagcaaggctcaggacagcaaagcctacacgtccatcctgtacggcaatggcccgggctacgtgttcaactcaggcgtgcgaccagacgtgaatgagagcgagagcgggagccccgattaccagcagcaggcggcggtgcccctgtcgtccgagacccacggaggcgaagacgtggcggtgtttgcgcgcggcccgcaggcgcacctggtgcatggtgtgcaggagcagagcttcgtagcgcatgtcatggccttcgctgcctgtctggagccctacacggcctgcgacctggcgcctccccgcctgcaccaccgacgccgcgcacccagttgccgcgtcgctgccactgctggccgggaccctgctgctgctgggggcgtccgctgctccctgagtgccccactccggagttatcctgctccccacctccgggcgtcctgccctgttccccgtcctgagccgccacttccagcgaacacacacaggtgtcctgccgttggaccttcacctcctagagataaaccagcctcagctggcgcagcggggcccttcttccctccgcatccccttcagggagcaggagcccagggcgccctgggagctgagcctgggacttccaggacctcccctcaggttgttctctgattcttcctcccaaccccagagactgcagatttgtgccatgcggctgcctgcaccccagacaataaagggaccaaaaccacccaacccccaccctgcctctatcctaaggaagaccaagcaggcctggacccagagacgtcccccatcgtgggacacgacacacccagaccgcgtgccccaccgtcttagcttcaatcctggcagcacctggtagacccaaggacttgggtggatcaggacacctgaagaagagaagcttccggcaaccctgcaacccacccaaggaggctactggatcggggattcccaggggggctttgacacagtcctctgctgtctccccactaggatcattccacacccctgcacctgaccaagggaccaatgaggcagaggcttgccccaagtcacagccactcagatgcttcctgccccccagtgcccattccaggtcaccagatccaaggagcgcttgaggagctctgggtacagggcagcaacccagagcccatgggcctcccgggacatctggatgctgggcatagatttctcaacaaggaagactcccctgcctcctcaaggtctccattctcctaggagacaaagcaataataaaaggtgttagacaatgtaaaaaaaaaac

SEQ ID NO: 49325 - DNA, 2556 bp, Homo sapiens
  misc_feature (1113)..(1113): n is a, c, g, or t
ttaaacccaggcagcctgcgctgcagccggttcctggtgtccccacttcgcctccctcctgctgcccccaagacatgcaggggccctgggtgctgctgctgctgggcctgaggctacagctctccctgggcgtcatcccagctgaggaggagaacccggccttctggaaccgccaggcagctgaggccctggatgctgccaagaagctgcagcccatccagaaggtcgccaagaacctcatcctcttcctgggcgatgggttgggggtgcccacggtgacagccaccaggatcctaaaggggcagaagaatggcaaactggggcctgagacgcccctggccatggaccgcttcccatacctggctctgtccaagacatacaatgtggacagacaggtgccagacagcgcagccacagccacggcctacctgtgcggggtcaaggccaacttccagaccatcggcttgagtgcagccgcccgctttaaccagtgcaacacgacacgcggcaatgaggtcatctccgtgatgaaccgggccaagcaagcaggaaagtcagtaggagtggtgaccaccacacgggtgcagcacgcctcgccagccggcacctacgcacacacagtgaaccgcaactggtactcagatgctgacatgcctgcctcagcccgccaggaggggtgccaggacatcgccactcagctcatctccaacatggacattgacgtgatccttggcggaggccgcaagtacatgtttcccatggggaccccagaccctgagtacccagctgatgccagccagaatggaatcaggctggacgggaagaacctggtgcaggaatggctggcaaagcaccagggtgcctggtatgtgtggaaccgcactgagctcatgcaggcgtccctggaccagtctgtgacccatctcatgggcctctttgagcccggagacacgaaatatgagatccaccgagaccccacactggacccctccctgatggagatgacagaggctgccctgcgcctgctgagcaggaacccccgcggcttctacctctttgtggagggcggccgcatcgaccatggtcatcatgagggtgtggcttaccaggcantcactgaggcggtcatgttcgacgacgccattgagagggcgggccagctcaccagcgaggaggacacgctgaccctcgtcaccgctgaccactcccatgtcttctcctttggtggctacaccttgcgagggagctccatcttcgggttggcccccagcaaggctcaggacagcaaagcctacacgtccatcctgtacggcaatggcccgggctacgtgttcaactcaggcgtgcgaccagacgtgaatgagagcgagagcgggagccccgattaccagcagcaggcggcggtgcccctgtcgtccgagacccacggaggcgaagacgtggcggtgtttgcgcgcggcccgcaggcgcacctggtgcatggtgtgcaggagcagagcttcgtagcgcatgtcatggccttcgctgcctgtctggagccctacacggcctgcgacctggcgcctccccgcctgcaccaccgacgccgcgcacccagttgccgcgtcgctgccactgctggccgggaccctgctgctgctgggggcgtccgctgctccctgagtgccccactccggagttatcctgctccccacctccgggcgtcctgccctgttccccgtcctgagccgccacttccagcgaacacacacaggtgtcctgccgttggaccttcacctcctagagataaaccagcctcagctggcgcagcggggcccttcttccctccgcatccccttcagggagcaggagcccagggcgccctgggagctgagcctgggacttccaggacctcccctcaggttgttctctgattcttcctcccaaccccagagactgcagatttgtgccatgcggctgcctgcaccccagacaataaagggaccaaaaccacccaacccccaccctgcctctatcctaaggaagaccaagcaggcctggacccagagacgtcccccatcgtgggacacgacacacccagaccgcgtgccccaccgtcttagcttcaatcctggcagcacctggtagacccaaggacttgggtggatcaggacacctgaagaagagaagcttccggcaaccctgcaacccacccaaggaggctactggatcggggattcccaggggggctttgacacagtcctctgctgtctccccactaggatcattccacacccctgcacctgaccaagggaccaatgaggcagaggcttgccccaagtcacagccactcagatgcttcctgccccccagtgcccattccaggtcaccagatccaaggagcgcttgaggagctctgggtacagggcagcaacccagagcccatgggcctcccgggacatctggatgctgggcatagatttctcaacaaggaagactcccctgcctcctcaaggtctccattctcctaggagacaaagcaataataaaaggtgttagacaatgtaaaaaaaaaac

SEQ ID NO: 49326 - DNA, 835 bp, Homo sapiens
ctgattcacatgcactggagttaattagtcttagaaatgtgtgcatccatacaaatgcacaacataaagtgaacatattcctaggccctttctgcctgtgtcagggccaggaagtagaggctgggaactcttctggtccccagtatggcaggcgccagggaggggatggtgtggcccatcccttctctggatacctggccagtggcaggcagcagggaggagctggccgaccctcagtgactgacaagccagcaattctgagttctggcctttgggagtctgcctgctccaagccagtccaccccagctgcagccccaaaagctggctcaaagtccttgggtggattcactggagatgggcaacttaaaacaagagaaactttaatttttaaacctaagtgatgatacagctcttcccttagattatcgcccaggctggagtgcagtggcatgatctcagctcactgcaagctccacctcctgggttcatgccattctcctgcctcagcctccccccgagtaactgggaatacaggcgcccgccaccatgcctggctaattttttgtatttttagtagagatagggtttcatcatgttagccaggatggtctcattcttattctttaatgagatcagagggtaattcaccaagaaagacctctcctgttccattgtgtcatccaacaactgctcagagctcaaaattatagaaggcttctgagcccctagagatttttaatttgcttctaatccctgaggtgggaacatcatgagggaagatttgattttcagagttaaataaattgtatgtgcttttccagccatctggctcac

SEQ ID NO: 49327 - DNA, 447 bp, Homo sapiens
ttctttttcttcttttttagacaaggcctcgctgtgtcacccaggctggagtgcagtggtgcgatcatggctcaccgcagccttgaccccagggctcaagcagttctcctagttcagtctcccaagtagctggcaccacagacatgcactaccacgcccaggtgattttccagtgccttaaacagtgcccagctgattttccagtgccttaatgatattaatcatcattacaaaagtgatttacagcctggccaacatgatgaaaccctgtctgtactgaaaaaaaaaaatacaaaaattagccgggctcggtggtgggcgcctgtaatcctagctacttcggaggctgaggcaggagaatcacttgaacctgggaagcagaggttgtagcgagctgagatcatgccattgcactccagcctaggtgacaagagtgaaactctgtct

SEQ ID NO: 49328 - DNA, 160 bp, Homo sapiens
tgtgtgcttgcaaaagctgcagattaataaatcatctgcaatggaattaaatttgtgaatatttatctctctaatattgtgtagcaggcatattagttaggaaaataatgaaccatacagatgcagtggcaaaaattgcagccaacccagatattttaaa

SEQ ID NO: 49329 - DNA, 301 bp, Homo sapiens
ttcagaattagaaggaatgtagaaaataatgagaagtacaaagaaggagatgaaaatcacagtctgatttctcatgaatgccattaacatttgctatttttgattgtcttgtttaatgtgcataaacatatttgcaaaattaggattgaagcatgtatacaaatttgtctcctgcattttaaaaattgagcattgtactatgaatattttcctaaatcataaaacagcctatcaaagcacgttttcttagctgcttaatatgatgcatgatatgtgtatctaacataaatatccagtaata

SEQ ID NO: 49330 - DNA, 727 bp, Homo sapiens
tcttagcccttccctttctgggggatggtgtaaagaggcacatcgcgtaaaatggtcacagagcagattgccatgcagcctagaaccaggagtctggtcttgttgctgtgttccctggtaagagatcatggcattatttcttaaatggctaagtgaaggtgggagagttggggaggggaggagggaggtcctctgttctgccaattaatagtctacctctgtgtcctgattcctcttctcaagcaggaatgaaaagcctccatattaaaacgaaagggtttggaatcagggtcttagttcaaatcctgtccttaccacttcactagcgtactcttggacaaaattgctaattctctcagtttgcagatgtgtaaaataggactgacgatatttgtagtgtgattgtgaagaataaggcaaattagcacaaggaaaactaaaaactcaatatgtttgtgttagcctgtttgtgttgctataaaagaataaagaatatctgagattgggtaatttataaggaaaaaaaaaaaaaactcgtgccgaattcggcacgaggcgacggtagctctagccgggcctgagctgtgctagcacctcccccaggagaccgttgcagtcggccagcccccttctccacggtaaccatgtgcgaccgaaaggccgtgatcaaaaatgcggacatgtcggaagagatgcaacagggactcggtggagtgcgctactcaat

SEQ ID NO: 49331 - DNA, 419 bp, Homo sapiens
taaaacgtttttatacagcatggctgaaaattgaacctggcctccctcgtggcctaccactgaaggaacagcattttttgcctatctagaaagacaatgttaaatgtgctatctatatattttttaacttgtgctacctactacgcgtttatatttgtggaatctgttttcttttggacaaaaccacaaatcaaaaacacctcatttcttaggcatttgaaatccctaattcagaaatatctcccaaacagaaacacaactacctgcattctttttgacaaaagagctaagtagcattagaaaattattttaaacccaattctgttttttaacagaataaaattcttctgttcttcacattcttctttcataggtaacctattgaaagtagggtttatttgggggaagcatttctttct

SEQ ID NO: 49332 - DNA, 839 bp, Homo sapiens
gtggaatcaatttaaatacttaacagttttccctgaagtttttttcagctgtttcttcctgacaaaagacacacactctttcaaaaaaaaaatgacactttctgaaaatatgtttcctaatatttgctacttatagcaaatacctttttttaactggaatattcttttctgttgtttgttcagtaatttaatgagctgctacttagctgtatgtccctcagtacatctcttttcattctgagcctaagtttcatcatttatgagatgttgctaatacggataactgcactatataaactaagatcaaataaatatgaaagcctttaaatatatatgtactgcatatgtaatataaatggaatgaccttatcttaattgttcactccacttgaaataattcttaaaatgtagtagtcagtgaatatttgttaaatgaatgaatgatttaaattgtgtaatttaaattacaaattgcataataccgtatgtgaatttgcaaagatttgtggatagaagattgtcatttctactcccattatgactgacacatggtatttcttatgtatatggcattatgccaaaatatgataattattggagctttaaatccatgagagctgtgctcagtgggctctggaataaagctggagttcaaaagaagcatttaaaaatgaagtagagggcatagtggcacatgcctttagtcccagctacttgggaggttgaggtgggaggactgcttaagcccaggaattcgaggctgcagtgaactatgatcatgccactgcactccagcctggtggcagagtgaaacttcatctcttaaaaatataaaataa

SEQ ID NO: 49333 - DNA, 342 bp, Homo sapiens
agcaatagaaactatccaaaatgaagcacaaagaaaagataaattttcaaaaaatgaataagtcatcagggaactgtgggacagtttcaagtggcctatatataaaggactagtaagcgaagtccccgaaggaaggaggaggacagaaaaaatacttgaagaaataatggctgaaatttttccaaatttgatgaaaactatataaacccttagatccaagaagttcaatgaaccctaggcacaaaaaaaatcatgaagaaaactacactaaggcatatcacattcaaattgctcaaagccagtgataaacattgctagaggagaaagacacattatatacag

SEQ ID NO: 49334 - DNA, 417 bp, Homo sapiens
taaggatgttgatatacattgtattaaacaagtatacctcaatttaattaataattccagttttgacagacaactggattgtttccagtgtttgttacaaataacactattttgaacattctcacatatttattgatatgcatatgcaaaactcccctctggcatatatccaggtgtttcattcctggggtaatatggtgtgtccatgtaggcaaataactaggataatatcaaattattttcccaagttgacagttttcattctcactgggtatgttggagggatcacttattgttctgtattaattaacttaatgttgcctgactacaaaattatgtaggcctgatacatattaaaatgtgtctcacgaggttaaatttacattcccctgatatctaagaatactgaatagctct

SEQ ID NO: 49335 - DNA, 1029 bp, Homo sapiens
tgaggctgggtaatgagaaccaaattgcaaatttgcagaatttttttcctaacattgtcaaacaattggtaatagtgttttgagattgaacagaatttgatgtgtttaatttgtaaagtgtatttttttgtggttacacagaagcagtaaaaaccttgacagaaataatgagctttaacataaccacagcctctaatctaagaattctgtgtaaggaccagtcttaccagagataaggtcaaatattttcctgtaagattttctcagcatggagagttgagagaactgtttaatcaagagcaggatggatggaagtatgtacaacaatgcttgaagtaagagggaaaaaagaaagcaaatgggtctgaacatatccatcagtattatttgtatatcacctattagcttctaagtagtatcaatattaataaaagaagtcttaagctctctgtgactcatggtcatgtgaaaattagaataccttagtttcctaggattcagtcaaccttgggattatgggtagtcagcctgttacgagagtcctggtctttaaagatctacttttagcaacaattcaggtatttagcaatatctgaaaactgtcaagccctgctcttttagtgtatatttactgttaaagcacagaacttcctcttttatattagtagaatttgggaggatgctgattcctattgaggttttgttcgattgtttgaaagtctaatgcagtgaaaagattactcatttctgtgcttcatcaacagttatttggcaccctttccctgtctttcgtgggttaagcatatcactttgaagtctgttcagttatgtactttaaacagaagtaacatttgttttccaaattctctttagccttcaaacccttttttctgaaatagtacaaaaatgaatgtttgcatagcaccttacatttttataaaaatataaatctcatatgattaatcttcctcatctttccccagatcatccctagcggcccaccagcataagcatatcctcatattgaag

SEQ ID NO: 49336 - DNA, 161 bp, Homo sapiens
attttaatctaacaattcaccttctttaataagaccatttaggttatctatttcttcttaattttaactttcaaggaatttgtccatttcatctaagttattgaatttattgattttccataaaatttaggatctgtgtgatgttcctccttgcattacta

SEQ ID NO: 49337 - DNA, 498 bp, Homo sapiens
ccctggggcagctgttgacactagaataaataaaacccattgtaaataaatgatgaatgacatctttacgcccaccatctgctggtgtaaaggttgttggaaggccaaggatgcagattttatcagttatatcataaactgcagtgagctttcaacagtcatcaaatggaattctttgagcaatcattttattatgaaaagcaaaatggttctgaatttaatttatataagtttttttctccacacttaatcaattttctctgtatttgatatataatgcttgtcaaaaggcaacaggatgtaaaagtcatctttatatccacttgtgaaacagacacaagagattatgcaaagctaggtaatttctcttttactcatggtactaatttctgtttttttaagaattgctggggaggaatgtgactgttctgtctgagtttaaaaccgagacagctcttataagaagttatttttcatttttaatcccttcttttccta

SEQ ID NO: 49338 - DNA, 761 bp, Homo sapiens
ggaatacatatatgttttttttcgtgacacttttttttttttgcttttggagatttttcaatttggctccaggacctgtatgatgttttcaagctttgcagagatgctcaagatatgactggacatttttgaaagttcctgtgtcctcttcaacacatcttctcaccaaacattaattgtagtgtcttttcttccagaaaacttgcataaaatgacttcctctcctgtgaaaacagtgtcctgctctgaatggagctttaaaggagtaggcacaaattgtaagatgatgtatcttgagggctgggggcttaggaggatattctgctgcctcccagaggctttgtggcagacggggtctgccaggggtggggaaagggaagcctccgttctttttggtaagctagccataaagacaggtaagggagtcctattttccaagaaagctgggatctgtttccgtactctttcctgccccctaatcgctgtggacagctcccagcagcacaaagagatgaagggcaaaggcaggatgcagcaggcaaagttaacattgtatttgtgagtacagttgaggataaaaaagggatgaaatccacggtgaggaccatcatggtgggggaatagtttattctaatggattcaagagctttggagaccaaactaacacatttatttttatgtgcagttaaagtcatagaaacctgttttgtgaaacctcagatttctaaagaaaaccagaagcaagaccttccttggtttaa

SEQ ID NO: 49339 - DNA, 1042 bp, Homo sapiens
gacaatgttctttggtaggcctaggtgagttaagttaaaagaggcacaagatgtgacaataaaggactctttttatagtagaagacataaagagaattccattgtaagggtagagaaaatttgttgtaagtttgattctttttagaaaactgatcatgagaaagattggtttttcttatgggtatagaaataactttattacataaagcacgtctttgaagttgtactggataaaatgagctcctcacatcagtgaggtaacaatagcaggagagagactttccaaatcctaagagttaccaaaacttctagaccatgattttgtacctttcatgcccaattttgaaaatgtcagtaaatgtgttcttaacatttagccatcacacaaaagagggttcatgtaatcttggtctccttgcattgtgaaatttcaccagtggtagtttgcagttgcttttgagaacatccagtttcacctaatctgtgatttgactgtatagatatgattactggatttcctatttaattatatttgtgggaggaggttactttttcattttgtattgttttaatgaaagtcaagccataacctgcttatctatttcatttagagtttctttcatttggcccctactgagctttatacaaaccctttttgttatttttcctactttgaagctctgtttttcagacttcagtctatgtcagaatcacctagagagcttgttaaaataccaatgactgagtcctgtccccagagtttcagtaggtttggggtgggacctgagcatttgcatttctaacagtttcccattactgggattacaggtgcccaccaccacgcccagctaatttttttgtgttttttagtagagatagggtttcgccatgttggccaggctggtcttaaactcctcacctcgtgatccgcctgcctcggccgcccatagtgctgggattacaggtgtgagccaccatgcctggctgaagattttttttaaagagtctgtttcagattattcacctcatttgagttccagaa

SEQ ID NO: 49340 - DNA, 374 bp, Homo sapiens
tgttgaattacgctcctgaatttaagaatctagacagtttgaaaagcttatctgtgacctgttacacgtaagctctttttctttttctcttctcttttaatttctgtttcattgaattaataacagagtcttgctgttgaatgtggagttggcttggtcaccactgccacagggatctcttttttgttttgttttgttttgttttttgagacaaggtcttgctctcttacccaggttggggtgcagtggcgtgatcatagctcactgccaccttgaattccaaggctcaagggatcctcttgccttggccttgtgagtagcttgggaccacagctgcacaccaccatggccagctaaagggatcttttaaagac

SEQ ID NO: 49341 - DNA, 321 bp, Homo sapiens
tatgggcagttaaaaaaacaaaaaaaacaacgaaggagtggtttgatatcattaggtttacattgagcttgtatcatccatagaagagtcagggttagaccctctggggaagagagtggacaacaaagataagccacactctactctatatccatgaaaaaatagtaaccatctctactaaaaatacaaaaattagtcatgtgtggtggcacgtgcctgtagtcccagctactccaggaggctgaggcaggagaattgcttgaacccgggagttggaggttgcagtgacctgagattgcaccactgcactccagcctgggc

SEQ ID NO: 49342 - DNA, 1575 bp, Homo sapiens
ttatttatttttctttgagacagtgtcttgctctgtcgcccaggctggagtgcagtggctcgatctcagctcactgcaacctccgcctccaaggctcaagcgatcgttccgcctcagcctccagagtagctgggaccacagggaccacaggcgcccgccacgacgctggcattgattgattgattgattgattgagagagaggtagcctccctgtgttgcccaggctggtcttgaactgctgggctcaagcaatcctcctgccttggactcccaaaatactgggattacaggcgtgagccaccgtgcctggctaattttcttcctttcttttttttcctgcgagacggtgggcgggggtatctccctaagttgcccaggctggtcttgaactcctgggctcaagcgatcctcccgcctcagcctcccaaagggctgggattacaggcatgagccaccgcttcctgccaaaagagggctttagggcacccccagaacctgagatctccctcatctgtcatctttaaagagaaggaagtcgactcccagtcgagccatagtccatttgtcccgggcacggtgactccggggtggccaggaccaaatgtgtctccttctggcttttgcaccgcaccaactaatccgcggcaggccgcacagctgccctggccttcgcggaggactaaggcgagggcggtgtacgctgctccggagtcccaccgcgggagttgaggcagcggattccgagggcagggtggggcggaatcgggagggatgcggacccggtggaacgcactgcgcagacggcgccggcgcccgcacacagctgttgactagtcttccagctctcccctggaagtcgtccaggcgccggtctcttttttctgcctttttgtttccctccccgcgagtcggcgcgacggtgaatttccgtttccggcggtgtggaagcggacctgaggagtcgcaattgtgaacaggttcggtgctgcggctggggctcagcgatatgaggcagcatcgacaatttatggaccgcacgcattatctgcttacattcagctcttcagaaaccttgctaaggctattgctacgtattgtggatagagcaccaaaaggcagaactttcggggatgtcctgcagccagcaaaacctgaatacagagtgggggaagttgctgaagttatatttgtaggtgctaacccgaagaattcagtacaaaaccagacccatcagaccttcctcactgtggagaaatatgaggctacttcaacatcgtggcagatagtgtgtaatgatgcctcctgggagaactcgtttttattggcacaagggactcctgggtctgagtaatgcaacagtggaatggcatattccagacactgcccagcctggaatctacagaataagatattttggacacaatcggaagcaggacattctgaagcctgctgtcatactttcatttgaaggcacttccccggcttttgaagttgtaactatttagtgaaaagttgatagatcatttaaagaacagctttactctctacacattatataagtgatttcaaatgaa

SEQ ID NO: 49343 - DNA, 1630 bp, Homo sapiens
ttatttatttttctttgagacagtgtcttgctctgtcgcccaggctggagtgcagtggctcgatctcagctcactgcaacctccgcctccaaggctcaagcgatcgttccgcctcagcctccagagtagctgggaccacagggaccacaggcgcccgccacgacgctggcattgattgattgattgattgattgagagagaggtagcctccctgtgttgcccaggctggtcttgaactgctgggctcaagcaatcctcctgccttggactcccaaaatactgggattacaggcgtgagccaccgtgcctggctaattttcttcctttcttttttttcctgcgagacggtgggcgggggtatctccctaagttgcccaggctggtcttgaactcctgggctcaagcgatcctcccgcctcagcctcccaaagggctgggattacaggcatgagccaccgcttcctgccaaaagagggctttagggcacccccagaacctgagatctccctcatctgtcatctttaaagagaaggaagtcgactcccagtcgagccatagtccatttgtcccgggcacggtgactccggggtggccaggaccaaatgtgtctccttctggcttttgcaccgcaccaactaatccgcggcaggccgcacagctgccctggccttcgcggaggactaaggcgagggcggtgtacgctgctccggagtcccaccgcgggagttgaggcagcggattccgagggcagggtggggcggaatcgggagggatgcggacccggtggaacgcactgcgcagacggcgccggcgcccgcacacagctgttgactagtcttccagctctcccctggaagtcgtccaggcgccggtctcttttttctgcctttttgtttccctccccgcgagtcggcgcgacggtgaatttccgtttccggcggtgtggaagcggacctgaggagtcgcaattgtgaacaggctcagcgatatgaggcagcatcgacaatttatggaccgcacgcattatctgcttacattcagctcttcagaaaccttgctaaggctattgctacggacacggtagccaacctgagcagaggtccagaacctccctttttcaaacaattaatagttccattaattcctagtattgtggatagagcaccaaaaggcagaactttcggggatgtcctgcagccagcaaaacctgaatacagagtgggggaagttgctgaagttatatttgtaggtgctaacccgaagaattcagtacaaaaccagacccatcagaccttcctcactgtggagaaatatgaggctacttcaacatcgtggcagatagtgtgtaatgatgcctcctgggagaactcgtttttattggcacaagggactcctgggtctgagtaatgcaacagtggaatggcatattccagacactgcccagcctggaatctacagaataagatattttggacacaatcggaagcaggacattctgaagcctgctgtcatactttcatttgaaggcacttccccggcttttgaagttgtaactatttagtgaaaagttgatagatcatttaaagaacagctttactctctacacattatataagtgatttcaaatgaa

SEQ ID NO: 49344 - DNA, 1483 bp, Homo sapiens
ttatttatttttctttgagacagtgtcttgctctgtcgcccaggctggagtgcagtggctcgatctcagctcactgcaacctccgcctccaaggctcaagcgatcgttccgcctcagcctccagagtagctgggaccacagggaccacaggcgcccgccacgacgctggcattgattgattgattgattgattgagagagaggtagcctccctgtgttgcccaggctggtcttgaactgctgggctcaagcaatcctcctgccttggactcccaaaatactgggattacaggcgtgagccaccgtgcctggctaattttcttcctttcttttttttcctgcgagacggtgggcgggggtatctccctaagttgcccaggctggtcttgaactcctgggctcaagcgatcctcccgcctcagcctcccaaagggctgggattacaggcatgagccaccgcttcctgccaaaagagggctttagggcacccccagaacctgagatctccctcatctgtcatctttaaagagaaggaagtcgactcccagtcgagccatagtccatttgtcccgggcacggtgactccggggtggccaggaccaaatgtgtctccttctggcttttgcaccgcaccaactaatccgcggcaggccgcacagctgccctggccttcgcggaggactaaggcgagggcggtgtacgctgctccggagtcccaccgcgggagttgaggcagcggattccgagggcagggtggggcggaatcgggagggatgcggacccggtggaacgcactgcgcagacggcgccggcgcccgcacacagctgttgactagtcttccagctctcccctggaagtcgtccaggcgccggtctcttttttctgcctttttgtttccctccccgcgagtcggcgcgacggtgaatttccgtttccggcggtgtggaagcggacctgaggagtcgcaattgtgaacaggctcagcgatatgaggcagcatcgacaatttatggaccgcacgcattatctgcttacattcagctcttcagaaaccttgctaaggctattgctacgggggaagttgctgaagttatatttgtaggtgctaacccgaagaattcagtacaaaaccagacccatcagaccttcctcactgtggagaaatatgaggctacttcaacatcgtggcagatagtgtgtaatgatgcctcctgggagaactcgtttttattggcacaagggactcctgggtctgagtaatgcaacagtggaatggcatattccagacactgcccagcctggaatctacagaataagatattttggacacaatcggaagcaggacattctgaagcctgctgtcatactttcatttgaaggcacttccccggcttttgaagttgtaactatttagtgaaaagttgatagatcatttaaagaacagctttactctctacacattatataagtgatttcaaatgaa

SEQ ID NO: 49345 - DNA, 429 bp, Homo sapiens
aacagaagtttgttatgtaaacaaatgctatcaaccatttgttcacctagcaaacttttgttaagacctgcaaaggaacaagcaccataaaagcaccagggttaagatacttgcacatattatttcaatatactcttcatcattttagtacatttatataacatactgcaattgctaacgcatatgcacatgctttacttctaaatcacattttagataatttctttctgtgcaagttcttgtagacctaatccaaagtatacttactcactctttggcttcaaataatataacttgtctgctttttaaccatttttctttccgaatatcccactgaaagctgatctaacattgggcctatggaccttggccctgcctgaattctcttgagggccaagggccctccagcatcacagactgtctgagaca

SEQ ID NO: 49346 - DNA, 905 bp, Homo sapiens
ggtgggagtccagaaggaagatactgcaaatacttttttcaacatcactttctcataactaacaagatcttttctccagaatagctctatttttttaaaaaaattaattgtgctaggagctctcataagtatttgcatatccagaagttgacctagggaataaaaagaggcagaaaaatagtttagtggcttactaattaacacaaatttgagttatatgcaaactcagtagtgtcttctcagcattaactatagacagttcatttgtcctgaaagctttattgtttgattgtgattgtgtagatctttctcccataaaacattggattagtaggtgtacatatatgctaaacaactaaaatacagcttaatatccttaatttagatacattttaaatcttaactttagcaattatcttttcctttggcttctctgggcaactagatttcaactcatgacttgattaagccatctccattttgaactttctgaaaaaacggaagaaaatctctgatttttcatagtaaaacataaatttaattactggtaggtatatattctacttgctttttttgaaagctttagggagaatttcaacctctgcattaaaagtcagtaagaaaaagctcttacgacaataactttcccctaaaaagcacaaatgcttctttgcctgtcatttaaaaaatatttattgtgcactcaatgcagaaattgtaatgatatgatgctctagtagagttataaaatctttgacgtaattattagtttggagaaagtaaaggcctaggtatcaatatctaaaaatatataaacatttttttgatcttaaacagtcattctcaacctcttccattttttctattcatacctcttataattcaaacagcaaaatataaatcct

SEQ ID NO: 49347 - DNA, 348 bp, Homo sapiens
aaaaatattgaagacgacagagaaaatgatgcattacttaggagagcaacaatttcaatgactgtagatttctcatcagaaaccatggtagccagaaagaagtaaaaaaagcatttttaaagggcctaaagaaaaacacagtcaaactccatcgagtgaaaaattcctgcagaaatgacagtgaaataaagctgtctcagataaagaagaactaagagaatttgttgccagcagacttcctctaaaataactgttaaagaattttgttttcagaacaaagcttttcttttaaaaagaaaactatcgttaacatttagctatattagtatcagacaaagtagacttcag

SEQ ID NO: 49348 - DNA, 332 bp, Homo sapiens
tcatccacttcatttaaatatacattaagaatctataagagccaaatatcagtcattttaaaaatatgataagcacttaccacaggaaaagcacagatatagcacagaaaagttctagaatacatcactaagtaccactttttaatacttattagcagctttctggctttttttttttttaagtactaaatgttcagtttaaaacaactgggaaatacaaagagcctacaaagaaaattttaaagtacctgtatccctagtattcagaagtaagctctactattaaataagatattctttctttttatatgtatcgttaaataaataacata

SEQ ID NO: 49349 - DNA, 398 bp, Homo sapiens
tggaagaagctttctgcagaaataatccagcagacacaagacaacggaggtactcggtggaaagggaagtatggtttgagcccctggatccagctatagttgaagccacagctatgatgagcttaaatgagcccaagaagttttttttaattgcttcatccacttggaatttgcagtctgtccctggcaaaagagccagtactaatgcatatctgctctgtgaactcttccttagctgccttgctcaaaagctaatcattccttctcttatactttgaactttagtaccctccactgatttccatcattgcctggtttatgccatgttgtaattgcttgtttcagccctctcaactttgacttgtaggagcaaggacctaagaggtttcctggggctc

SEQ ID NO: 49350 - DNA, 258 bp, Homo sapiens
caaagaagaccctttcttatctaagccactcttatctaagccaccgcttgtcacgttttatgttgtttgcagccaaatgcattcctcattgatggaatgtccaacattgtccccaagtcccccagatagatccctgggggctcttgacagacagacagcaggcaagcctgggacacacgctgcccccttctgctttcctgtccctccatcgtgttaagctggtctctcaggtgggcatcaggattcagctatcccagg

SEQ ID NO: 49351 - DNA, 237 bp, Homo sapiens
gggaaatcgcaaggaggagctggtagagaaggaagaaaaatcttcacctggggtttcactgcattgtgtttgaggtgcgggaggtataggagagacatccaaacacgtggagtcaggaggtgagatttagatctggaattcactgaagggggagaccccgatgtacgtgttgggagtcatctacctagaaaagaccggcaaataaataagatggttaaaaaagagagagtgagatca

SEQ ID NO: 49352 - DNA, 103 bp, Homo sapiens
tgggagggattcactgtggactgaatttgtagattatggcaagttattactatattagtgattaaatggcactttttcaaatcccttttaatttgcatggagc

SEQ ID NO: 49353 - DNA, 1494 bp, Homo sapiens
ggggtactcggcggcggcggagcgggcggcagagcagggcggcggcgactcgcagggtaccaccatcttaaggacagaaaagctacaggactctaggaggccaccgtcctgatttgggaagtccaacttactttggccagacagcagctaagctggttcatcccatcagcctggattggtgaaactgaatcacaggagatatttccaggtttgctgggatgggaaacctgctcaaagtccttaccagggaaattgaaaactatccacactttttcctggattttgaaaatgctcagcctacagaaggagagagagaaatctggaaccagatcagcgccgtccttcaggattctgagagcatccttgcagacctgcaggcttacaaaggcgcaggcccagagatccgagatgcaattcaaaatcccaatgacattcagcttcaagaaaaagcttggaatgcggtgtgccctcttgttgtgaggctaaagagattttacgagttttccattagactagaaaaagctcttcagagtttattggaatctctgacttgtccaccctacacaccaacccaacacctggaaagggaacaggccctggcaaaggagtttgccgaaattttacattttacccttcgattcgatgagctgaagatgaggaacccggctattcagaatgacttcagctactacagaagaacaatcagtcgcaaccgcatcaacaacatgcacctagacattgagaatgaagtcaataatgagatggccaatcgaatgtccctcttctatgcagaagccacgccaatgctgaaaacccttagcaatgccacaatgcactttgtctctgaaaacaaaactctgccaatagagaacaccacagactgcctcagcacaatgacaagtgtctgtaaagtcatgctggaaactccggagtacagaagtaggtttacgagtgaagagaccctgatgttctgcatgagggtgatggtgggagtcatcatcctctatgaccatgtccaccctgtgggagctttctgcaagacatccaagatcgatatgaaaggctgcataaaagttttgaaggagcaggccccagacagtgtggaggggctgctaaatgccctcaggttcactacaaagcacttgaacgatgaatcaacttccaaacagattcgagcaatgcttcagtagagctctgctcaaagaagaggatctatgtgctgacctcagaagatgtatatgtttacataatttaatacagattgatgttaatacttgtgtatttacataaccgtttccttcttgtcactgaaatatatggaccttaatttgtatcctgactgactcaacccagcagagcataaattgacttgagagccttacctttgatgtctgaaatgaaacccccttctccaaaggcaaaattcggagactttgatctttgctactggagtcctttaacaacatctataacgataaaaaattcctaattgtc

SEQ ID NO: 49354 - DNA, 445 bp, Homo sapiens
  misc_feature (38)..(38): n is a, c, g, or t
agaatttaaataccgacctcacctatagggaaattttnggcccctcgaggcccaagaattaaattaaacccccaggaggcagaggttgcagtgagcccgagatcacaccactgtactccagcctgggtgacagagcgagactgtccaaaaaaaaaattgataattaaatgttaaaagtcagcgactccagtaatacgtggtgggctgagtattagactactggcttacatcctctgatgtcattactttcttgttcgtttgtgacttgaggttggattttaagcaaatgtatttgtggctttttaccaaggtcatatggccagataacttttcaaaagcattagttaaagaattctgattagtttgaattagaaacaaaactcaaagaacatgacctaatttaacaggttaatttgaagtgcatctgccaagtagaagaccagca

SEQ ID NO: 49355 - DNA, 1031 bp, Homo sapiens
gctaagcagagtaagtaaatcgaaataaaactttaaaaatgcctttatggagagaatgactatctctgaaagcttgtttttaatgatgataaaattcatgatcagaatttgtttctgtttgctttaattcaggggtcaaaaactgaaataccatcagaggcccaggaggggctagttgtaactggcaaatatagtaaattaatttgctctggttgataggtagcaagcagggtttatatacattgtcacctacttttccagttaacaggagagactggagattttatgaaatttgatatttaaatgttggtaactgggttgggcaccatggctcacacctctaatcccagcacttcgggaggctgaggcgggtggagcacctgaggtcaggagttaaagaccatcctgaccagcctggtgaaacacagtctctaataaagatacaaaaattaggccgggtgtggtggctcatgccggtaatcccagcactttggggaggccaaggtgggcggatcacctgagtcaggagtttgagaccagcctgcctaaatggtgaaaacctgtttctactaaaaatacaaaaaagtagctgggcgtggtggtgggcgcctgtaatcccagctactctgggggctgaggcaggagaatcacttaaacccaggaggcagaggttgcagtgagcccgagatcacaccactgtactccagcctgggtgacagagcgagactgtccaaaaaaaaaattgataattaaatgttaaaagtcagcgactccagtaatacgtggtgggctgagtattagactactggcttacatcctctgatgtcattactttcttgttcgtttgtgacttgaggttggattttaagcaaatgtatttgtggctttttaccaaggtcatatggccagataacttttcaaaagcattagttaaagaattctgattagtttgaattagaaacaaaactcaaagaacatgacctaatttaacaggttaatttgaagtgcatctgccaagtagaagaccagca

SEQ ID NO: 49356 - DNA, 220 bp, Homo sapiens
catcaccccatgccatgtcccctgtacccctcatgctctgtggactgaggaagcgcagtttctggacctccagttcgcctcatagacctgtccttcgaggaacaaactctgtctgtctgcctcccctctcccacactgtcttctcaagacccttgccctctcatctctctgcctttttttagttatgctaaaatatgtgtgacataaaatgtaccatcct

SEQ ID NO: 49357 - DNA, 495 bp, Homo sapiens
aacaaggagtcagtactcagtccttgggtgtggttgaggcttgaggtcctgattgagcaaggcagtactggacaaggtctacatcagcattcaagttcaatggggggcactagtggcttcaaacttcctggtctaattatgtctttagacacttaataactactgagggccttgaggagctcttgtttatttgggttgatatttgttaatatttatggcatttgacattaaaacagaaaatgttaaaatgttatttactaattcatgttaaaatataatgaatgaaccaaatgtaggttaatataaatagaatgctttctgaaaaatcaactgttgtgtccaaacaaaaaaacaagaagtgtgacactggttaacttgtttcaaatctgatgtctggcttaatggaagatgtttgtattctcatatctgcttttgtattaaatctgttggtatatcataccctaccaagagaatgagatcaaaaacaacaaatgt

SEQ ID NO: 49358 - DNA, 351 bp, Homo sapiens
cggtgctggtgtcctcatgagagcaggagagcagacactgacactcgggtgaaggctgcatggagtcagagcagggcttggtgtgatggcggccacaagccaaggaaccccaggtatttcctgcaactccagaagctggaagaggccaggaaggatcctcccctggcgccttcagagagagtctgtccctgaagatgtcttgacatttgacttctgggttgcaggtcttggcggcggggtacatttctgatgttagaagccacctggttggcggcgatgtgtcactgcagccccccacaggttctgggtgtccatgtggtcgggggcagaggtgggcagggacagacatgt

SEQ ID NO: 49359 - DNA, 424 bp, Homo sapiens
actgaagtggagttacatcctatgcaaatgaagattgattggcggccaatcagaggctgaagtgaaggcttggcccatggccatcaaaggctgaagttctccctttggtttaattccaagaagtcagccgtgggttggccttaggctccttgtctccagaccctattctcctgcctcagttccttctttagaatatattactaataactgcctgggaatgatattgccctagacatagacacttgagtgacttcctgcaatgtagccttctaagagagtccatccctacagcatgtccacaggcagtgtgaggcttcaggggtcccctggcagctggcagcactgaagaatgagttcaagcttgaaaattgactgctaatcacagcaacaataaaactattattttttaaaaatctgataacat

SEQ ID NO: 49360 - DNA, 525 bp, Homo sapiens
tgagaagttcagtatgtttgaaagcataattaggaaactttttaacatgtactttctccctgcactctaaaccccaaggtttagagaaagttaggaaatatttaacttcccacacgcttttatttacagagcagtccccccttgtctgtgatttcacttttcacggtttcagttatctgcattcaaccatggtccaaaaatattaaatgggaaactcggccaggcatggtggcccacacctgtaatccccacacattgggaggcctaggtgggtgaatcattgagcccaggagttcaagaccagcctgggcaacataccgagaaccttgtttctacaaaaaatacaaaaattagccgagggtggtgggacgcacctgctgtcccagtaactcaggagactgagctgtgaggatggattgagactaggaggtcaaggctgtggtgagatgtgattgcaccactgtactccagcctgggtgatagagtgagaccctggccactgacccccaccccacaaaaaaaaaa

SEQ ID NO: 49361 - DNA, 372 bp, Homo sapiens
gagagagctagcaccatgagcttcaatacctggagttgtattgttcatgtaacatacaatgagaatggtgcttcctggagctgtgcagtcaggcagcctgctatcttggaagactagagatgatggtgagttcactgttcactcctctcctccagtgaccttgtcctccacctttggagatacactcccatgcatgctcgtgagagcatgtgcttccactgtgggggaggaccagactttgtttgtatctaatctgttgcagaccaatacttttgtaaaatatagtcacaaaaatgagattaaaaacacaaaggcattccaaatacaagtccactgatcatatgcttggatgtcgcagcagtgtttctaaac

SEQ ID NO: 49362 - DNA, 369 bp, Homo sapiens
cctgggattacaggtgtgagccagcgcacccggcctcttgccctctttagagcagttctacataaatctgtggaataatctgctgacgttagaaataaacctttctcagggtgtggccataatctggttcgttgtaattgctgaaggaaaaaactgaacccttaggaacagtttaaacattctaggtggtttttagatatattattcctgttagagttttgaactttgatcatcttgttagaaaaaagaggccaggcactgtgcctcatacctgtaatcccagcattttggaggctgagtcgtcaggaagtcacttgagcccaggagtttggtaccagcctgggcaacatatggagacctcgtctctac

SEQ ID NO: 49363 - DNA, 508 bp, Homo sapiens
taaatatttggtttaagaatatttaaaagggctgtgttctcattgtggaagttgtagatacctaaatgccacttcataatgggcagataggaatgctttcttaaaatattttttctagagggataaaatctaagcaggtttcagaactttagaactcctgaataattttggcatgtgcttaaactgcccttttgacctgcttttaacatacaagaacagtttaactcaaatccagtgcaccttcctgccagagaaagtgctttccttttggatgacttgacttccaaagattgaatataatgttaaaatggtttataaaaataaactagccatgttttccgatcaaaaaattgacctaaatctcccctgcttacttaaaaagattccttctctctcttagtttgtggaataatgaactcatcccaatttttaattgctgaactgacaaaagacaatccttaggtgtttgctagtttgttctccactctttttgtttagagaacactga

SEQ ID NO: 49364 - DNA, 1204 bp, Homo sapiens
cagcacattctaccaccattggcacctgaatactcctctagggggcctgaggttggttctacccacccctgccactacaatcacagctgacacctacctgcacatggcacctgcaggcttggagactgagctgcccaccccctcacagccaccaccaacaccagcatacactgctcaagacccagaagattatcccatcactgccactgctgttttatgccagctgcccagaggcccaagaatctgcccacccacccagctcactgctgccactaccagcatctgagtaagccacctgaaggccaagaattggcccacctggactactagtgccaactcaccactgcctctactggggctcaaagactggcctacctggtgccccagtcctcagcaaaactttaccacaggccccactaataactgcacctgaaaccactgaataaattacaaacaccactgacactgttcatagccaaagaaatcgtacagataccgtaccactgcaagcacccagaatcaaggccaaagggccctaccaaacaacaccatagatctatcttcaggaaaacattccctacagaagcaaattcaaaaaactggaagaagtgactatcacatcagatgtgcagttatcaatgtaggaaacatgaaaaagcaaggaaatataactccaaaggaataacataattctctagtaacagatcccaataaaaaacaaatttacaaaatcctggaaaaagaattcaaaatgttgatattaaagaagctcaatgagatacaagaaaattctgaaaaacagtacagagaaatcagaaaaacaattcaggatatgaatgagaaatttaccaaagagagatataaaaaagaaccaaacagaaattctgtaatggaagaattcattgaatgaaatacaaaatacatttgaaagcttcaacaatagactagatcaagcaaaagagaagatctcaaaacttgaagacaggtcctatgaaataacccaagcagtcaaaaagaagaaaaataagaaagaattaacaaagcctttgtgatatatgggacaacataaagtgaccaaatacacatattattggtttcccagatggcaaagagggaagggaaggttagaaaaatctatttgatgaaataatagacaaaaacttcccaagtctaacgagatttagacatccagatactggaggct

SEQ ID NO: 49365 - DNA, 324 bp, Homo sapiens
ctaatttctatgaggagctcatgcaaaccagacactgtactaggtgctttgcatatagaatctcatttcatccttgcaaaaaccttgtggagtaggcgatgttttacattttacaagtgaagacactctagttcagacaagctaagtctgtctgtagttcagacaagctaccctgcaagtgaaaagtagagggaatattacaatctagccttctctgattccaagtctcatgttctatctgctgtcccacatggcttcctcttgccctttgcagggtatcttacagtaataaagaaaagaatgccttggatacatggcaataca

SEQ ID NO: 49366 - DNA, 257 bp, Homo sapiens
gtcagatgccaccttcctgtcatggcctgaccaagtccttcaggttaactttcctgtaccctggctgaggaaggagtccatttaaatggttggggtgggggaccttcaattttatttttggtttacaatccagaatggccaaaggcctttcgcacccaggtgctgaggcatgggtcaggggctgccaggtgagcccccggctatgagcctcgggctttctaagcacgggtaccatatcaagttgtgcactaggtgct

SEQ ID NO: 49367 - DNA, 491 bp, Homo sapiens
ttggtgggactgggagttcagcaggaagtattgtctgtgtgtgatgacggggcagtattgccagtcggcaatgttgtatttgcattctttatccctaactctgaatctaggactccatgaaaagccgggtcacccacaaaacatttcttccaatacaaagtgtattattacgtctattataaactagtttcatttcagttatttatcttcatagagtgggaaagtctttttctgaaatactaattctatgaaaataataattttagtgaatctttgccaagaagttatagaaacttggaaataaatttctcattttcagcacaaaattaagtgatagtccctaagcagtaagagagaataccatgtatttacactgtggcatcatttagtatagtttacactgagccatatttatttataggcatttaaagtgaatcagtatgtgtagtgttgataaaaatcagtatctgtaaagataacatcaggaattc

SEQ ID NO: 49368 - DNA, 290 bp, Homo sapiens
tatgtgctaaattccctgattatgattttatgaaatcctatattttctgcacatttttaatgtttgattttgctatggactgtgcttatttcagattttatactcatccaagaagctaatgtcacaaatacagatatagaaccgaaagaacgatgtcagttctaaattgtttacaatactattccccttctttacttgtcatggcctgatctgttcaatcctgacacttaaattattggcattaatacatatagtggtaatgaataaattatatttaatacaatgtgtta

SEQ ID NO: 49369 - DNA, 206 bp, Homo sapiens
ggcctaatattttggtattcttatctataaagtagtagaatattatgggatttttattgttttttaagcaggctatgtaataggcactagctgctcttccatcttgtttgaggatattatataagtacacaacaaggccgttctacaatattctgtaagtcagacagttgtctttacttgaagaagagggaagacagtggtatact

SEQ ID NO: 49370 - DNA, 304 bp, Homo sapiens
actgctctaaaaatcactaagattctttttttctttcctttgattgagatttaaaaaaaaacataacatgtaatttatcctcttaacaaattgctaagtgtgcaggactctattgttaataatatgaacattgttgtagggaagatctctagaacttttttcaccttgcgtgactgaaactctctacccattgaacagcaactccctatcttccctatgccctattatcccctgtcagctactgttctactttctacttatatgaacttgatcattttaggtacctcatagaagtggaatcatg

SEQ ID NO: 49371 - DNA, 262 bp, Homo sapiens
ccagcgtccttccgcctgctccgccccttccccaggagcagcctctgcttaggtgaggctaagagcgcaggagcagagttctagcttactgtgtgaccttggagaaaatacctaatctctgtgagccccaaggcaaaatgaagagggtgtgagctccacagagggtaggggccaaagccctgggatgcaggtgagtaggtccacaacccgcaggtcttggatctcaattgcccaggaggggacccgagaccctaaagaccat

SEQ ID NO: 49372 - DNA, 468 bp, Homo sapiens
agcctgtctgttgaacataaatcttgatttttatgtaatcagatttttctccttacggttatgttcttggaattttatttaagaaatctttttctatcctgagaccacaaaaatgtccccaccattttcttctgtttcatagttttgccttgtatgtttaatcctttaaggcatgtgtagttcattttatatggtgtgaaatagttcttattcatttattcaacacatattggtggagtgcctgctgaaggtagtactcttcagagtactttgtatatatttgtgaacacatattcttgccctggaagcttatgttgtccttcaaggtagatccctactcggtttccacctgttttcttcagccctcaggatgaattccacaattttacacatagcaccagttaaggaataggctttattggagaaaaggaaggcttattagaccagcatcagcaagaaaaaaaaaaa

SEQ ID NO: 49373 - DNA, 356 bp, Homo sapiens
cggatttcaaaaacaatgaaaaaattgataatgcatttggaaattgtagaaatatgagagagtcctaattttgaaaatgaggcactctgatacaggtcagttgtacaaggacatgagtacattagtactttgataccttcatgtttggcagttatagtcaggtacttcttttatgaatttaaaattagtaatttattttatgaccaacttcaacttttcaggagctgttattgtgaaagtttttttgctactatgagttttatccagtcagaaacaggaaccaattgtaaacaattacttctattgctgcaaacaatttttaaaaacctgccaaatatgcaatgccttgctattca

SEQ ID NO: 49374 - DNA, 476 bp, Homo sapiens
atactaacccctcgtcagatgcatcgtttgcagatatttcctcccattctgcaggctgtctcttcactctgtcgattgtttcttttgctgtgtgaagctttttagtttactgtaatcgcctttttctatttttgtgtttgtgcctgtgcctttgagttcttttctataaaatccttgcccagactaatgacacgaagtatttccactgtgctttcttcttgttgttttataactttgggtcttatggctaagtctttaaaccattttgagttgatttttttaagaggtgagaaattggggtctaatttcattcttcacgtcaagattactttgaataaaacttctaaatgaaaattttaaaagttcagccctttgctctgagtttttgtctctattctactcccacaccccccccaactttagtcactgtggaacccacagtgaggtcctctttaaagctggcttgcctgggtttt

SEQ ID NO: 49375 - DNA, 466 bp, Homo sapiens
tggggttacaggcatccgccaccacacccggctaattttgtatttttagtagagatggggtttcgccatgttggccaggctggtctcgaactcctgacctcaagtgatctgcctgccttggcctcccaaagtgctgggattccaggtgtaagccaccgtgcccagccctaaaacgtatttaaaatgttattttgttcccttaaaaatacttattatttttgcttagtgcaaagataatgtgtgtttatgatgaaaaccctgaaaatgtagacaggtataagaaatagtccattaactaatcacccagaaataaccattgctatgcattttcttttggccttttttctaagtacatatatttaaaaaataaaattagaatgctattgtattttttaacttcatgttttgtatcatgagcaaattccctcctaataaaagttatacatattttaacatacttttcctg

SEQ ID NO: 49376 - DNA, 495 bp, Homo sapiens
cagtatgtatagctgatcaccttgggctggttgcacattgttggataaagcaagattaaacaaggtattacaaaataaatgggaggtcagttaaagtacgagataggtttggctgggtgtggtggctcacgcctgtaatgcctgccttggcctcccaaagtgctgggattccaggtgtaagccaccgtgcccagccctaaaacgtatttaaaatgttattttgttcccttaaaaatacttattatttttgcttagtgcaaagataatgtgtgtttatgatgaaaaccctgaaaatgtagacaggtataagaaatagtccattaactaatcacccagaaataaccattgctatgcattttcttttggccttttttctaagtacatatatttaaaaaataaaattagaatgctattgtattttttaacttcatgttttgtatcatgagcaaattccctcctaataaaagttatacatattttaacatacttttcctg

SEQ ID NO: 49377 - DNA, 701 bp, Homo sapiens
cagtatgtatagctgatcaccttgggctggttgcacattgttggataaagcaagattaaacaaggtattacaaaataaatgggaggtcagttaaagtacgagataggtttggctgggtgtggtggctcacgcctgtaatgccagcactctgcgaagccaaggcgggcagatcacttgagctcaggagtttgaggccagcctgggcaacatggtgagacctcatctctacaaaaaatacaaaaattagccaggtgtggtggcgcgcacgtgtagtcccagctacttgggttgaggtggaaggattgtgtgagcccaggaggtcgaggctgtagtgagcagtgatcacactgctgcgttccagcctgggtgacagagtgagaccgtgtctcaaaaataagtaataaattaattaagtataagataggtttggggcaagaatagttgcaaggagtctagtgttacgcgtcaagtgtctgttgagaggacagtggcttggccctttgaaaattatttcctaagactcagtgctaaattacatttcttttaatgtaaattttcttattggcagtataacatacatacagaaaaattactagagtatcacatcatgataggtttttcacaaagtaaacatttcacacagtaaacaaagtaactagcgccccaatcagaaaaggtaattgttattaactccccagaaa

SEQ ID NO: 49378 - DNA, 382 bp, Homo sapiens
cgggccatgagggatggaggtgattaaagtatctctactcccggtgggtatctggggaggatgcggtcggtggttccatgggaaaggtttcagtagctgttgttttacttaaagactgctcttgggaatggctgtggaggccatttgagggctctaactggaaacagtggccatctaatctgcttttcctcttccccaaagttttgcctccctctttgctgcctcctgcctgcctgtcctgtttgttttctctttgcttagctctcttccttggagtggtactcccacattttcttctcttccataaaaaaatacaggtgggctgagctcactcctctaatcccaggactttaggaggctcaggtgggtggatcacttgagc

SEQ ID NO: 49379 - DNA, 495 bp, Homo sapiens
agtgtcaagccagccacaactatgggcagctgggcttactcccactggggaaccctgggtccacagagcaagctccttggggttcttctgcctgcgtggtgaggagtctggggcctttatccacctgctcccagcagctgttgattgagggctgctcctgaaggcattaagatcttgacacttctggcctgttgtttgcaggggcagagcagttttatgacaagaaaaagtcctcaggtgaaaaaatgcaggtgtcagcaggtggagacacagggcaggggatctggaggaacatcagtggggtctgcgacaacctgtgaccacctcacagacaaggtgacttctggcttctcagtgactcagccacacttctctttttcactcactcttctttctggtcctcactaagacaaaatacagaatacagagcagcagttcacgggctatagcatttaaggagattaaatacaggcctccaaccacacaggccatctg

SEQ ID NO: 49380 - DNA, 591 bp, Homo sapiens
gggttgggggggtggtgcaaggcagggcatggccactcattgtggagcatctgcccactcaccgtgaaacccggattcaaactggcttcaattttaaggggactgtgttggctcatgttaccaaaaactcacagggttgagggcttcaggagaggcttgatccagcagctccacatgaccaagaacccatcttttctgcctcttggctttgccctccagcatgtttgctgatagcatggagggctctgacactccctcataagctctaggagtgccccctggtgtcactctaaataagcactggatctcagtaaaaagtgcttgctgggccgggtgcagtggctcatgcctgtaatcccagcacttcaggaggccaaggcgagtggatcgcttgaggtcaggagttcgagaccatcctggccaacatgactaaatgttgaaaaatacagaaattagccgggtgtggtggcacgcacctgtagtcccagatactctggaggctgaggcagaagaatcgcttgaacccaggaggcggaggttgaagtgagctgagattgcaccactgcactccagcctggatggcagagcgag

SEQ ID NO: 49381 - DNA, 663 bp, Homo sapiens
tgaatccgggaggtagaggttgcagtgagccaagatcgtgccattgcactccagcctgggcgacaagagcgaaactctgtcaaacaaaaacaaaaacaaagaaagaaagaaagaaaagaaaaatagcaagtaggttagtgtgactagagaagagtcagagaaagtaggggagactagtaggaaatgatgttaaagagataacagaaatccagacaattaaagaccttgtaagctattgtacagacattggttttcttctaaatgagatggggaaccactggagatgtttgagcagaggagagactttaatttaactttcatttttaataggaaaatctgactcgtgttgacagtagattgtggtagggggcagaggtataacaccagttaggaggctattgaaataatccaggcaacagataatgatgacttgaaccaggatggtagctgtgagagctgtgagaagtgggtgaattattgatatattttgaagagtaaataggatttttttattatttgaagattgaatgtgagaagaaagagaggagtcaagaaaataccaaagagtttggattctaagcaaaggatgccgtggccatccttatgaaaggaagcaactgtcatcaactgaaggctgtcagtaatataagttttcggatgtgt

SEQ ID NO: 49382 - DNA, 572 bp, Homo sapiens
tgaccacatttctgatctacacagtatgaactgtagtctggaatatgcacttctttgtgcctgactagcttcattcttctggtttctgctcttggtcttttggctggttcacattttgcagtctgctgtttatggatagaattactgaggcagaatatgtgatatctgaaggtagcagagacctgtaattttagttattgccttagctgttgggtagggatgaactagtgaagtgggtctgggtaggctggccagaactaaaaataatttggctataaggaacaagtttctatgcttgttctttgccttggtattttccgcttcttcagaatataagggccaactaccactttcttcagacatgctgcaacgtccgccatgcccagtcatgcctctgccaataggcagcactcccgcatgagacagaaaggttactgaagatactgcctagtggagtcccaggttgaagtcatactttgagctggacatagcagtgggcctgtgattacttgaatggctgtttcaacttcagaagtgaaagtggtaaaactgaatccaagagcaccttaaag

SEQ ID NO: 49383 - DNA, 1070 bp, Homo sapiens
gtaaaactaaagttgaaaagacagcccaggccaggctctgcagctgttaatgtctatgggtagaaggcaacaagtatttacaaaacagtatttaccaagtattataacagacatatacaaaatgccacatgatcttgtttaatccacacaataatcttgtgaaatagtgtctttttaataacagctttattgagatataattgacataccataaaagccacccttttaaaatgtacaattcagtaggttttagtacattcatagtgccatgacatcaaattagttgttatcactaattccagaacattgggttttttaaaaattttgatagagatggagtttcactcttgttgctcaggctggtctcaaactcctgagtaaagtgatgcaaagtgccttggcctcccaaagtgctgagattacaggtgtgagccatggtggccagcccagaacattgttttgagcagttttaagttcatagcaaaattgagcagaaagtacagagttcccattcattccctgcccccacacatgcataaacaaggatcagcatctccactagagtgatagatttgttacaatcaatgaactttcactgattcatcattaccccccaaagttcataatttacattagggttcactcttggtgccatacattatatgggtttggacaaaagtataacgatatgtatccacttttgtagtatcatacagagtggttgtcactgcccccaaaatctctgtgctctgcctattcatcactctctcctaatccttggcaacctggacttctccgtatttttgcttttccagactgttatgtacagtatttggaatcacacagtatgtagccttttcagattggcatctttcacttagtgatatgcgtttatgggtccccatgtcttttcatgtcttgatagttcattttttagtgctgaatgctattccattgtctgaatgtactacagtttatccattcacatgctgaaggacatcttggtggcttccaagttttgacaatcatgaataaagctggtataagcaaaaataaaaaaaaaagtcgcg

SEQ ID NO: 49384 - DNA, 540 bp, Homo sapiens
ggatctgtcctttgcggtgtccctccttgctctccagaatcttcgcttcaactcccatctaagatgaaaggagccaactaagctcacttcggggcagctggtcattgcctttagggaacacgagattagcgttgccagatatctgaccttttggcagaagttaaaattcttgatatttttgagaatcttctaattttcaactgttggcaacttatttaaaagattgttctggccaaatgaaacccattagcaggatggattttgcccacagaccactggtgactgatgacacattttcaagctttacccctcacgtctttctctctcgtttttttttttttgtttgtttgtttgttttaagatggagtttcactcttgttgctcaggctggagtgcaaggggacaactctcgggtcactggaaactccgcctcccaggatcaggcaatctctcctgcctcaggctcccaaatagctgggatcacaggcatgtgccaccgagcccaggtaactcgtattgtttgtgtagtagagatgggga

SEQ ID NO: 49385 - DNA, 391 bp, Homo sapiens
tacttgagaggctgagagaggaggatcacttaagccatggaggttgaggctgcagtgagctgagatcgcgcccactatacctcctagactgggagacagagcaagacccccatcttgcctatataaataaataaattatacatctatataaataaaccccccaaaataagaaagtaaatagaacataactgctacctacatcttaacatggctctgacgattaatgatacagtgcataaaagactgtttcagcaatgattagtgtataaaaaggatgtaataactagtaatattggccacaaattctattaatatgctttatatgtaaagatatataaaataagtaaggtattaagagaatacaaatatcaacttatgaaaataaaaaaaa

SEQ ID NO: 49386 - DNA, 1248 bp, Homo sapiens
aagaagaggagcacaccacaccagaaacagacatcttgcagtgtttcactgtctcaaccttatctgcacagtccgaggtcagtctgagagagcttctgagagacccaggatgaagggatgcagtgaggtcaagagcccaaccttctttcactgacacccacctctaaggactcagaagagacatgaataaaatgggcctcaacaatcccaagaagaaccactcaaggacaatgggagccactgggcttggcttcctacttccctggaaacaagacaatttgaatggcactgactgccagggatgcaatattttatacttctctgagactacggggagcatgtgttctgaactttccctgaacagaggtcttgaggccagaaggaagaaggatcttaaagactcatttctctggagatatgggaaggttggctgtatctcacttccacttcgtgagatgaccgcctggattaacccaccccaaatttcagagattttccaaggctaccaccagagggtgcacggagctgatgcactgagcctgcaaaccaactctctgagaagcaggttatcttcacagtgcctcggacagagcttccttctcaggacactcgagagagccgtggtttcagggcacttggggacatctgtggccacgttcatgaagaagactaagcctacttcatctcaggacccgcccaagagtggccgcggctttgggacacctgcggtcgggtccaccatgaggataaaacctccttctcttctggacatgtccaggagtggccgttgctacaagtcacctggtgctacgaccagggtgagaataaagacgtctcctcaggaccctcccaggagagtacatggcattgagacatctggcggccaagtgaggaaaagacaccctgtctgcagcacccagaactgaggaggggcactgccctgggccttacttcccagccctggcctccaattctgaccttacaaaagtgtcccttgagtgaggcagtgaccacgcattgtcacagctaccaaagtgtggtttgcagatgatctgggcttgtttctggcagagattctggtacagagaaaggagaggcgttgagtggaaccacgatgggctgaggccaggggagacatcacaacctccaacaacactttttttcatgctttaataaatcatttttcttagagaactaaagtagttgaaacaatatagaaacattttttaagtaggcataaaaaaaaaa

SEQ ID NO: 49387 - DNA, 685 bp, Homo sapiens
atttaaaataaaagaagacagaacagacaaacaccataagaaagctggtgtagcagtatcgatgacctgaaatggaattcaggacagttcatagagtaaagggggctgcgtggcaatcaggaactcataagccactgactataaagctcaaaacacagcaaagttggcagtcggcagacagcaatgttgactgtcatgaaaagtgatccctgtttgcccctaaacgtagagaaatctgcgttattttccagcacacatggagcacaaacaaaatatttgcaaaacaatgggaagatcattgaaacactgtttggcaatttaaaagcttgtttctaactcacgggatgcgggcagtctgctctctagaactggacagcgtgcacagagccacgggagggagcagccacggccagctcagattggtgtcgacagcttagtggtgtctgattttatacatgacaaaatgaacgagttaaccatttaagccaaaaaaataagaccagcgtaacccaaagaaagtatttaaatacttctgtcaattaggacagttgagaaaagagaataacaaaatcaaaagcaaaactcaaactttgtacctgaaaaatctaataaaactgactaatttatagaaaacctaagaaactccatatcaaataaaaaattttaaatatgagagaaaaaaaat

SEQ ID NO: 49388 - DNA, 405 bp, Homo sapiens
ctttggcagtactccaccagttttcttcactccaggctgaaaggtcaacttttctgggccatgctccctgctgggctggtaaaccaactttgagggagaagggggaagtccagatatgtagtgtttgctatttctatgatgtaaatgctcccacaatggccgatttcaagctacaaacagtccaacaagtggcttgcaagttcctggaaatttaacaattagctcctgtacatgactggcacaagctgctttccaaactcacattccgcatgcctcagttctgctcactttctattggtcaaaacttgctgtcagtgggtggggaagtgtacccctctcttaaaggaagccttgcaagtcttgtgacaatgaaacaggagagttccctgatttcctcccggcccc

SEQ ID NO: 49389 - DNA, 389 bp, Homo sapiens
tcgcttgaacccaggaggtggaggttgcagtgaaccgagattgcgccactgcattccagcctggtgacagagcgagactccatctcaaaaaaaccaacaaaaacaaaaaaatctcaaaatagctcataatgttttaagaaagtttacaaatttgtgttgggctgcagtcaaagccgttctgggcctcatgcggcccgcgggctgtgggttcaacaagcttgatttaaagtctgtttgctagtgaattttaaaaactttttggggtcacaaatagaaaagaatttggtttatttggtttatttattgcagagaacctggaacatacgattaaagcatgcctctatgtgtggggatttttttttaaacttcatgaggcttagactaaaaat

SEQ ID NO: 49390 - DNA, 280 bp, Homo sapiens
ctccattaatattaatatttttcaagtaaatcaaaacccagcaaaatatctgatgtttctttgcaagtttgaacaacaagaatatttcttatcttttattaaaagtaaaattgtattcttcttagggaatatgatactttagttatcaaaatgctacaaaagaagcactagtccatacacccaataataaactatcaaagttatattatcagattatctcatttgtcctaaaataaaaacacacaaatgcaatgataaattgggattcagaaactttttt

SEQ ID NO: 49391 - DNA, 456 bp, Homo sapiens
cagggggaagacagcatgagaaagttggaaccaaagtctgtattttgcagggaaaatttagcccttggagcagatgaacgtgtgccttcaaaagaggcagtgtttatatagactaggagaatccttgactctttcctttcactttctccctgtctctccaccatctacacacctagttacctgtgctggtttctttccataatgaaaaaaatagctaatacactttctgccaagcactaagccctttatacagattaaattactgtaaaattatcaaatcactctaaaatgtcattgttccattccattcccaccagcagcatcctagttcaggactgaataacaaactctcagttctctggcttcacattcccatttccatatgtatccagatgaatcctcttaacctctgctgcgacttccgctgcatgcaatcctttcacagatctccaaaaa

SEQ ID NO: 49392 - DNA, 449 bp, Homo sapiens
gaccacataaccaatttctgatctttgggcaattctattatggtttcaattttgtgatgtgctactgaagaaattgactgtgtaagaagcacaaagccaaagatgactcgcatacacctgccctgtgaagttgagggctgtgtggcctgattaaagaagcatgcatttggccgggcgcggtggctcacacctgtaatcccagcactttgggaggccaaggtgggcggatcacgaggtcaggagattgagaccatcctggctaacacggtgaaaccccgtctgtactaaaagtacaaaaaattagccaggtgtggtggcgggtgcccgtagtcccagctactggggaggctgaggcaggagaatggtgtgaatccgggaggtggagcttgcagtgagccgagattgcgccattgcactccaggctgggcaacagagcgagactccatctc

SEQ ID NO: 49393 - DNA, 573 bp, Homo sapiens
aaaactaatgttacacatatggtaaaaaaaaaaaaaatgttctttgtcctttgctatggttttaaaggaaaagcaggaaaataagaggcaaattcttcccctaaaaattctttaaaattcgaacattcattaataggcatttcgtggaagacatatgaatggccaatgcatgtatgaaaaaatatttaccctcccaaccaccataaggaaatacaaatttaaataacatcttgttgctatcagttgctagtcccttgaaagactttattgataatatcctgtggtgataaggggacaaagaaaatggcattcagatgtattcgtggtctagtgggccatgcccatcggggttcttaggtttagctaaatattcagattgacccacctgtcataagccacatctggcacctgttgctcagaagagaggtagctgggatagccagcatgctggcgggtgttgctcttcagtgggagcctgcgtgacactccacttagttgtccatacaaccatctggaagccaccattcttggtaccccaagatacaactttgctgctaagaagtgggtttgagc

SEQ ID NO: 49394 - DNA, 820 bp, Homo sapiens
  misc_feature (339)..(339): n is a, c, g, or t
atgaactgtgtcagcagtgttagcaaatggctgaagtagaacggagctgcccaggatgctgccctgtcgctggggaatctgagggaggctgaaagatattgtaaaagagattgaagggctggactggctggaggaatggtgccatcgcatccatgccacaatactccaggactgccctgcctttgtcaggacagccatcagaggcggttttccctctaaccaggatgggcatcactccttgggcttgcaagtcttacctctcctcatgcaattgcatgtccaaggcatgccctcaaggggactggtgctgatccagggtggcaaacccaaagtggggangaaaatgctgaatctcatcctctcagagatctgctgcagtcagcgactatactgaggtgcatgatctgagcagcagtcgctggttggggaaggcttcttttgttggagtggggtctccagccacagcctgagggtcctctcttggggatgctacccagttaattgggtcatcttcagcctccacccaaacttaggcctgtaggtccatcaattactatatcagcctcaaggactgaacaggtgggaggaaggactagtgtgagtgatggaagcagctgagctgaggagtgctggcacctgtgcaaatccagcaagaatgacatctggctgagcttcagtcattcacctaagcaccaatcgggggtcactcccagatctgagcaatgagggaaacttcccagggggaaccccgcacttgggtagacctgggggagcagccagaaggaaaggggttgaacctgtagttgattaagattcagag

SEQ ID NO: 49395 - DNA, 353 bp, Homo sapiens
atcccttcccaaatagagaggtcttcactccaatttccgtgttcacccctctaaaacagaagctgctggataccctcaattagcaagtttcctaacttcaaattgcaaaaggtctgcaccccagctgtgcccaccacagctactgtggtgctcccaggacatcttgcaatgttcgttgacatctgtctggagtctcaccagctgtgagctctgtggggcagggccaggagagctgtctctagcagaccaacagcacaccatatgtgcaggcttggtcaaagttttgggtaagaatgaatagtgagggccaggcgcggtggctcaagcctgtaatcccagcactttgggaggcc

SEQ ID NO: 49396 - DNA, 240 bp, Homo sapiens
gtactgcccccgggtgggagccaccggatgatccagacacgggctctgagtgttcacatccagaggtctccccatctccacgcttcgtggcagcgaagacccagacgaaccagtcggggaaaaaagctccggcctccgtggtccgatgtgccaccctcttacaccgcacccctccagccacccaaacccagacgttccgcactccaaattcgggatctccggcgagcaaggcaaccgcag

SEQ ID NO: 49397 - DNA, 6272 bp, Homo sapiens
gttagctcaaataatgtgcttttaaattctcaggctgatgacagagttgtaataaataaaccagaatctgcaggttttagagatgttggctctgaagaaatccaggatgcagaaaatagtgctaaaactcttaaggaaattcggacacttttgatggaggcagaaaatatggcactgaaacgatgcaattttcctgctccccttgcccgtttcagagatattagtgatatttcatttatacaatctaagaaggtggtttgcttcaaagaaccctcttccacgggtgtatctaatggtgatttgcttcacagacagccattcacagaggaaagcccaagcagcaggtgcatacagaaggatattggcacacagacgaatttgaaatgccggagaggcattgaaaattgggagtttattagttcaactacagttagaagtcctctacaggaagcagagagcaaagtcagtatggcattagaagaaactcttaggcaatatcaagcagccaaatctgtaatgaggtctgaacctgaagggtgtagtggaaccattgggaataaaattattatccctatgatgactgtcataaaaagtgattcaagtagtgatgccagtgatggaaatggttcctgctcgtgggacagtaatttaccagagtctttggaatcagtttctgatgttcttctaaacttctttccatatgtttcacccaagacaagtataacagatagcagggaggaagagggtgtgtcagagagtgaggatggtggtggtagcagtgtagattcactggctgcacatgtgaaaaaccttctgcaatgtgaatcctcactgaatcatgctaaagaaatactcagaaatgcagaggaagaggaaagccgggtacgagcacatgcctggaatatgaagttcaatttagcacatgattgtggatactccatttcagaattaaatgaagatgacaggaggaaagtagaagagatcaaggcagagttatttggtcatggaagaacaactgacttgtccaagggtttacagagtccacggggaatgggatgcaagccagaagctgtatgtagtcacattattattgagagccatgaaaagggatgtttccggactctaacttctgaacatccacaactagatagacacccttgtgctttcagatctgctggaccctcagaaatgaccagaggacggcagaacccatcatcatgcagagccaagcatgtcaacctttctgcatccttagaccagaacaactcccatttcaaagtttggaattccttgcagttaaaaagtcattccccatttcagaactttatacctgatgaattcaaaatcagcaaaggtcttcgaatgccattcgatgaaaagatggacccttggctgtcagaattagtagaacctgcttttgtgccacctaaagaagtggattttcattcttcatcacaaatgccgtccccagaacccatgaaaaagtttactacctccatcactttttcatctcaccgacattctaaatgcatttccaattcctctgttgttaaggttggtgttactgaaggtagccagtgtactggagcatctgtgggggtatttaattctcatttcactgaagaacaaaatcctcccagagatcttaaacagaaaacctcttccccttcatcatttaaaatgcatagtaattcacaagataaagaagtgactattttagcagaaggtagaaggcaaagccaaaaattacctgttgattttgagcgttcttttcaagaagaaaaacccttagaaagatcagattttacaggcagtcattctgagcccagtaccagggcaaattgtagcaatttcaaggaaattcagatttctgataaccatacccttattagcatgggcagaccaagttccaccctaggagtaaacagatcgagttccagactaggagtaaaagagaagaatgtaactataactccagatcttccttcttgcatttttcttgaacaacgagagctctttgaacaaagcaaagccccacgtgcagatgaccatgtgaggaaacaccattctccctctcctcaacatcaggattatgtagctccagaccttccttcttgcatttttcttgaacaacgagaactctttgaacagtgcaaagccccatatgtagatcatcaaatgagagaaaaccattctccccttcctcaaggtcaggattctatagcttcagaccttccgtctcccatttctcttgaacaatgccaaagcaaagcgccaggtgtagatgaccaaatgaataaacaccattttccccttcctcaaggtcaggattgtgtagtggaaaagaataatcaacataagcctaaatcacacatttctaatataaatgttgaagccaagttcaatactgtggtctcccagtcagccccaaatcactgtacattagcagcatctgcatctactcctccttcaaatagaaaagcactttcttgtgttcatataactctttgtcccaagacttcttccaagttggatagtggaactttagatgaaagattccattcattggatgctgcttctaaagcgaggatgaatagtgagtttaactttgacttacatactgtatcttcgagatcactggaaccaacctccaaattattgaccagtaaacctgtagcacaggatcaagaatctttaggttttctaggacctaaatcttcactggatttccaagtcgtacagccttctcttccagacagtaacactattactcaggacttgaaaaccataccttctcagaatagccagatagtaacctccaggcaaatacaagtgaacatttcagatttcgaaggacattccaatccagaggggaccccagtatttgcagatcgattaccagagaagatgaagaccccactttctgctttctctgaaaaattgtcatctgatgcagtcactcagataacaacagaaagtccagaaaagaccctattttcatctgagatttttattaatgctgaagatcgtggacatgaaattatagagcctggtaaccagaagctacgcaaagctcctgtcaagtttgcctcatcatcttcagtccaacaggttactttttctcgcggcacagatggccagcctttattattgccatataagccttctggtagtaccaagatgtattatgttccacaattaagacaaattcctccatctccggattccaaatcagataccaccgttgaaagctcccattcaggatccaatgatgccattgctccagacttcccagctcaggtgctaggcacaagagatgatgacctctcagccactgttaacattaaacataaagaaggaatctacagtaagagggtagtgactaaggcatccttgccagtgggagaaaaacccttgcagaatgaaaatgcagatgcctcagttcaagtgctaatcactggggatgagaacctctcagacaaaaaacagcaagagattcacagtacaagggcagtgactgaggctgcccaggctaaagaaaaagaatctttgcagaaagatactgcagattccagtgctgctgctgctgcagagcactcagctcaagtaggagacccagaaatgaagaacttgccagacactaaagccattacacagaaagaggagatccataggaagaagacagttcccgaggaagcctggccaaacaataaagaatccctacagatcaatattgaagagtccgaatgtcattcagaatttgaaaatactacccgttctgtcttcaggtcagcaaagttttacattcatcatcccgtacacctaccaagtgatcaagatatttgccatgaatctttgggaaagagtgttttcatgagacattcttggaaagatttctttcagcatcatccagacaaacatagagaacacatgtgtcttcctcttccttatcaaaacatggacaagactaagacagattataccagaataaagagcctcagcatcaatgtgaatttgggaaacaaagaagtgatggatactactaaaagtcaagttagagattatccaaaacataatggacaaattagtgatccacaaagggatcagaaggtcaccccagagcaaacaactcagcacactgtgagtttgaatgaactgtggaacaagtatcgggagcgacagaggcaacagagacagcctgagttgggtgacaggaaagaactgtccttggtggaccgacttgatcggttggctaaaattcttcagaatccaatcacacattctctccaggtctcagaaagtacacatgatgatagcagaggggaacgaagtgtgaaggaatggagtggtagacaacagcagagaaataagcttcagaaaaagaagcggtttaaaagcctagagaaaagccataaaaatacaggcgagcttaaaaaaagcaaggtgctttctcatcatcgagctgggaggtctaatcaaattaaaattgaacagattaaatttgataaatatattctgagtaaacagccaggttttaattatataagcaacacttcttcggattgtcggccctcagaggagagtgagctgctcacagatactaccaccaacatcctttccggcaccacttctactgtcgaatcagatatattgacccaaacagatagagaggtggctctgcacgaaaggagtagctctgtttccactattgacactgcccggctgattcaagcttttggccatgaaagagtatgcttgtcacccagacgaattaaattatatagcagcatcaccaaccaacagaggagataccttgagaagcggagcaaacacagcaagaaagtgctgaatacaggtcatcccctagtgacttctgagcacaccagaaggagacacatccaggtagcaaaccatgtgatttcttctgactctatttcctcttctgccagtagtttcctgagctcaaactctactttttgcaacaagcagaatgtacacatgttaaacaagggcatacaagcaggtaacttggagattgtgaacggtgccaaaaaacacactcgagatgttgggataactttcccaactccaagttccagcgaggctaaattggaagagaacagtgatgtgacttcttggtcagaagaaaaacgtgaagagaaaatgctctttaccggttatcctgaggacagaaagttaaaaaagaacaagaagaattcccatgaaggagtttcctggtttgttcctgtggaaaatgtggagtctagatcaaagaaggaaaacgtgcctaacacttgtggccctggcatctcctggtttgaaccaataaccaagaccagaccctggagggagccactgcgggagcagaactgtcaggggcagcacctggacggtcggggctacctggcaggcccaggcagagaggctggcagagacctactgaggccatttgtgagagcaacccttcaggaatcgcttcagtttcacagacctgacttcatctcccgctctggggagcggataaagcgcctgaagttaatagtccaggagaggaagctgcagagcatgttacagaccgagcgggatgcactattcaacattgacagggaacggcagggccaccagaatcgcatgtgcccgctgcccaagagagtcttcctggctatccagaagaacaagcctatcagcaagaaggaaatgattcagaggtccaaacggtaagaccaagaaaacaagagtacgtatacaagtgtaaaccaggccaccaagtggtcgggagctctggcttgcacccagaataaatgtattatactcaagtttaaacattatgagaaagttgtgagagtcatttctcacttatggcactgaaaaaaaaaaaagcacatcatggtatgaatgactcatatgcaaaagatgaaaaacttctcactaatttgcatgtcttaggctcctctttattagaaacctaaatgtaaataaagaatattttaggccaggtacggtggctcatgcctgtaatcccagcacttagggaggccgaggtgtgcagatcacatgaggttaggagttcgagaccagcctggccaacatggtgaaactccatctctactcaaaatacaaaaattagctgggtgtggaggcacacgcctgtaatcccagctactcagtaggctgagccgggaggatctcttgaacctgggaggcagaggttgcagtgagcttagatggtgccactgtactccagtctgggcgacagaacgagactccatctc

SEQ ID NO: 49398 - DNA, 728 bp, Homo sapiens
ttttctcttttttttttcttttcaggaatcgcttcagtttcacagacctgacttcatctcccgctctggggagcggataaagcgcctgaagttaatagtccaggagaggaagctgcagagcatgttacagaccgagcgggatgcactattcaacattgacagggaacggcagggccaccagaatcgcatgtgcccgctgcccaagagagtcttcctggctatccagaagaacaagcctatcagcaagaaggaaatgattcagaggtccaaacggatttatgagcagcttccagaagtacagaaaaagagagaagaagagaagagaaaatcagaatataagtcataccggctgcgagcccagctatataaaaagagagtgaccaatcaacttctggggagaaaagttccctgggactgacacaagtttattttcctcagagccttggaattctattttatgaacctagagaagcagaatccttacttttgtgagtctggttgaataaagcttattctttgtccatgtgtattttagaaatagtaacttctaaagagtctggaacaaagtggtgattaaaattcctaatggtttgggagcaatactttctgcatagtggccttgtccaatggcctgtgtgttacaatgatatgatcatttctcaagaataagtccctttttgtatgtgtttttatacttttagaaaataaaaactttagattaactcata

SEQ ID NO: 49399 - DNA, 6172 bp, Homo sapiens
gttagctcaaataatgtgcttttaaattctcaggctgatgacagagttgtaataaataaaccagaatctgcaggttttagagatgttggctctgaagaaatccaggatgcagaaaatagtgctaaaactcttaaggaaattcggacacttttgatggaggcagaaaatatggcactgaaacgatgcaattttcctgctccccttgcccgtttcagagatattagtgatatttcatttatacaatctaagaaggtggtttgcttcaaagaaccctcttccacgggtgtatctaatggtgatttgcttcacagacagccattcacagaggaaagcccaagcagcaggtgcatacagaaggatattggcacacagacgaatttgaaatgccggagaggcattgaaaattgggagtttattagttcaactacagttagaagtcctctacaggaagcagagagcaaagtcagtatggcattagaagaaactcttaggcaatatcaagcagccaaatctgtaatgaggtctgaacctgaagggtgtagtggaaccattgggaataaaattattatccctatgatgactgtcataaaaagtgattcaagtagtgatgccagtgatggaaatggttcctgctcgtgggacagtaatttaccagagtctttggaatcagtttctgatgttcttctaaacttctttccatatgtttcacccaagacaagtataacagatagcagggaggaagagggtgtgtcagagagtgaggatggtggtggtagcagtgtagattcactggctgcacatgtgaaaaaccttctgcaatgtgaatcctcactgaatcatgctaaagaaatactcagaaatgcagaggaagaggaaagccgggtacgagcacatgcctggaatatgaagttcaatttagcacatgattgtggatactccatttcagaattaaatgaagatgacaggaggaaagtagaagagatcaaggcagagttatttggtcatggaagaacaactgacttgtccaagggtttacagagtccacggggaatgggatgcaagccagaagctgtatgtagtcacattattattgagagccatgaaaagggatgtttccggactctaacttctgaacatccacaactagatagacacccttgtgctttcagatctgctggaccctcagaaatgaccagaggacggcagaacccatcatcatgcagagccaagcatgtcaacctttctgcatccttagaccagaacaactcccatttcaaagtttggaattccttgcagttaaaaagtcattccccatttcagaactttatacctgatgaattcaaaatcagcaaaggtcttcgaatgccattcgatgaaaagatggacccttggctgtcagaattagtagaacctgcttttgtgccacctaaagaagtggattttcattcttcatcacaaatgccgtccccagaacccatgaaaaagtttactacctccatcactttttcatctcaccgacattctaaatgcatttccaattcctctgttgttaaggttggtgttactgaaggtagccagtgtactggagcatctgtgggggtatttaattctcatttcactgaagaacaaaatcctcccagagatcttaaacagaaaacctcttccccttcatcatttaaaatgcatagtaattcacaagataaagaagtgactattttagcagaaggtagaaggcaaagccaaaaattacctgttgattttgagcgttcttttcaagaagaaaaacccttagaaagatcagattttacaggcagtcattctgagcccagtaccagggcaaattgtagcaatttcaaggaaattcagatttctgataaccatacccttattagcatgggcagaccaagttccaccctaggagtaaacagatcgagttccagactaggagtaaaagagaagaatgtaactataactccagatcttccttcttgcatttttcttgaacaacgagagctctttgaacaaagcaaagccccacgtgcagatgaccatgtgaggaaacaccattctccctctcctcaacatcaggattatgtagctccagaccttccttcttgcatttttcttgaacaacgagaactctttgaacagtgcaaagccccatatgtagatcatcaaatgagagaaaaccattctccccttcctcaaggtcaggattctatagcttcagaccttccgtctcccatttctcttgaacaatgccaaagcaaagcgccaggtgtagatgaccaaatgaataaacaccattttccccttcctcaaggtcaggattgtgtagtggaaaagaataatcaacataagcctaaatcacacatttctaatataaatgttgaagccaagttcaatactgtggtctcccagtcagccccaaatcactgtacattagcagcatctgcatctactcctccttcaaatagaaaagcactttcttgtgttcatataactctttgtcccaagacttcttccaagttggatagtggaactttagatgaaagattccattcattggatgctgcttctaaagcgaggatgaatagtgagtttaactttgacttacatactgtatcttcgagatcactggaaccaacctccaaattattgaccagtaaacctgtagcacaggatcaagaatctttaggttttctaggacctaaatcttcactggatttccaagtcgtacagccttctcttccagacagtaacactattactcaggacttgaaaaccataccttctcagaatagccagatagtaacctccaggcaaatacaagtgaacatttcagatttcgaaggacattccaatccagaggggaccccagtatttgcagatcgattaccagagaagatgaagaccccactttctgctttctctgaaaaattgtcatctgatgcagtcactcagataacaacagaaagtccagaaaagaccctattttcatctgagatttttattaatgctgaagatcgtggacatgaaattatagagcctggtaaccagaagctacgcaaagctcctgtcaagtttgcctcatcatcttcagtccaacaggttactttttctcgcggcacagatggccagcctttattattgccatataagccttctggtagtaccaagatgtattatgttccacaattaagacaaattcctccatctccggattccaaatcagataccaccgttgaaagctcccattcaggatccaatgatgccattgctccagacttcccagctcaggtgctaggcacaagagatgatgacctctcagccactgttaacattaaacataaagaaggaatctacagtaagagggtagtgactaaggcatccttgccagtgggagaaaaacccttgcagaatgaaaatgcagatgcctcagttcaagtgctaatcactggggatgagaacctctcagacaaaaaacagcaagagattcacagtacaagggcagtgactgaggctgcccaggctaaagaaaaagaatctttgcagaaagatactgcagattccagtgctgctgctgctgcagagcactcagctcaagtaggagacccagaaatgaagaacttgccagacactaaagccattacacagaaagaggagatccataggaagaagacagttcccgaggaagcctggccaaacaataaagaatccctacagatcaatattgaagagtccgaatgtcattcagaatttgaaaatactacccgttctgtcttcaggtcagcaaagttttacattcatcatcccgtacacctaccaagtgatcaagatatttgccatgaatctttgggaaagagtgttttcatgagacattcttggaaagatttctttcagcatcatccagacaaacatagagaacacatgtgtcttcctcttccttatcaaaacatggacaagactaagacagattataccagaataaagagcctcagcatcaatgtgaatttgggaaacaaagaagtgatggatactactaaaagtcaagttagagattatccaaaacataatggacaaattagtgatccacaaagggatcagaaggtcaccccagagcaaacaactcagcacactgtgagtttgaatgaactgtggaacaagtatcgggagcgacagaggcaacagagacagcctgagttgggtgacaggaaagaactgtccttggtggaccgacttgatcggttggctaaaattcttcagaatccaatcacacattctctccaggtctcagaaagtacacatgatgatagcagaggggaacgaagtgtgaaggaatggagtggtagacaacagcagagaaataagcttcagaaaaagaagcggtttaaaagcctagagaaaagccataaaaatacaggcgagcttaaaaaaagcaaggtgctttctcatcatcgagctgggaggtctaatcaaattaaaattgaacagattaaatttgataaatatattctgagtaaacagccaggttttaattatataagcaacacttcttcggattgtcggccctcagaggagagtgagctgctcacagatactaccaccaacatcctttccggcaccacttctactgtcgaatcagatatattgacccaaacagatagagaggtggctctgcacgaaaggagtagctctgtttccactattgacactgcccggctgattcaagcttttggccatgaaagagtatgcttgtcacccagacgaattaaattatatagcagcatcaccaaccaacagaggagataccttgagaagcggagcaaacacagcaagaaagtgctgaatacaggtcatcccctagtgacttctgagcacaccagaaggagacacatccaggtagcaaaccatgtgatttcttctgactctatttcctcttctgccagtagtttcctgagctcaaactctactttttgcaacaagcagaatgtacacatgttaaacaagggcatacaagcaggtaacttggagattgtgaacggtgccaaaaaacacactcgagatgttgggataactttcccaactccaagttccagcgaggctaaattggaagagaacagtgatgtgacttcttggtcagaagaaaaacgtgaagagaaaatgctctttaccggttatcctgaggacagaaagttaaaaaagaacaagaagaattcccatgaaggagtttcctggtttgttcctgtggaaaatgtggagtctagatcaaagaaggaaaacgtgcctaacacttgtggccctggcatctcctggtttgaaccaataaccaagaccagaccctggagggagccactgcgggagcagaactgtcaggggcagcacctggacggtcggggctacctggcaggcccaggcagagaggctggcagagacctactgaggccatttgtgagagcaacccttcaggaatcgcttcagtttcacagacctgacttcatctcccgctctggggagcggataaagcgcctgaagttaatagtccaggagaggaagctgcagagcatgttacagaccgagcgggatgcactattcaacattgacagggaacggcagggccaccagaatcgcatgtgcccgctgcccaagagagtcttcctggctatccagaagaacaagcctatcagcaagaaggaaatgattcagaggtccaaacggatttatgagcagcttccagaagtacagaaaaagagagaagaagagaagagaaaatcagaatataagtcataccggctgcgagcccagctatataaaaagagagtgaccaatcaacttctggggagaaaagttccctgggactgacacaagtttattttcctcagagccttggaattctattttatgaacctagagaagcagaatccttacttttgtgagtctggttgaataaagcttattctttgtccatgtgtattttagaaatagtaacttctaaagagtctggaacaaagtggtgattaaaattcctaatggtttgggagcaatactttctgcatagtggccttgtccaatggcctgtgtgttacaatgatatgatcatttctcaagaataagtccctttttgtatgtgtttttatacttttagaaaataaaaactttagattaactcata

SEQ ID NO: 49400 - DNA, 6298 bp, Homo sapiens
gttagctcaaataatgtgcttttaaattctcaggctgatgacagagttgtaataaataaaccagaatctgcaggttttagagatgttggctctgaagaaatccaggatgcagaaaatagtgctaaaactcttaaggaaattcggacacttttgatggaggcagaaaatatggcactgaaacgatgcaattttcctgctccccttgcccgtttcagagatattagtgatatttcatttatacaatctaagaaggtggtttgcttcaaagaaccctcttccacgggtgtatctaatggtgatttgcttcacagacagccattcacagaggaaagcccaagcagcaggtgcatacagaaggatattggcacacagacgaatttgaaatgccggagaggcattgaaaattgggagtttattagttcaactacagttagaagtcctctacaggaagcagagagcaaagtcagtatggcattagaagaaactcttaggcaatatcaagcagccaaatctgtaatgaggtctgaacctgaagggtgtagtggaaccattgggaataaaattattatccctatgatgactgtcataaaaagtgattcaagtagtgatgccagtgatggaaatggttcctgctcgtgggacagtaatttaccagagtctttggaatcagtttctgatgttcttctaaacttctttccatatgtttcacccaagacaagtataacagatagcagggaggaagagggtgtgtcagagagtgaggatggtggtggtagcagtgtagattcactggctgcacatgtgaaaaaccttctgcaatgtgaatcctcactgaatcatgctaaagaaatactcagaaatgcagaggaagaggaaagccgggtacgagcacatgcctggaatatgaagttcaatttagcacatgattgtggatactccatttcagaattaaatgaagatgacaggaggaaagtagaagagatcaaggcagagttatttggtcatggaagaacaactgacttgtccaagggtttacagagtccacggggaatgggatgcaagccagaagctgtatgtagtcacattattattgagagccatgaaaagggatgtttccggactctaacttctgaacatccacaactagatagacacccttgtgctttcagatctgctggaccctcagaaatgaccagaggacggcagaacccatcatcatgcagagccaagcatgtcaacctttctgcatccttagaccagaacaactcccatttcaaagtttggaattccttgcagttaaaaagtcattccccatttcagaactttatacctgatgaattcaaaatcagcaaaggtcttcgaatgccattcgatgaaaagatggacccttggctgtcagaattagtagaacctgcttttgtgccacctaaagaagtggattttcattcttcatcacaaatgccgtccccagaacccatgaaaaagtttactacctccatcactttttcatctcaccgacattctaaatgcatttccaattcctctgttgttaaggttggtgttactgaaggtagccagtgtactggagcatctgtgggggtatttaattctcatttcactgaagaacaaaatcctcccagagatcttaaacagaaaacctcttccccttcatcatttaaaatgcatagtaattcacaagataaagaagtgactattttagcagaaggtagaaggcaaagccaaaaattacctgttgattttgagcgttcttttcaagaagaaaaacccttagaaagatcagattttacaggcagtcattctgagcccagtaccagggcaaattgtagcaatttcaaggaaattcagatttctgataaccatacccttattagcatgggcagaccaagttccaccctaggagtaaacagatcgagttccagactaggagtaaaagagaagaatgtaactataactccagatcttccttcttgcatttttcttgaacaacgagagctctttgaacaaagcaaagccccacgtgcagatgaccatgtgaggaaacaccattctccctctcctcaacatcaggattatgtagctccagaccttccttcttgcatttttcttgaacaacgagaactctttgaacagtgcaaagccccatatgtagatcatcaaatgagagaaaaccattctccccttcctcaaggtcaggattctatagcttcagaccttccgtctcccatttctcttgaacaatgccaaagcaaagcgccaggtgtagatgaccaaatgaataaacaccattttccccttcctcaaggtcaggattgtgtagtggaaaagaataatcaacataagcctaaatcacacatttctaatataaatgttgaagccaagttcaatactgtggtctcccagtcagccccaaatcactgtacattagcagcatctgcatctactcctccttcaaatagaaaagcactttcttgtgttcatataactctttgtcccaagacttcttccaagttggatagtggaactttagatgaaagattccattcattggatgctgcttctaaagcgaggatgaatagtgagtttaactttgacttacatactgtatcttcgagatcactggaaccaacctccaaattattgaccagtaaacctgtagcacaggatcaagaatctttaggttttctaggacctaaatcttcactggatttccaagtcgtacagccttctcttccagacagtaacactattactcaggacttgaaaaccataccttctcagaatagccagatagtaacctccaggcaaatacaagtgaacatttcagatttcgaaggacattccaatccagaggggaccccagtatttgcagatcgattaccagagaagatgaagaccccactttctgctttctctgaaaaattgtcatctgatgcagtcactcagataacaacagaaagtccagaaaagaccctattttcatctgagatttttattaatgctgaagatcgtggacatgaaattatagagcctggtaaccagaagctacgcaaagctcctgtcaagtttgcctcatcatcttcagtccaacaggttactttttctcgcggcacagatggccagcctttattattgccatataagccttctggtagtaccaagatgtattatgttccacaattaagacaaattcctccatctccggattccaaatcagataccaccgttgaaagctcccattcaggatccaatgatgccattgctccagacttcccagctcaggtgctaggcacaagagatgatgacctctcagccactgttaacattaaacataaagaaggaatctacagtaagagggtagtgactaaggcatccttgccagtgggagaaaaacccttgcagaatgaaaatgcagatgcctcagttcaagtgctaatcactggggatgagaacctctcagacaaaaaacagcaagagattcacagtacaagggcagtgactgaggctgcccaggctaaagaaaaagaatctttgcagaaagatactgcagattccagtgctgctgctgctgcagagcactcagctcaagtaggagacccagaaatgaagaacttgccagacactaaagccattacacagaaagaggagatccataggaagaagacagttcccgaggaagcctggccaaacaataaagaatccctacagatcaatattgaagagtccgaatgtcattcagaatttgaaaatactacccgttctgtcttcaggtcagcaaagttttacattcatcatcccgtacacctaccaagtgatcaagatatttgccatgaatctttgggaaagagtgttttcatgagacattcttggaaagatttctttcagcatcatccagacaaacatagagaacacatgtgtcttcctcttccttatcaaaacatggacaagactaagacagattataccagaataaagagcctcagcatcaatgtgaatttgggaaacaaagaagtgatggatactactaaaagtcaagttagagattatccaaaacataatggacaaattagtgatccacaaagggatcagaaggtcaccccagagcaaacaactcagcacactgtgagtttgaatgaactgtggaacaagtatcgggagcgacagaggcaacagagacagcctgagttgggtgacaggaaagaactgtccttggtggaccgacttgatcggttggctaaaattcttcagaatccaatcacacattctctccaggtctcagaaagtacacatgatgatagcagaggggaacgaagtgtgaaggaatggagtggtagacaacagcagagaaataagcttcagaaaaagaagcggtttaaaagcctagagaaaagccataaaaatacaggcgagcttaaaaaaagcaaggtgctttctcatcatcgagctgggaggtctaatcaaattaaaattgaacagattaaatttgataaatatattctgagtaaacagccaggttttaattatataagcaacacttcttcggattgtcggccctcagaggagagtgagctgctcacagatactaccaccaacatcctttccggcaccacttctactgtcgaatcagatatattgacccaaacagatagagaggtggctctgcacgaaaggagtagctctgtttccactattgacactgcccggctgattcaagcttttggccatgaaagagtatgcttgtcacccagacgaattaaattatatagcagcatcaccaaccaacagaggagataccttgagaagcggagcaaacacagcaagaaagtgctgaatacaggtcatcccctagtgacttctgagcacaccagaaggagacacatccaggtagcaaaccatgtgatttcttctgactctatttcctcttctgccagtagtttcctgagctcaaactctactttttgcaacaagcagaatgtacacatgttaaacaagggcatacaagcaggtaacttggagattgtgaacggtgccaaaaaacacactcgagatgttgggataactttcccaactccaagttccagcgaggctaaattggaagagaacagtgatgtgacttcttggtcagaagaaaaacgtgaagagaaaatgctctttaccggttatcctgaggacagaaagttaaaaaagaacaagaagaattcccatgaaggagtttcctggtttgttcctgtggaaaatgtggagtctagatcaaagaaggaaaacgtgcctaacacttgtggccctggcatctcctggtttgaaccaataaccaagaccagaccctggagggagccactgcgggagcagaactgtcaggggcagcacctggacggtcggggctacctggcaggcccaggcagagaggctggcagagacctactgaggccatttgtgagagcaacccttcaggaatcgcttcagtttcacagacctgacttcatctcccgctctggggagcggataaagcgcctgaagttaatagtccaggagaggaagctgcagagcatgttacagaccgagcgggatgcactattcaacattgacagggaacggcagggccaccagaatcgcatgtgcccgctgcccaagagagtcttcctggctatccagaagaacaagcctatcagcaagaaggaaatgattcagaggtccaaacggatttatgagcagcttccagaagtacagaaaaagagagaagaagagaagagaaaatcagaatataagtcataccggctgcgagcccagctatataaaaagagagtgaccaatcaacttctggggagaaaagttccctgggactgacacaagtttattttcctcagagccttggaattctattttatgaacctagagaagcagaatccttacttttctaaggcccaaagtaatggaggaaggttttcaacagcctcactctaagttcagcaaaccccagtacaaagattggcaagggccagtcatccaccgagaaggcttcctgggaggctggatccaagagcaggccctgccctcaagcacggttcagagctttcagatcctgccccctgggctccctgccatgaagaggacactgggaaaagaacccatggtgcatgaggtcaactcatagttcttccctttcttgctgggcaaggtaatgaagcacttttggccaatttacctgtaaaatgagagggttaatacctctaagcccctctttacataaactctaaaacaatgtgactatttccacctcttg

SEQ ID NO: 49401 - DNA, 640 bp, Homo sapiens
ccagattgtgagccccgggctagggttttctgtgctggagtatctaacggggcccagggcctttctgagagggatgagctcctggagagtgggaggtatagggagggatgatgagaggagatctcatgactctgcaccctggtaacctccccgatttctgtcctttcactggtgccatttctaaggatttatgagcagcttccagaagtacagaaaaagagagaagaagagaagagaaaatcagaatataagtcataccggctgcgagcccagctatataaaaagagagtgaccaatcaacttctggggagaaaagttccctgggactgacacaagtttattttcctcagagccttggaattctattttatgaacctagagaagcagaatccttacttttgtgagtctggttgaataaagcttattctttgtccatgtgtattttagaaatagtaacttctaaagagtctggaacaaagtggtgattaaaattcctaatggtttgggagcaatactttctgcatagtggccttgtccaatggcctgtgtgttacaatgatatgatcatttctcaagaataagtccctttttgtatgtgtttttatacttttagaaaataaaaactttagattaactcata

SEQ ID NO: 49402 - DNA, 622 bp, Homo sapiens
cctctccttatgctactgtatgtgggaactgatggattatctgtgtctctatagaaataatagatattgattacagatcctctttcctgaacctttcgtgaagtattttttatatgacgaccatagtttctgaagcagagtaaaatgaacaagatttgaataggaccacactgattctccttggtgacatggatgcagggaggagaggcatctgcctctgatggcagtaatatctaacttctttcctgcctttcttttcttctacagagagtgaccaatcaacttctggggagaaaagttccctgggactgacacaagtttattttcctcagagccttggaattctattttatgaacctagagaagcagaatccttacttttgtgagtctggttgaataaagcttattctttgtccatgtgtattttagaaatagtaacttctaaagagtctggaacaaagtggtgattaaaattcctaatggtttgggagcaatactttctgcatagtggccttgtccaatggcctgtgtgttacaatgatatgatcatttctcaagaataagtccctttttgtatgtgtttttatacttttagaaaataaaaactttagattaactcata

SEQ ID NO: 49403 - DNA, 521 bp, Homo sapiens
ttttctcttttttttttcttttcaggaatcgcttcagtttcacagacctgacttcatctcccgctctggggagcggataaagcgcctgaagttaatagtccaggagaggaagctgcagagcatgttacagaccgagcgggatgcactattcaacattgacagggaacggcagggccaccagaatcgcatgtgcccgctgcccaagagagtcttcctggctatccagaagaacaagcctatcagcaagaaggaaatgattcagaggtccaaacggatttatgagcagcttccagaagtacagaaaaagagagaagaagagaagagaaaatcagaatataagtcataccggctgcgagcccagctatataaaaagagagtgaccaatcaacttctggggagaaaagttccctgggactgacacaagtttattttcctcagagccttggaattctattttatgaacctagagaagcagaatccttacttttgtgagtctggttgaataaagcttattctttgtc

SEQ ID NO: 49404 - DNA, 5965 bp, Homo sapiens
gttagctcaaataatgtgcttttaaattctcaggctgatgacagagttgtaataaataaaccagaatctgcaggttttagagatgttggctctgaagaaatccaggatgcagaaaatagtgctaaaactcttaaggaaattcggacacttttgatggaggcagaaaatatggcactgaaacgatgcaattttcctgctccccttgcccgtttcagagatattagtgatatttcatttatacaatctaagaaggtggtttgcttcaaagaaccctcttccacgggtgtatctaatggtgatttgcttcacagacagccattcacagaggaaagcccaagcagcaggtgcatacagaaggatattggcacacagacgaatttgaaatgccggagaggcattgaaaattgggagtttattagttcaactacagttagaagtcctctacaggaagcagagagcaaagtcagtatggcattagaagaaactcttaggcaatatcaagcagccaaatctgtaatgaggtctgaacctgaagggtgtagtggaaccattgggaataaaattattatccctatgatgactgtcataaaaagtgattcaagtagtgatgccagtgatggaaatggttcctgctcgtgggacagtaatttaccagagtctttggaatcagtttctgatgttcttctaaacttctttccatatgtttcacccaagacaagtataacagatagcagggaggaagagggtgtgtcagagagtgaggatggtggtggtagcagtgtagattcactggctgcacatgtgaaaaaccttctgcaatgtgaatcctcactgaatcatgctaaagaaatactcagaaatgcagaggaagaggaaagccgggtacgagcacatgcctggaatatgaagttcaatttagcacatgattgtggatactccatttcagaattaaatgaagatgacaggaggaaagtagaagagatcaaggcagagttatttggtcatggaagaacaactgacttgtccaagggtttacagagtccacggggaatgggatgcaagccagaagctgtatgtagtcacattattattgagagccatgaaaagggatgtttccggactctaacttctgaacatccacaactagatagacacccttgtgctttcagatctgctggaccctcagaaatgaccagaggacggcagaacccatcatcatgcagagccaagcatgtcaacctttctgcatccttagaccagaacaactcccatttcaaagtttggaattccttgcagttaaaaagtcattccccatttcagaactttatacctgatgaattcaaaatcagcaaaggtcttcgaatgccattcgatgaaaagatggacccttggctgtcagaattagtagaacctgcttttgtgccacctaaagaagtggattttcattcttcatcacaaatgccgtccccagaacccatgaaaaagtttactacctccatcactttttcatctcaccgacattctaaatgcatttccaattcctctgttgttaaggttggtgttactgaaggtagccagtgtactggagcatctgtgggggtatttaattctcatttcactgaagaacaaaatcctcccagagatcttaaacagaaaacctcttccccttcatcatttaaaatgcatagtaattcacaagataaagaagtgactattttagcagaaggtagaaggcaaagccaaaaattacctgttgattttgagcgttcttttcaagaagaaaaacccttagaaagatcagattttacaggcagtcattctgagcccagtaccagggcaaattgtagcaatttcaaggaaattcagatttctgataaccatacccttattagcatgggcagaccaagttccaccctaggagtaaacagatcgagttccagactaggagtaaaagagaagaatgtaactataactccagatcttccttcttgcatttttcttgaacaacgagagctctttgaacaaagcaaagccccacgtgcagatgaccatgtgaggaaacaccattctccctctcctcaacatcaggattatgtagctccagaccttccttcttgcatttttcttgaacaacgagaactctttgaacagtgcaaagccccatatgtagatcatcaaatgagagaaaaccattctccccttcctcaaggtcaggattctatagcttcagaccttccgtctcccatttctcttgaacaatgccaaagcaaagcgccaggtgtagatgaccaaatgaataaacaccattttccccttcctcaaggtcaggattgtgtagtggaaaagaataatcaacataagcctaaatcacacatttctaatataaatgttgaagccaagttcaatactgtggtctcccagtcagccccaaatcactgtacattagcagcatctgcatctactcctccttcaaatagaaaagcactttcttgtgttcatataactctttgtcccaagacttcttccaagttggatagtggaactttagatgaaagattccattcattggatgctgcttctaaagcgaggatgaatagtgagtttaactttgacttacatactgtatcttcgagatcactggaaccaacctccaaattattgaccagtaaacctgtagcacaggatcaagaatctttaggttttctaggacctaaatcttcactggatttccaagtcgtacagccttctcttccagacagtaacactattactcaggacttgaaaaccataccttctcagaatagccagatagtaacctccaggcaaatacaagtgaacatttcagatttcgaaggacattccaatccagaggggaccccagtatttgcagatcgattaccagagaagatgaagaccccactttctgctttctctgaaaaattgtcatctgatgcagtcactcagataacaacagaaagtccagaaaagaccctattttcatctgagatttttattaatgctgaagatcgtggacatgaaattatagagcctggtaaccagaagctacgcaaagctcctgtcaagtttgcctcatcatcttcagtccaacaggttactttttctcgcggcacagatggccagcctttattattgccatataagccttctggtagtaccaagatgtattatgttccacaattaagacaaattcctccatctccggattccaaatcagataccaccgttgaaagctcccattcaggatccaatgatgccattgctccagacttcccagctcaggtgctaggcacaagagatgatgacctctcagccactgttaacattaaacataaagaaggaatctacagtaagagggtagtgactaaggcatccttgccagtgggagaaaaacccttgcagaatgaaaatgcagatgcctcagttcaagtgctaatcactggggatgagaacctctcagacaaaaaacagcaagagattcacagtacaagggcagtgactgaggctgcccaggctaaagaaaaagaatctttgcagaaagatactgcagattccagtgctgctgctgctgcagagcactcagctcaagtaggagacccagaaatgaagaacttgccagacactaaagccattacacagaaagaggagatccataggaagaagacagttcccgaggaagcctggccaaacaataaagaatccctacagatcaatattgaagagtccgaatgtcattcagaatttgaaaatactacccgttctgtcttcaggtcagcaaagttttacattcatcatcccgtacacctaccaagtgatcaagatatttgccatgaatctttgggaaagagtgttttcatgagacattcttggaaagatttctttcagcatcatccagacaaacatagagaacacatgtgtcttcctcttccttatcaaaacatggacaagactaagacagattataccagaataaagagcctcagcatcaatgtgaatttgggaaacaaagaagtgatggatactactaaaagtcaagttagagattatccaaaacataatggacaaattagtgatccacaaagggatcagaaggtcaccccagagcaaacaactcagcacactgtgagtttgaatgaactgtggaacaagtatcgggagcgacagaggcaacagagacagcctgagttgggtgacaggaaagaactgtccttggtggaccgacttgatcggttggctaaaattcttcagaatccaatcacacattctctccaggtctcagaaagtacacatgatgatagcagaggggaacgaagtgtgaaggaatggagtggtagacaacagcagagaaataagcttcagaaaaagaagcggtttaaaagcctagagaaaagccataaaaatacaggcgagcttaaaaaaagcaaggtgctttctcatcatcgagctgggaggtctaatcaaattaaaattgaacagattaaatttgataaatatattctgagtaaacagccaggttttaattatataagcaacacttcttcggattgtcggccctcagaggagagtgagctgctcacagatactaccaccaacatcctttccggcaccacttctactgtcgaatcagatatattgacccaaacagatagagaggtggctctgcacgaaaggagtagctctgtttccactattgacactgcccggctgattcaagcttttggccatgaaagagtatgcttgtcacccagacgaattaaattatatagcagcatcaccaaccaacagaggagataccttgagaagcggagcaaacacagcaagaaagtgctgaatacaggtcatcccctagtgacttctgagcacaccagaaggagacacatccaggtagcaaaccatgtgatttcttctgactctatttcctcttctgccagtagtttcctgagctcaaactctactttttgcaacaagcagaatgtacacatgttaaacaagggcatacaagcaggtaacttggagattgtgaacggtgccaaaaaacacactcgagatgttgggataactttcccaactccaagttccagcgaggctaaattggaagagaacagtgatgtgacttcttggtcagaagaaaaacgtgaagagaaaatgctctttaccggttatcctgaggacagaaagttaaaaaagaacaagaagaattcccatgaaggagtttcctggtttgttcctgtggaaaatgtggagtctagatcaaagaaggaaaacgtgcctaacacttgtggccctggcatctcctggtttgaaccaataaccaagaccagaccctggagggagccactgcgggagcagaactgtcaggggcagcacctggacggtcggggctacctggcaggcccaggcagagaggctggcagagacctactgaggccatttgtgagagcaacccttcaggaatcgcttcagtttcacagacctgacttcatctcccgctctggggagcggataaagcgcctgaagttaatagtccaggagaggaagctgcagagcatgttacagaccgagcgggatgcactattcaacattgacagggaacggcagggccaccagaatcgcatgtgcccgctgcccaagagagtcttcctggctatccagaagaacaagcctatcagcaagaaggaaatgattcagaggtccaaacggatttatgagcagcttccagaagtacagaaaaagagagaagaagagaagagaaaatcagaatataagtcataccggctgcgagcccagctatataaaaagagagtgaccaatcaacttctggggagaaaagttccctgggactgacacaagtttattttcctcagagccttggaattctattttatgaacctagagaagcagaatccttacttttgtgagtctggttgaataaagcttattctttgtc

SEQ ID NO: 49405 - DNA, 5141 bp, Homo sapiens
gttagctcaaataatgtgcttttaaattctcaggctgatgacagagttgtaataaataaaccagaatctgcaggttttagagatgttggctctgaagaaatccaggatgcagaaaatagtgctaaaactcttaaggaaattcggacacttttgatggaggcagaaaatatggcactgaaacgatgcaattttcctgctccccttgcccgtttcagagatattagtgatatttcatttatacaatctaagaaggtggtttgcttcaaagaaccctcttccacgggtgtatctaatggtgatttgcttcacagacagccattcacagaggaaagcccaagcagcaggtgcatacagaaggatattggcacacagacgaatttgaaatgccggagaggcattgaaaattgggagtttattagttcaactacagttagaagtcctctacaggaagcagagagcaaagtcagtatggcattagaagaaactcttaggcaatatcaagcagccaaatctgtaatgaggtctgaacctgaagggtgtagtggaaccattgggaataaaattattatccctatgatgactgtcataaaaagtgattcaagtagtgatgccagtgatggaaatggttcctgctcgtgggacagtaatttaccagagtctttggaatcagtttctgatgttcttctaaacttctttccatatgtttcacccaagacaagtataacagatagcagggaggaagagggtgtgtcagagagtgaggatggtggtggtagcagtgtagattcactggctgcacatgtgaaaaaccttctgcaatgtgaatcctcactgaatcatgctaaagaaatactcagaaatgcagaggaagaggaaagccgggtacgagcacatgcctggaatatgaagttcaatttagcacatgattgtggatactccatttcagaattaaatgaagatgacaggaggaaagtagaagagatcaaggcagagttatttggtcatggaagaacaactgacttgtccaagggtttacagagtccacggggaatgggatgcaagccagaagctgtatgtagtcacattattattgagagccatgaaaagggatgtttccggactctaacttctgaacatccacaactagatagacacccttgtgctttcagatctgctggaccctcagaaatgaccagaggacggcagaacccatcatcatgcagagccaagcatgtcaacctttctgcatccttagaccagaacaactcccatttcaaagtttggaattccttgcagttaaaaagtcattccccatttcagaactttatacctgatgaattcaaaatcagcaaaggtcttcgaatgccattcgatgaaaagatggacccttggctgtcagaattagtagaacctgcttttgtgccacctaaagaagtggattttcattcttcatcacaaatgccgtccccagaacccatgaaaaagtttactacctccatcactttttcatctcaccgacattctaaatgcatttccaattcctctgttgttaaggttggtgttactgaaggtagccagtgtactggagcatctgtgggggtatttaattctcatttcactgaagaacaaaatcctcccagagatcttaaacagaaaacctcttccccttcatcatttaaaatgcatagtaattcacaagataaagaagtgactattttagcagaaggtagaaggcaaagccaaaaattacctgttgattttgagcgttcttttcaagaagaaaaacccttagaaagatcagattttacaggcagtcattctgagcccagtaccagggcaaattgtagcaatttcaaggaaattcagatttctgataaccatacccttattagcatgggcagaccaagttccaccctaggagtaaacagatcgagttccagactaggagtaaaagagaagaatgtaactataactccagatcttccttcttgcatttttcttgaacaacgagagctctttgaacaaagcaaagccccacgtgcagatgaccatgtgaggaaacaccattctccctctcctcaacatcaggattatgtagctccagaccttccttcttgcatttttcttgaacaacgagaactctttgaacagtgcaaagccccatatgtagatcatcaaatgagagaaaaccattctccccttcctcaaggtcaggattctatagcttcagaccttccgtctcccatttctcttgaacaatgccaaagcaaagcgccaggtgtagatgaccaaatgaataaacaccattttccccttcctcaaggtcaggattgtgtagtggaaaagaataatcaacataagcctaaatcacacatttctaatataaatgttgaagccaagttcaatactgtggtctcccagtcagccccaaatcactgtacattagcagcatctgcatctactcctccttcaaatagaaaagcactttcttgtgttcatataactctttgtcccaagacttcttccaagttggatagtggaactttagatgaaagattccattcattggatgctgcttctaaagcgaggatgaatagtgagtttaactttgacttacatactgtatcttcgagatcactggaaccaacctccaaattattgaccagtaaacctgtagcacaggatcaagaatctttaggttttctaggacctaaatcttcactggatttccaagtcgtacagccttctcttccagacagtaacactattactcaggacttgaaaaccataccttctcagaatagccagatagtaacctccaggcaaatacaagtgaacatttcagatttcgaaggacattccaatccagaggggaccccagtatttgcagatcgattaccagagaagatgaagaccccactttctgctttctctgaaaaattgtcatctgatgcagtcactcagataacaacagaaagtccagaaaagaccctattttcatctgagatttttattaatgctgaagatcgtggacatgaaattatagagcctggtaaccagaagctacgcaaagctcctgtcaagtttgcctcatcatcttcagtccaacaggttactttttctcgcggcacagatggccagcctttattattgccatataagccttctggtagtaccaagatgtattatgttccacaattaagacaaattcctccatctccggattccaaatcagataccaccgttgaaagctcccattcaggatccaatgatgccattgctccagacttcccagctcaggtgctaggcacaagagatgatgacctctcagccactgttaacattaaacataaagaaggaatctacagtaagagggtagtgactaaggcatccttgccagtgggagaaaaacccttgcagaatgaaaatgcagatgcctcagttcaagtgctaatcactggggatgagaacctctcagacaaaaaacagcaagagattcacagtacaagggcagtgactgaggctgcccaggctaaagaaaaagaatctttgcagaaagatactgcagattccagtgctgctgctgctgcagagcactcagctcaagtaggagacccagaaatgaagaacttgccagacactaaagccattacacagaaagaggagatccataggaagaagacagttcccgaggaagcctggccaaacaataaagaatccctacagatcaatattgaagagtccgaatgtcattcagaatttgaaaatactacccgttctgtcttcaggtcagcaaagttttacattcatcatcccgtacacctaccaagtgatcaagatatttgccatgaatctttgggaaagagtgttttcatgagacattcttggaaagatttctttcagcatcatccagacaaacatagagaacacatgtgtcttcctcttccttatcaaaacatggacaagactaagacagattataccagaataaagagcctcagcatcaatgtgaatttgggaaacaaagaagtgatggatactactaaaagtcaagttagagattatccaaaacataatggacaaattagtgatccacaaagggatcagaaggtcaccccagagcaaacaactcagcacactgtgagtttgaatgaactgtggaacaagtatcgggagcgacagaggcaacagagacagcctgagttgggtgacaggaaagaactgtccttggtggaccgacttgatcggttggctaaaattcttcagaatccaatcacacattctctccaggtctcagaaagtacacatgatgatagcagaggggaacgaagtgtgaaggaatggagtggtagacaacagcagagaaataagcttcagaaaaagaagcggtttaaaagcctagagaaaagccataaaaatacaggcgagcttaaaaaaagcaaggtgctttctcatcatcgagctgggaggtctaatcaaattaaaattgaacagattaaatttgataaatatattctgagtaaacagccaggttttaattatataagcaacacttcttcggattgtcggccctcagaggagagtgagctgctcacagatactaccaccaacatcctttccggcaccacttctactgtcgaatcagatatattgacccaaacagatagagaggtggctctgcacgaaaggagtagctctgtttccactattgacactgcccggctgattcaagcttttggccatgaaagagtatgcttgtcacccagacgaattaaattatatagcagcatcaccaaccaacagaggagataccttgagaagcggagcaaacacagcaagaaagtgctgaatacaggtcatcccctagtgacttctgagcacaccagaaggagacacatccaggtagcaaaccatgtgatttcttctgactctatttcctcttctgccagtagtttcctgagctcaaactctactttttgcaacaagcagaatgtacacatgttaaacaagggcatacaagcaggtaacttggagattgtgaacggtgccaaaaaacacactcgagatgttgggataactttcccaactccaagttccagcgaggctaaattggagttgggaaagttatcccaacgtcgagc

SEQ ID NO: 49406 - DNA, 292 bp, Homo sapiens
gatgccaggttctatttggaatttacatacaacctgcttgggtggagaagccattgtcttcagaaaccttggtgtaattgaattgatagttactgttgtgacctgaagttcaccattaaaagggactacccaagcaaaatcatggaattattggttataaaaatgattgttggcacatcctatgcaatatatctaaattgaataatggtaccagataaaattatagatgggaatgaagcttgtgtatcatccattatcatgtgtaatcaataaacaatttaattctcttgaa

SEQ ID NO: 49407 - DNA, 344 bp, Homo sapiens
agggtttcaccatgttggccagggatggtctcgatctcctgacctcgtgatccgcccgccttggcctcccaaagtgctgagattacaggcatgagccaccacggccggcctcaatttaaacactttaaactgttctcttgatgggtatcagacaacgtatgccaaatgttgatgtggagactgggatcattgcagatattgatggctccagcactgggcatttttaaagaaataatggtataaatgtgatcctattatgcagaagagggagaggattcgcttagggcttccagttaaaattcaggacacccagtgaaattggaatttcacgtaaacaatgacta

SEQ ID NO: 49408 - DNA, 627 bp, Homo sapiens
  misc_feature (1)..(1): n is a, c, g, or t
ngtcttcttacactgaagctgctgtgttgtctgaacagagcctcaattaagaagtgactgaagcttttcccctccctccctctcttcctttcttctttcctttcttctttgtttcaacagttctggggaagtactaaatattagatcaaaattaaaacctgatacccaccgtactgagtgtttgcttagaaagttcttgtttgtttttgagaagcactaggagttaatggaatggggtatttagtgggcctttggattctgtagactcctagctctctgcctcctatgtgtaaggccttggacatttctcttaacctctctgagactgagcttcttcacatgcaaatggactcatttaccttccaggagcacctctgtgggagggggatgcaccatgtgaaagaggtaagccctaaggtggaggcagaagcaagtggccaagggaatacaggaggctaattttgacaggaactgtatgggaaaaggtggcctttgtgttgagcctagtagaatgacttcaataggcagtttttattcattcattcaacaaaaatttattgagatcttattatgagtcaggcactgttctaagtgctggggatataccagcaaacaacaaaatagaaa

SEQ ID NO: 49409 - DNA, 335 bp, Homo sapiens
tggagcgccggggagtggagtttgtgcacgtgtactgtgtggacaacatcctggtgcggctggcggaccctgtcttcatcggcttctgtgtgttgcagggcgcagactgtggcgccaaggtggtggaaaaggcataccccgaggagcccgtgggcgtggtgtgccaggtggacggtgtcccccaggtggtggagtacagcgagatcagtcctgagaccgcacagctacgtgcctccgacgggagcctgctgtacaatgcaggcaacatctgcaaccacttcttcacccgaggcttccttaaggcggtcaccaggtgtgcggcagcaggtggctgc

SEQ ID NO: 49410 - DNA, 2648 bp, Homo sapiens
tggagcgccggggagtggagtttgtgcacgtgtactgtgtggacaacatcctggtgcggctggcggaccctgtcttcatcggcttctgtgtgttgcagggcgcagactgtggcgccaaggtggtggaaaaggcataccccgaggagcccgtgggcgtggtgtgccaggtggacggtgtcccccaggtggtggagtacagcgagatcagtcctgagaccgcacagctacgtgcctccgacgggagcctgctgtacaatgcaggcaacatctgcaaccacttcttcacccgaggcttccttaaggcggtcaccagggagtttgagcctttgctgaagccacacgtggctgtgaagaaggtcccgtatgtggatgaggaggggaatctggtaaagccgctaaaaccgaacgggataaagatggagaagtttgtgtttgatgtgttccggtttgctaagaactttgctgccttggaagtgctgcgggaggaggaattttccccactgaagaacgcagagccagccgacagggacagtccccgcaccgctcgccaggccctgctcacccagcactaccggtgggctctgcgggccggggcccgcttcctggatgcccatggggcctggctcccagagctgcccagcttgcccccaaatggagaccctccggccatctgtgagatatcgcccttggtgtcttactctggagagggtttagaagtgtacctgcaaggccgggagttccagtccccgctcatcctggatgaagaccaggccagggagccgcagctgcaggagtcctgacccgcccagactgcccccagactcccccgagacctgccagccccggcatcctggaagtcccgactccccccagacctgccagccccggcgtcctggagctgggggctacagcccagcctgagctctgggtgggaaagcagcctgccccatgcttccagcctgcagaacacagaatgaaacatgctggtagactccacgagggcagggcctctcctgtcgcctctggacacaagtggcgacagcctgctgggggctctgtggctccattcctggctgtggggtctagtcaagaggcagagggacttgggacctgggagaatggggctgagaggaggcttcgggttggggcccaagggaggtgtggtgtcatctggggagaacaggagggcatgtccctttgggagcccgccttgtggatccaccacaccccaccgagcactagaagctgcataagctacacaggatgtgcttctgcagcctacagatgcagaaccagaatgagggggacaattccacccactcgagggctgccccctcttccttagcagacgaaccagtaatgggggcaaggctggggcatcccagcccacacaccctggatgcccagcaaggccacagaaagagcctgatgtccatgatccaggtggctctgagaagcttggcctggacacctgagcctgcggccggtactcctgccttctccccatctatccccaaggcctctgcctctcagcctcttccatggtcggtttaggctgctgagttttctgtgcttccccaagaaccagtgggatcaatgccggcggcctctgtgatggttgctgactaatccgggatttcatgagtcagaggcaccacccctcaccccagctgcctgctgcttctgacggatcttggtgctcaggctgcctggctctccgagtgaggacgcagcctccatatttggtgcactcaggcatggctgggacaagccagctgccccagggttcttcccctggtgattctcgcctgctttctcatctcaggggaggcagtggcacctccctctccctgctgacatgaagagagctatgatatgccactgctgccaactcatcctctgcccccacctcgaaacccacagtccccagtggagggccactactcatccccattggtttcccaggggaggggtgttgtctggaagggcaggttcagatgcagccttccagatttagaggcactgggaggacagtggctgagtggaggcgcccagacctgggcaggcagcaggctcaggcccacaccttgtgatttttgaaaccaaagcccagaagatgatgtttacttctctctccctggctctgcccttcttactgcaaaccatgctgtgccttagggcccttctcatagctgttcctcatggccatgactggaacagggatgcaacctctttctacacaagcacagttagttgggtgaagtctttttttttgtttgttttagacggagtttcactcttgttgcccaggctggagtgaagtggcgtgaccttggctcactgcaacctccaggccagcctcagcctccctagtagctgggactacaggcacccactaccacgcctggctaattctttgtatttttagtagagatggggtttgaccgtgttagccaggatggtctcgatctcctgacctcgtgatccacccacctcggcctcccaaagtgctgggattataggtgtgagccaccgcgccgggccggttgctggcatcttaatgttctgtaggtggaatatttccaataaacacaaggtgccgtaattgacaaacacaacacactaacacccacacaaaacaaaagagg

SEQ ID NO: 49411 - DNA, 2610 bp, Homo sapiens
tggagcgccggggagtggagtttgtgcacgtgtactgtgtggacaacatcctggtgcggctggcggaccctgtcttcatcggcttctgtgtgttgcagggcgcagactgtggcgccaaggtggtggaaaaggcataccccgaggagcccgtgggcgtggtgtgccaggtggacggtgtcccccaggtggtggagtacagcgagatcagtcctgagaccgcacagctacgtgcctccgacgggagcctgctgtacaatgcaggcaacatctgcaaccacttcttcacccgaggcttccttaaggcggtcaccagggagtttgagcctttgctgaagccacacgtggctgtgaagaaggtcccgtatgtggatgaggaggggaatctggtaaagccgctaaaaccgaacgggataaagatggagaagtttgtgtttgatgtgttccggtttgctaagaactttgctgccttggaagtgctgcgggaggaggaattttccccactgaagaacgcagagccagccgacagggacagtccccgcaccgctcgccaggccctgctcacccagcactaccggtgggctctgcgggccggggcccgcttcctggatgcccatggggcctggctcccagagctgcccagcttgcccccaaatggagaccctccggccatctgtgagatatcgcccttggtgtcttactctggagagggtttagaagtgtacctgcaaggccgggagttccagtccccgctcatcctggatgaagaccaggccagggagccgcagctgcaggagtcctgacccgcccagactgcccccagactcccccgagacctgccagccccggcatcctggaagtcccgactccccccagacctgccagccccggcgtcctggagctgggggctacagcccagcctgagctctgggtgggaaagcagcctgccccatgcttccagcctgcagaacacagaatgaaacatgctggtagactccacgagggcagggcctctcctgtcgcctctggacacaagtggcgacagcctgctgggggctctgtggctccattcctggctgtggggtctagtcaagaggcagagggacttgggacctgggagaatggggctgagaggaggcttcgggttggggcccaagggaggtgtggtgtcatctggggagaacaggagggcatgtccctttgggagcccgccttgtggatccaccacaccccaccgagcactagaagctgcataagctacacaggatgtgcttctgcagcctacagatgcagaaccagaatgagggggacaattccacccactcgagggctgccccctcttccttagcagacgaaccagtaatgggggcaaggctggggcatcccagcccacacaccctggatgcccagcaaggccacagaaagagcctgatgtccatgatccaggtggctctgagaagcttggcctggacacctgagcctgcggccggtactcctgccttctccccatctatccccaaggcctctgcctctcagcctcttccatggtcggtttaggctgctgagttttctgtgcttccccaagaaccagtgggatcaatgccggcggcctctgtgatggttgctgactaatccgggatttcatgagtcagaggcaccacccctcaccccagctgcctgctgcttctgacggatcttggtgctcaggctgcctggctctccgagtgaggacgcagcctccatatttggtgcactcaggcatggctgggacaagccagctgccccagggttcttcccctggtgattctcgcctgctttctcatctcaggggaggcagtggcacctccctctccctgctgacatgaagagagctatgatatgccactgctgccaactcatcctctgcccccacctcgaaacccacagtccccagtggagggccactactcatccccattggtttcccaggggaggggtgttgtctggaagggcaggttcagatgcagccttccagatttagaggcactgggaggacagtggctgagtggaggcgcccagacctgggcaggcagcaggctcaggcccacaccttgtgatttttgaaaccaaagcccagaagatgatgtttacttctctctccctggctctgcccttcttactgcaaaccatgctgtgccttagggcccttctcatagctgttcctcatggccatgactggaacagggatgcaacctctttctacacaagcacagttagttgggtgaagtctttttttttgtttgttttagacggagtttcactcttgttgcccaggctggagtgaagtggcgtgaccttggctcactgcaacctccaggccagcctcagcctccctagtagctgggactacaggcacccactaccacgcctggctaattctttgtatttttagtagagatggggtttgaccgtgttagccaggatggtctcgatctcctgacctcgtgatccacccacctcggcctcccaaagtgctgggattataggtgtgagccaccgcgccgggccggttgctggcatcttaatgttctgtaggtggaatatttccaataaacacaaggtgccgtaattgac

SEQ ID NO: 49412 - DNA, 660 bp, Homo sapiens
agcattcatttgcattcatttgacaagtcctgctgtgttcctttacttgttctcttctgtattatgggcttaagggtcgcttatttcaacatcgctatattttccctgaaagctcagtaatgattgaatcacagaatttaaagagcttgtcgtataaatacatctaaagtgaaaaagatgaactttttccccagtgaatacaggcaaccatcaatcaaaggaatgcatcctggaaaagaaaggcacagggtaaagcctgcctcctttgcgggtcccatctgttcttgggaggacagtccccatgtattgctcctgggccctttgtggccgagcacgaacagctgtacatacaaaggaggctgtgtgtttgttcatgatgttggaaccggaagtggaaggggctttcttgtcaaagaaggcacatatgagtgccatagttacgggacaaaaatatttctcctggaaaatctattgaagcctttgtgcgatgttcagcagagtgtgttgggggtgggtgtgaatgtatctgtgtgggtgaaatgaggcaggagaatcgtttgaactggggaggcagaggttgcagtgagtcaagatcacgccactgcactccagcctacgcaacagagcaagactctgtctcaaaaacaaaacaaaaagaac

SEQ ID NO: 49413 - DNA, 473 bp, Homo sapiens
cataaaggggccctgtttaaaaaatttattatcccaggatttgactccctgggtcacttcagcaactttataaattgctgggtttttccatcatcttctagtaactccctttggaaatcttctaaattttccttagttaaaaccgtttcctcagggaacagctatgactaccccaaaaaaaaaaaaaaaaaaaatcacgttaaatagttgcatggttgcgggggtcagatacagaaagaaaattgtcttttttttactatgcatgttaatttttaataaaaatgaattgagacatctggttaaaactttgggaggtgcatctagaaaagttacaggtggtgaatagaagtttgctactcattactgctaatttaagatatataatttgatatattctgtttatttagtgtgtagtctttaaaatatgatcctctattccttttcaaaattccaattaggtcacagattttcct

SEQ ID NO: 49414 - DNA, 2674 bp, Homo sapiens
  misc_feature (1571)..(1571): n is a, c, g, or t
  misc_feature (1758)..(1758): n is a, c, g, or t
  misc_feature (2011)..(2011): n is a, c, g, or t
tttaaagatgtggctaactagctagtgatgcatgaacaattgttttagaaacctaccattgtggtcctgttggtatctaggaagttttttcatttgttggtggcaactgagtgatctgttatgtctacttttcctctctccctgtcccctcccccatcttcttctctctcttttctttctccctttttttcagtcaaggtagacttgagataggggacttgcatggctatagtagatcataatacatgaggccccccaaataagagagtgaaacattgtctgggatgtattttctgctcgaactcatcgtcatttttctgtgtatttcttacattagcccccagaaaagcatttttcaaagactttgagaaccaaaggttctctctgtaaggaaatgtgttaacctgatttccttgttctcatgtaattttctctcttaaagccataataatagtgtcagaggcagctttctagttagtgtgagtaatgtggttactgtattttctatttttattttaatgtgcttttcctgctgtggattttttttttctttcttgattttaaaaacagcagttgagtaaatgtggttatttgaagactggcgtatattgcatcttctctgagatgcaattttgaaggaaggctctgtgcacaataggcattttttttcagattccttagtaggataaataggagaatgtttggaacacagatcagtgacaatattggtttatggtcatggtaggtcaggcttcctcagagaaactgacaatagagtatcccataggttttgtctctagagagtctgttaatatgaagtctgtttattttatgatgtgttgataagaaaattaggtaaccagggaagcaccttaaattgctgcattcatttgcctctttttaagcatgcacacacattgagaaattttgaattaacaacaacaaaatacacttaaattcccctggaaagagtaattaagagctacttgtctctgtgctgtcatctctgccagaattagagttcctgctgagtatattccattgagtcagccatcattccatcaccagcagggattgcttttctgcttttccacgtattgacatgtgagggaatgtctgtcttgcagtagccatgggcttgtgccagattttgagatccatagaggcagttctgggagcttttcaattctgaatcagggttccaattcataatagctgagccagggaaaccgggttgaatctgtggccaaaaccgtggtaaaaaactttttccccctttcctttcttgcagtgctttattgctttaaaatatgagtgcctctgtccattgattctctggtgactttccgttggattcaaattgtggtctcttaggtgaaaaggtcagtgtgttattcattcagccacacatcgatggagattaactgagagcagtacaagacatttggatcctgccagacctagggcacctgaaggaagtttatttcttttctctctagcctttactatgcctgctgcagaagaggatggccctgtcttctgggagtaggggagggttttgattggctgtntgttaactgcctcaaatccatggccatagggcgagtaagaaccctggagaatcaaacatgtcatctttgtagcatcacctgatttagtgcttttcctcaggtctgagatgtctcagggggcctttttcccttgcagcactgatctttcaatgaggtgctagtgtctgtcctgagcaataacaagganaaaccatgaagtgtgaacagctcttattaggggggtaaatgtcattagcgcctttgtagccttctctgcaatctgaatgctcctgtcaaaagagcgacttactgaagcctcctttaaaatcacataaatggaatttaagatgctgaagttttacattttaattaagcaaggccattaactccctttacatatacacttttttgtagccagttatgcttgtatgccttataaggctattgaaaaattatccacnaaaattattttaaggatttgagaaatagttggttaactttaagtcaaagttttagatatagagaccctatactcatgtgcccaaccattgtaatatgcgtattgacgtatatgataggagaaaacactagcattttgagttaataagtaggtcagtttggattaatggaaagtttgaagcttagagtgtttaaataatgattttattcttttcaatacacaagtggaaatgtttctccagtctaaattccccctagtattctcctgaaacaaaatttttatatgcagatatttgcttcttttgcaagtttgagaatttcacagtaacttctggttaccctgggttgtgtcttgcagttaccaaaaaaaaaaaaaaaaaaaaaaatcacgttaaatagttgcatggttgcgggggtcagatacagaaagaaaattgtcttttttttactatgcatgttaatttttaataaaaatgaattgagacatctggttaaaactttgggaggtgcatctagaaaagttacaggtggtgaatagaagtttgctactcattactgctaatttaagatatataatttgatatattctgtttatttagtgtgtagtctttaaaatatgatcctctattccttttcaaaattccaattaggtcacagattttcct

SEQ ID NO: 49415 - DNA, 420 bp, Homo sapiens
ctacgagggggaaaaggctagcagtgagggagaggaggaggactgcaggcggaagagcgcgcggttcttaggatccccgactcagaagctctgcctggcctcaggatgtggcgagcctcaagagacggtttgaaggtatttgtgccaacgtgacccccagggagatttggaggaagctttctacgtcctaggaggctgagatcccacggagccggtttacggttgagagcagacagtttcgagtagatagcgctggaagagacacgaagaatctctcttgcttcttgggaacgcgataaccacattttcttttctctgtttacccccactacttaaaaatcagcaattccgcacagagcaggcagccgctttggttcgaatgaattaatttgcccaagacagcagccgctcttctgaagt

SEQ ID NO: 49416 - DNA, 453 bp, Homo sapiens
attaactctgttttaagaatgagctgattgtttgagttggttaagataagatcacctcaacatctgttggtgataactttatctcaagtgtatctttaaggaagtccatttcaactgaaacatagttaagtatcttgaactgcacagatatgctttcaactttgagctggaattagcatttttatcttctttgggaactggacacagagaaggaaaagaataaactttgtttactccttccagcccaaaccctccattaaaaatttttcttaaagtacaaaacgtttgaatgccccatgaaaacatctcaaatgattgtgctgggtgtgtaagcaaggcagggttttactgttttaaaaacgcacttgggggaaccttgaggagtttgcctttttataaacccctctgatcttctatgtgaggaaacggaggtccagtgagtgaaagtgatta

SEQ ID NO: 49417 - DNA, 359 bp, Homo sapiens
ttttagctgaaagggcagatgtcagctggtttgagcctgcctaggtgagctcaacagctttcaatggggagaagacttcgagtttctaggtgacagctgaatcctcactgggtgaatccttactggtggcccatgcccgaggcaccttgaggacaacatggaaagcaacccaggagtaagggcgaattaggtttctctctggtgctgagaagatgttggctgtggaagcagaggaagtgaatcaggatcatatggctgtggagtggcagtttgctgagggcagtgaagtacagacagaaggacagttttaaacaacaggaagtcttcattcccttcctgggtgtctttggtcatctggg

SEQ ID NO: 49418 - DNA, 354 bp, Homo sapiens
ttcaaactgcattccttcatctatcgtatacattccactttgactatttccaaaattgaaatgttgcctccaatatttacaataagataacaaggaaatgaacatgaccagatattaaccttcagcatttacccaaaagctgtgctttgataaaagactttatgaaacaaggtcttttaaaaatcaaaggggtgtgctcaagaatacgataaatatttggaatgctgcctgtgtggtatatttgtttaataaaatagtatgccagcctgagcaacatggtgaaaccccatctctattaaaaatacaaaaaaactagccaggcatggtggtgcacacctgtagtcccagctactc

SEQ ID NO: 49419 - DNA, 451 bp, Homo sapiens
gttttgtagctatggataattctaaaatgtatatggaaaggcaaaagagctagagtagctaaaacaattttgaaaaagaaaactaaaatagaggaaccatgctaccctttttcaagacagtgcaatactggtgaatggataaacacgtagatcaatagaataggacagagaaccagaaatagcctcacactaatattgtcaactggttttaacaaaggcgcaaaaggagaaaggatagcattttcaacaaatggcaccagaacaattggtatgatataaggcaggcaaaacttaagaacctctacttaaaactcacactttatatataaaacttaaagttgatcatagatttcaatgtaaaatgtgaaacttttagaaaagaacataaagtcttctaagatctaggctaagcaaagaatttttagacttgccaccaaaagcatgattcata

SEQ ID NO: 49420 - DNA, 451 bp, Homo sapiens
gatgtttgtcatggccctccttatattacaaacacttagtgagcacttgctatgtgccaatgttgtgctaggtctggggatcctaagactagaggcagaggcttgctcatacaaagattgggtcatagacagtaggcagagggtttcaatagagccagacagtcagaaatgagtagagatggcagctgtcaggagggccgcccactcagtgcagattgcagttggggctcactctcgtatatgatcacatacatcatttcaggtagtcttctcaaccaccccctcggcctagcaaggcaggtgttatcaatctcccctttgtagattaaaaagctgaagatctgaattgtttgatatgttattactcttattaataagatccattcaaaataaaacttgctgtcacaaatgtaattgcagcgaacatgtgcaaagatttagaccaagtaaa

SEQ ID NO: 49421 - DNA, 488 bp, Homo sapiens
tggactttaattcagagcatgaataagacaatcctttatcaagaccatttggggagaactttttaaggggaagatatcttcttctatcgtggcctcaaatcaggccatactgattttctacatgcactaagggtgtggagatgggggttagggtagcagggctacaagaaaggatcagcagctcttgtgcacatggaatgtctgaacgctgaaacagaactacatcactaccacacagccatgctgctctatggagaacttttatcttttgcctttcactgtgtttttatagtgttctgggtgtcataacttccttttgctattgcttttcctggaagtgaatgtgactttatccattttgcagaaaaaaaaagcctgcacaatgtgaatcactaggcaattggctgttagaagaggatgtacaacctattatgctataggattcctgccctcaaggaatttactatcatgcaatcaaattcagtggg

SEQ ID NO: 49422 - DNA, 246 bp, Homo sapiens
accttttgcaccagccctcttggtaccagagttcttgttcggtgtccgggaggaatcaggctgcatcagttaattgaagggtggtgaatgtggaggatttactgacgagtggaagtggctttcagtgggatgcggtgctggaaaggggatggagtggaaaggtggtcttcccctggagtttggctatcccctgctgacctcttctctgtggtcctaccgtcaagccgtccttctgaagtcccacct

SEQ ID NO: 49423 - DNA, 386 bp, Homo sapiens
ttttaaagaaagataacttaaataaaatttgaaaaaaattgcatttacagtaagcaactaaacaagtggtcttaatcagttcttgtttaaaatgaactgatgtagtctgcttcttcgataaataatttttgccataaatatgttggtttcaaaacaaagcaaaagtcaggagttaccaggtctcaagcactgataagtatagcagcagctatggttctagtgttattatccagaagattggagctcaataaatgtaagcctctgattgtgtttctactctgctgtatttatattcatcaaagaaaataaatacagtgaagtcatagatgaaaaaatgctaagcaaatacattattcctgttttctaccattattttgcagaatgtg

SEQ ID NO: 49424 - DNA, 1475 bp, Homo sapiens
tacaaaaattaagcaggtgtggtggcacgcgcctgtaatcccagctacttgggagactgaggcaggagaattgcttgaacttgggaggcggaggctgcagcgagccgagattgcgccactgcgctccatcctgggccacagagacagactccatctcacccaaaaataacgattaaaaaaaaatgttactgggtggttttatttaaataaattttgtgtatatttcaggtatacaacatgatgttttgggatgcatatagatagtaaaaaggtttctacagtgaagtaaattaacatccattgtctcacatagctattttgtttttgtggcaacagctaaaatctcatttagcatggatcctgtttacagtataattttattacctatagttgtcatgttgtacattagatcgttagacttgttcagcctacgtacctgttcctttatattctctgacctatatctcttcctttactaactcccacatcactgttttgttctctaattctgtatatttgattttttaaaaaaatttcacatgtaaatgagattgtgcaatgtttttctttcagtcctcctgactcatctatgctgtgacaaatggcaaaatattttgtttttttttttttttgagacagtcttgctgtcttagcacttgctctgtcactgcactcaggctggagtgcagtggtgctatctcagctcactgcaacctctgcctccctaattcaagcgattcttttgcctctgcctcccaagtagccaggattacaggtgtgcgccaccacgcctggttaatttttatatttttttagtagagacaggatttcaccattttggccaggctggtctcaaactcttgacttaatcccaaagtgctgggattacaggcatatgccactgcgcctggccaagatctcattcttttttagggctgagtaacatatgccatcatatatatgcactgtagtttctacagtttatccattcatccattgatgatggacagttaggttttttctgtatcttggctattgtgaataatgttccactgaacataggagtgcagacatctttatgaagtgatttcatgttttttggttatatgcccagaagagggagtgctgggttatgtggtggttccatttttaatttctttagaaacctcccagctgggcgcggtggctcatgcctgtaatcctggctactcaggaggctgtggcaggagtatcgctcccgggttcaagcgattctcctgcctcagcctcctgagtagctgacattataggcacctgccaccacgcccagctaatttttgtatttttagtagagatggggttctcaccatattgggcaggctcgtcttgaactcctgacctcgtgatccgcccaccttagcctcccaaaatgctgagattggaggtgtgagccaccgcgcctggccagtgtgtcctttcttaattgacagtgacat

SEQ ID NO: 49425 - DNA, 1401 bp, Homo sapiens
tacaaaaattaagcaggtgtggtggcacgcgcctgtaatcccagctacttgggagactgaggcaggagaattgcttgaacttgggaggcggaggctgcagcgagccgagattgcgccactgcgctccatcctgggccacagagacagactccatctcacccaaaaataacgattaaaaaaaaatgttactgggtggttttatttaaataaattttgtgtatatttcaggtatacaacatgatgttttgggatgcatatagatagtaaaaaggtttctacagtgaagtaaattaacatccattgtctcacatagctattttgtttttgtggcaacagctaaaatctcatttagcatggatcctgtttacagtataattttattacctatagttgtcatgttgtacattagatcgttagacttgttcagcctacgtacctgttcctttatattctctgacctatatctcttcctttactaactcccacatcactgttttgttctctaattctgtatatttgattttttaaaaaaatttcacatgtaaatgagattgtgcaatgtttttctttcagtcctcctgactcatctatgctgtgacaaatggcaaaatattttgtttttttttttttttgagacagtcttgctgtcttagcacttgctctgtcactgcactcaggctggagtgcagtggtgctatctcagctcactgcaacctctgcctccctaattcaagcgattcttttgcctctgcctcccaagtagccaggattacaggtgtgcgccaccacgcctggttaatttttatatttttttagtagagacaggatttcaccattttggccaggctggtctcaaactcttgacttaatcccaaagtgctgggattacaggcatatgccactgcgcctggccaagatctcattcttttttagggctgagtaacatatgccatcatatatatgcactgtagtttctacagtttatccattcatccattgatgatggacagttaggttttttctgtatcttggctattgtgaataatgttccactgaacataggagtgcagacatctttatgaagtgatttcatgttttttggttatatgcccagaagagggagtgctgggttatgtggtggttccatttttaatttctttagaaacctcccagctgggcgcggtggctcagcctcctgagtagctgacattataggcacctgccaccacgcccagctaatttttgtatttttagtagagatggggttctcaccatattgggcaggctcgtcttgaactcctgacctcgtgatccgcccaccttagcctcccaaaatgctgagattggaggtgtgagccaccgcgcctggccagtgtgtcctttcttaattgacagtgacat

SEQ ID NO: 49426 - DNA, 307 bp, Homo sapiens
gtatattcatgtctggaagagggactcacttaagctaaactaacaatagatttataaactagattatctatgtattattaatttataggcagattcagatgtagctaaaaagccacatctgataaccagtaagtggcaatcccttaactaaggtttagacttattggagaaaagctgagatggagcagaaggttatttgatgatgtgctatctgaataatcaaaatgagatgaccctaaggcagtggtttcaaccaggggtggttttggctccaaggaggcatttggcaatgtctggagacattttt

SEQ ID NO: 49427 - DNA, 1311 bp, Homo sapiens
caaagtgctgggattacaggcatgtgccgcagcacccagtctggattattgttctttaaaagaaacaggtttgttaatcttatgggcagcctgcccaggggctgccacaggaagacaattattagtgactgccatttgttgaaatgactttgcaagcagtcatacatggaggtggaaaaagagaaggaaaatattttatcaaaattcgggcccctaccgtaattttaatcttgagggtgtttttaattttatgagggaggcttcagcaggagtcagcaagctacacccataggccagatagacttgcctcctgcaatacagtagttttattggaacacacatgcactgaaataagatttgatttcatggaatagccaagaccttgttttaatgagacagtagacttctgccttcgaagtctcatcccaggctcttttatatcagattgcgttaggtttaaaaaaggttgcaggtagttgaagaatctcaggtaataaggtatctctcccaaccaaaaaaaaaaaaaaaaaaaaattctttacagcagttgatacactgcttgagagcttgagagacttcatttgataagattaatttttatcagggcaatatagatttaatgttttaccttgtagaaaaaagtagtactttttttgaaggaatctctaaagttgcagggaaagattaataaccaattacatgccaaacagaaaagcctaataactgcctcttccacaagggaaaaatctgaatatgagacagtagctgaaagtttcttgaattcaccttgagaagacttaaaacatatttttaggatttatgctgaataaggttcaaggaatttgaatgaatagaaaggagaaagtaagtttgtaggaggataggataggtttgtgcgatagatctattttcagaaacattgaattttgattgtcataagcataaaaaggttggaaaatttgttttgtaatgacttaatggcaatagtaattcctgtcaattagttattagattttcaggaaacaccttgtgtcaagggttaaattcagcttattgtatttagtagaagcacaaaaacaagttgtgtaatctcagaaagttttagagcctagaaagttctacgtttagctgtagaactttcagattagaaaatttgacctttaatgttcttggccgcataccagtcacgcacttactgtatgttccaaagaaaggaatcctgctgttaacaggaagtctttagttggaatactaaaggcagactgaattcctttgttttgcgcttaaattttagttctgtctcaaaaacat

SEQ ID NO: 49428 - DNA, 542 bp, Homo sapiens
caaagtgctgggattacaggcatgtgccgcagcacccagtctggattattgttctttaaaagaaacaggtttgttaatcttatgggcagcctgcccaggggctgccacaggaagacaattattagtgactgccatttgttgaaatgactttgcaagcagtcatacatggaggtggaaaaagagaaggaaaatattttatcaaaattcgggcccctaccgtaattttaatcttgagggtgtttttaattttatgagggaggcttcagcaggagtcagcaagctacacccataggccagatagacttgcctcctgcaatacagtagttttattggaacacacatgcactgaaataagatttgatttcatggaatagccaagaccttgttttaatgagacagtagacttctgccttcgaagtctcatcccaggctcttttatatcagattgcgttaggtttaaaaaaggttgcaggtagtttaaaaatttccgggtattagggttttttccccccccaaaaaaaacccaaaaaaggagggggaaa

SEQ ID NO: 49429 - DNA, 2415 bp, Homo sapiens
agcggagtgcctgctgcggcgctgcatcgacaaggctgagaccgttcagcggatcatctacatcgccacagtggaggcattccatgtagcaaaaatggcattcagacacttcaagatccatgtgagaaaatcgttgacaccatcttatgtggggtcgaatgactttgagaatgctgtcttggattatgtcatttgtcatcttgatctatatgattctcaaagcagtgtcaatgatgtgatccgagccatgaatgtcaatcccaagatttcattccctcctgtcgttgacttttgccttctcagtgacttcatccaggagatatgttgcattgcctttgcaatgcaggccttagaaccacccctagatattgcatatggagcagatggagaagtttttaatgattgcaaataccgccgcagctacgactcggatttcactgctcccttagtcctctatcacgtgtggcctgctctcatggagaatgactgtgtcattatgaagggagaagctgtcaccaggagaggggctttttggaattcggtgcgatctgtaagtcgttgtcgaagcaggagtttaagtcccatttgcccccgtagccaaattggtttaaacacgatgtctcgaagtcggagtccttctccaataagatgtggattgccaagattttaaaagcaccagacctgctcctttgacccagtgcgtggaaacagctgctttctccagtgccgccatctgtcttctgtgtctgcctcagacctcacttaagataatgtcaaaaggcaattctgtgtatcaccccacacagagagttaaatgttttggcttggcgcatttgtaactttagatatattgcattctattttattttatagatactaattccattaatttcataaaaatgattgtataggcatttaggatcatattcattcgaagcaaagtccgttacaaaggttcaagatttccatctcaaaacactacgctcttttatgggaactgtgtgaactgaagtggaaagcatctaccatgctgaggctaaaagaaaagatgaatcattttagtttgcagatggatcgtaaatataattgttggtatcagctttagctcaaaaccaatattaggtgttttaatttccttttaaggtttggaagacagccctaatctcaggttggggagctcatgttagtagcagtgacttaaggctaagtgtagaagataatttaagatacattttctttatatattagccaacaaattatatttattggttggcttgcttttccgttctgattttgagagtgcccagtttggtttagttgaccaatgaatgtcaaagctacttagttgagagaatttccttgttcataaatgtagagcagtgatttgattagaagccagctttgagataaatgttaattacctcatgcatatctcctgggaatatttcaaactgttttaatgcatgtgttatatataaaagtttcttgggacatgctcttcacctgttctacctagttatttgcaaattcagacctcctattgaactctgtctgaccaaaactacttaaactcaaggcccaaaactaggggcaccatttactgattttaaattgagtatatatcccttgacttcttcactgtcaaatacttttgaaacttcacgttcaagataagaatggaatgttgctttcttgcaataagtaatgttctttctgcctttttttcacttttaagtcagccttaaacacatgcctcacaaacatctactttctccacatacctttgagagagacactgaattggcctcagctcagttttgcataagcttagtgccagaaccagcacctgatgcttttcaggtgaaaataaaacaaacagcttctctaaagcatcttacccctgtgctggaggtttgagggacctcttcagtgcctgccccttgagtctaatggtcaccacctcattctgaagtatgagttgaattttttgccctctttgcatatttacattagtcatcactttgaagcaatgcagtgtgctggaaggagcactatctgcctaggtaactgctagtcatgacttggtcatcagcttgctttgtggcactgagcaagttacttcacttctctgagccttggttttatcatagggtgaggaggttggatacaattagtgccctcttaaccctgcagactcaatgttcccttttataacaagtattttattctgaatatgaaatgaaaattaaagttaatataatcatctatgtgcatgtataattttaagcagtgaacatagtaccctaactataatataaagcagaaaaaaaggcaacttttaataaaataaaatgtatttcaataaaaaagcttgggtataaccaccctagaagataaaattaagtcattagatgg

SEQ ID NO: 49430 - DNA, 621 bp, Homo sapiens
agcggagtgcctgctgcggcgctgcatcgacaaggctgagaccgttcagcggatcatctacatcgccacagtggaggcattccatgtagcaaaaatggcattcagacacttcaagatccatgtgagaaaatcgttgacaccatcttatgtggggtcgaatgactttgagaatgctgtcttggattatgtcatttgtcatcttgatctatatgattctcaaagcagtgtcaatgatgtgatccgagccatgaatgtcaatcccaagatttcattccctcctgtcgttgacttttgccttctcagtgacttcatccaggagatatgttgcattgcctttgcaatgcaggccttagaaccacccctagatattgcatatggagcagatggagaagtttttaatgattgcaaataccgccgcagctacgactcggatttcactgctcccttagtcctctatcacgtgtggcctgctctcatggagaatgactgtgtcattatgaagggagaagctgtcaccaggagaggggcttttgtacggtggccttgcatagtgacaattcatcccaagtgtttgattcacaagttcgagaacatttataaacccagagattctataaaaga

SEQ ID NO: 49431 - DNA, 370 bp, Homo sapiens
atttaatttgacatttaacttatattatatatatatgaactttgttttgatgtgtgaaatgagcgatactttttctccaaatagctaaccaattccaaaaccatcagttaaataacttatccttttcccactgatttttgcttcttcttacatatattttcccttgttggtttattctttcgtcaggaggcagtgaaactttggggagaaaagataacaggcttaacactgtaactgctgaatttaagatgtttatgaatcattcagatggaaatatatagtaggacacaatagatataggtttcttgcctaaaagagagaggggagctttatttgagggtaaaaagattactcaggggaacacaggtaa

SEQ ID NO: 49432 - DNA, 378 bp, Homo sapiens
tatgaaaaggatgtcactgaaggtagtaacacttcatgccacttgctttttactttcgacattgcttctaagattcatatacatcggcctttcccaaccagagcccctcatcttgaccacagaacacagaaaataattggagtgtattttctcagtcctccaaacatgatacataaatagtctcctaaattttagatgcataagggagaagttatctcgttacatacaatggatgccttaggctgggcatttggagcttaattctctattggaacctggttgagactggccgaattgttacatgtagctagagttaattcatttttactgctgtaagatatcccatttgtgagcacactaaagtttttttcatatgtc

SEQ ID NO: 49433 - DNA, 278 bp, Homo sapiens
ggggataaatggatgtagtaccctaattatgagcagataactgctaattccttccaaattagctaattcccatagtcacatatgaaagtaggaacacggggatatacaaataaaaatgtatcaggagttaccagagtacagggaacaggcacgtgcttaaggtttagacctgtgagcactagttctttttaaggcttcatggagttaaaactagctgatgtacgatgtgtgtaaagattcggccagctgaaagaaaggaatcctagcaaggggcatca

SEQ ID NO: 49434 - DNA, 586 bp, Homo sapiens
ccatcacactctggactatcctcagcaagggaaaaagattttctagggaaattacatttttggaaacaaccaaaagtcagcataaccatgactgcagaataaagtagttgatgaaggtaagtgaataggggtgggaactatatttgagggccaagtatatagtgatccagagctaggtgtgtatatacaatttcatttaatcctctcaaaaagacagtttataggtgaagtgacttgcccaatgtcatgcaggcagtacataataaatattgggtttgaattcagccctatctgattcctaagcatatgctattatctgattccacatccttatatctaactcctaagcatacactatttctactatgtttgctgtttcctgagaaatcttaaggaaggagttactggagtactcccttaaattccagctccctcttttgatccctaaatgaaataggaaagcataaaatgactaatgttgttgacttcctactgggccccgcctctgctaggtacaagttatctaatttaattctgataaaaatcatgtgaagaagatatatccatccccattttcagatgagaa

SEQ ID NO: 49435 - DNA, 1241 bp, Homo sapiens
gcctctcccccacacagctggttttgatttggttcctgtggaatatttttgttttgttttgttttgcatttaacaacagtcagatatttatgtacagcttcatcaagagcctctgatgacaaatatgcctttggaggccagcagaagctgtgggaaacccccgtgtcagcactcagacctgtttccaatggagagaaatcgctctggggactgaactagcctgctcatgaatccagttcccttttcccagagccttctgctagctcacttccaacccatgctggccatcctgggactgtgccctgccttgatttttccttatgaagcaatccctcaagacacagccttggccctctctcctgagtgagggaggaaaggcagaaacaggcagaaagccatttacttcttagattggaaactagagcctggtttttgaaataaagcttggcagtatctcacttataacttactttataaaatgtgtaccttttatttgctgtcagagttatctacatgaatttgagatgtttggataaatcgttattggggaaagttgcaattggaaaatagacaatgaagtctgggcagagttccccacccttcggaaaagagtctcggatggtataatccgcttggagaagtctaagggagaaagaaggggggaaatcataaatgctgaaagcaaagcaaagacagctaatattaggaaacagaacatgggaatccagtccttcttacattgtactcctggttccgccagtgttctcatgagtgaccttggatgaatccttcagtgtcctgtgcatgcttccccacttaaaatgagaggattgaatcatgtgaaattctttttttaagcctcctttctagaaaaaaatgaaatgcttttcaactctaatttagtgattttgattcaaatataccatgtataaccaaaaaggaaaaagatggataatttttacataaaagtgtttaaaaatatatcaaagtacttactttttatacattttataaatattctttggtatctattatatctagctaccattgccagaaacaactttttgcagattttgagatttacatctactttgagccttaatagaacattgcttatactttgtattgatgtgtgtcactgtacgtataaatctttttgacttctttataaactcaaatccaccctggccataactgggtatgttcatgaaacatgctactcactacccctcagtacagct

SEQ ID NO: 49436 - DNA, 471 bp, Homo sapiens
gaagtgtttctgagacacaattcataagtttctgacagcagggcctggttaaacgaaccatggagctgtcttgctgagaacagcactgcccacgggaaagtggacaggtctgtgcgcttgtgaagggaacaggtcacgtacactaaaggggagcgcgggctccagggaggattcctgagtattcccattcatgtattctctctgaattgagtacccatacacagggtgtctgcaaagttggaaaccaggacacacctacttttaaactgttagttacattttcaaatgctatattcaacgtgttttcaggcgaatacctaggtaatgagtataattattaaattgaaaaaaggtactaaagacagagtgtccaaaaatctagaaacactggaaaaaatagtccatttatagcacgttttcatatgagcaattggacgtttgctttaaatttaggtatctggagactgacca

SEQ ID NO: 49437 - DNA, 581 bp, Homo sapiens
ccaccactgcgcccagctagactttagtttttatagtgaggcttgagatttgcatctccactggtctctttgacatctcagaggatccattctgaacttgctaggtttctttcccctgctgaattgagttctgcatcttgagtctgcagcagtgtgaatcctatctttggctccatttaacagcctatggacgttcccaaacttgggacccagtttgtctcttcatgatagacaaatattattttcagaagtcattctaatcgcaccactgcactccagcctggcaacagtgagactccatctcaaaaaaaaaaaaaaaagtcattctagtgggtgagatttctgccagcattgagccactgctcaacatattcttgataatggtctctgaacagcatttgattttaccttggagttgcaaagtcaaagtctaactcgccaaacaaactcagtgtggaatatacacatttgtctcattccggttttaaggagtttagtataccagagcttttgtgacctctaaaaagcagttatcgtccatgacaagaattggctcgttcaccctcagtactctggcttac

SEQ ID NO: 49438 - DNA, 955 bp, Homo sapiens
aggattctcgcctcacagggtcattccctttgcctttccaaacatgcccattgccaggagagttctggcaatttgcagttgggtgttgagtaatctaaaattgagagactgctagggtttttgttgaaatgatattttaaaaactaaatagggaatcccatcgagagatagtagaaaggcaaattaacattttaactcgctcttctaggcttttaaaactgaatgtacttagataatttgttcactccttgtaactacaacagcctattagaaattattttggccagatcctggctggattctgtagctacttgcatgtgttactctgactcttactgtctttatgtagtcccttctgccttaagatctatctgctttttgcttgagactgtcctgagaccagcagtctttgacgagaagagtatttgtggctcttccctcctgggcttggagttgtatccctcataacaacggggttatgccgtgtggggatggcggcgcagacagccttccataggtggtaaactataactgtgtcatttgtgactgacagaacaaaagggctttgttgccactttaattgttgattaatgatgatccctctcaaatttgacacggttgctttctagaacacaaaagaagtcaatgtcagatgtttccttgatcatgacagtcatgattttcaggcagtcttggttctctgacatttcaggatgccatagaagatttcaagaaacataattgaataattttattaattgaataaaaaactgtactgcatattacttttcatactgtttgtgcaggatgtcaccagctacctgagatttatatgcaccaagtcatgttttatttgggaaaaagttcatatcttgtagatatttagtgctattatcttcgattttttaatttttttcctcctctttcctacccccctaatccttccctggaatta

SEQ ID NO: 49439 - DNA, 758 bp, Homo sapiens
aagatgcaaggaatctcagtcctcccatggaccatggaggagaaaggaaccagaaaatagcaaacaattaatatctgccacggcacgcgcttccttatggcaacaataggctggagcccattagaagctgccccttgaaatgggacttaaacacccagtttgacagtctccacccagcctgcctagcccttgggggcatttgattttgcaagtcctggtaaagataaagccaatctcaatatcagtctttcagatgtccctggtgatccgtggagttatcacacagttttcaaaaacaaatgttttgctctgcttgagacaaaaacttatgacatgcagaattcttacaatgaaaagcaggatggtatcatgaaatcaaacatgaagttgaaactagctgttattgtagtctgcaaattacataaacctgtttatggtgatttcttcctgttgctcttccctccatcaatcaaacacccaccaggagaaacaagcctcccaagctcttccctggagtggtagtgacttgggaaggggggcggggggatgtctaatttaacattttgaagcatttatatatatatatgaatatacatatatatagatgtgtgtgtctatataaatattcaaggctaaaatatttgagaagaaaacttgtgagctaggaatgggaaggcttctcttccaatgaccaccaatgagaatgttataaaatatgtctaaaggtttaagaataaatcagcatccatacaaatgca

SEQ ID NO: 49440 - DNA, 457 bp, Homo sapiens
gggcagaagtgcaattcctcagagccccaagacgctgggcagagttgacaggacccaaatgctaaagttgtggagggaaaggggagtttgggaagaccctgtcctgagccctaaactcagcacagtgcattttcttaccaacttctgaatattcatctcaggctggattctgcacccgaggagagccaggcacactccaaaactgtcacactgccgatggtgcgtggcacagccagcttcctctctgtccctccatagggcctgtgcagtcttaccagcctggggaacggcattctcagcagcctgcacaatggactgtattaatcacgtagaacgagagggaaaaagaaagctaaatttctattagcataagaaatagaatcttagagcattccatctccaattctctagcaggatagagagatataatctaagctctgaacagcttctttctagc

SEQ ID NO: 49441 - DNA, 623 bp, Homo sapiens
taacttttcttataagcctgattatttttaatttgtgattttgcagaactaaagggttatttaggaatgtgtatattgcattgtactagaaatgcttgtattatccccagttacaactagtctcttagttgtagttggcaaaagttcaatttagctttgattctgtcacccagaatttttcagtatcaaggaacttcttccatctcaacccatttcagaaatcaaaatgagtggagctacagcatgtggcaaaaggaataatggataaaataattggacttcatcaaaatgaactcttgtgcatcaaagggcatattaaagtgaaacaacaggccgggggcggtgactcacgcctgtaatcccagcactttgggaggcagaggcgggtggatcacttgagggcaggagttcaagaccagcctccccaacatagtgaaaccccctctctactaaaattacaaaagttaactgggtgtggtggcacaggcctatagtcccagccgctctgggcactgcagcagaagaaaggcttgaacctgagaggtggaggttgcagtgagctgagatcatgccaccgcattcaagcttgggcaaaagagcgagaccctgtctccccccccaaa

SEQ ID NO: 49442 - DNA, 614 bp, Homo sapiens
taacttttcttataagcctgattatttttaatttgtgattttgcagaactaaagggttatttaggaatgtgtatattgcattgtactagaaatgcttgtattatccccagttacaactagtctcttagttgtagttggcaaaagttcaatttagctttgattctgtcacccagaatttttcagtatcaaggaacttcttccatctcaacccatttcagaaatcaaaatgagtggagctacagcatgtggcaaaaggaataatggataaaataattggacttcatcaaaatgaactcttgtgcatcaaagggcatattaaagtgaaacaacaggccgggggcggtgactcacgcctgtaatcccagcactttgggaggcagaggcgggtggatcacttgagggcaggagtttgagaccagcctgaccaacatggtaaaacctcatctctactaaaaataaaaaaaattagctgggtgtggtgacgcgcgcctggtattctggctacttgggaggttgaggcaggagaatcgcttgatctgggaggcagaggttgtgatgagctgagattgcgccactgcactccagcctgggtggcagagcaagactgtgtctca

SEQ ID NO: 49443 - DNA, 1208 bp, Homo sapiens
agcaggagtctcgctctgtcgcccaggatgcagtgcagtggcgcgatcttggctcactgcaacctctgcctcccggttgaagtgattctcctgcctcagcctccctagtagctgggactacaggcatgtgacaccatgcccggctaatttttttttttccttgtggcaacggggtttcaccgtgtttggtcttgatctcttgaccttgtgatccgcccaccttggcctctcaaactgctgggattacaggcatgagccaccgtgcctggccccagataaccctttttatgtgagagtgtagagaatgttgctgcagctggtgtgggatgggggatggctgggttgagactgtgttgtcacctgcagtgtacacctgaggtgacatggttctgaacatcactttccccattgaaggcccgagtgacctatcacttgcttctcaaaattcaggaactaggtgactctaggagagtgcacaggaagctttctgcatattctttcaagagatttcgaggtcactgactcttttttcaagacttaaacacaaaatccacatccatcattcttgcgtaaagagaccattcttttttttttgagatggagtctcgctctgttgcccaagctggagtgcagtggcatgatctcggctcactgcaagctctgtcttctgggttcatgcccttctcctgcctcagcctcccaagtagctgggactacaggcacccgccgccatgcccggctaattttttgtattttttagtggagatggggtttcaacatgttggccagaatggtcttgatctcttgacctcgtgatccacccgccttggcctcccaaagtgctgggattacaggtgtgagccactgcacccggcccaagatggggtttcatcatgttgacctggctggtctcaaactcccaacctcaagtgatccactcacttcagcctcccaaagtgctgggatgacaggcgtgagccacagtgcccggcctagtacattgtttaaatggtgcatgtaaaacctcatggtactacaactgcctggtgacagactcaccagagtaaataactatcctgctgttctccaaccacatgggattccccaaacaaagatttgttgagtccaagatgcatcatgccagaactcttgcagtcatacacataatttgtttcattttaataaatacggttatcttttttcttcaa

SEQ ID NO: 49444 - DNA, 600 bp, Homo sapiens
agcaggagtctcgctctgtcgcccaggatgcagtgcagtggcgcgatcttggctcactgcaacctctgcctcccggttgaagtgattctcctgcctcagcctccctagtagctgggactacaggcatgtgacaccatgcccggctaatttttttttttccttgtggcaacggggtttcaccgtgtttggtcttgatctcttgaccttgtgatccgcccaccttggcctctcaaactgctgggattacaggcatgagccaccgtgcctggccccagataaccctttttatgtgagagtgtagagaatgttgctgcagctggtgtgggatgggggatggctgggttgagactcgtccagactcaactcaacctactatcccaaccacatctcccactacacatcacacaccctacatgtaccacaccattcaccacatatcataccactcccccgcaagaaataactcccactacacctctcacttatataatcacctcataacccaacactacgaaaccgcactaaacacacctcacctcacccacccgccagatactaaaccaacaatgtacacgcccaccacagtccctacaatctccc

SEQ ID NO: 49445 - DNA, 235 bp, Homo sapiens
aatttcagatacctctccatgcaaatgtccacacagaacaaatagaagatgaatatgaatgctgtcagaaatactttgcatgttcaaaaggaatctctgagtagtattttagacctgaagggacacctaaggctctttggcttttgcataaggcagggctagactgtaaactcctggagggaaggaccacgccttagttttgtttatacattcccccaccccctatcttagtgcc

SEQ ID NO: 49446 - DNA, 2922 bp, Homo sapiens
tgcagcctgggctctgtgagactgaggtggcggtcagccggagtgagtgttggggtcctggggcacctgccttacatggcttgtttatgaacattaaagggaagaagttgaagcttgaggagcgaggatggcagtcaacaaaggcctcaccttgctggatggagacctccctgagcaggagaatgtgctgcagcgggtcctgcagctgccggtggtgagtggcacctgcgaatgcttccagaagacctacaccagcactaaggaagcccaccccctggtggcctctgtgtgcaatgcctatgagaagggcgtgcagagcgccagtagcttggctgcctggagcatggagccggtggtccgcaggctgtccacccagttcacagctgccaatgagctggcctgccgaggcttggaccacctggaggaaaagatccccgccctccagtacccccctgaaaagattgcttctgagctgaaggacaccatctccacccgcctccgcagtgccagaaacagcatcagcgttcccatcgcgagcacttcagacaaggtcctgggggccgctttggccgggtgcgagcttgcctggggggtggccagagacactgcggaatttgctgccaacactcgagctggccgactggcttctggaggggccgacttggccttgggcagcattgagaaggtggtggagtacctcctccctgcagacaaggaagagtcagcccctgctcctggacaccagcaagcccagaagtctcccaaggccaagccaagcctcttgagcagggttggggctctgaccaacaccctctctcgatacaccgtgcagaccatggcccgggccctggagcagggccacaccgtggccatgtggatcccaggcgtggtgcccctgagcagcctggcccagtggggtgcctcagtggccatgcaggcggtgtcccggcggaggagcgaagtgcgggtaccctggctgcacagcctcgcagccgcccaggaggaggatcatgaggaccagacagacacggagggagaggacacggaggaggaggaagaattggagactgaggagaacaagttcagtgaggtagcagccctgccaggccctcgaggcctcctgggtggtgtggcacataccctgcagaagaccctccagaccaccatctcggctgtgacatgggcacctgcagctgtgctgggcatggcagggagggtgctgcacctcacaccagcccccgctgtctcctcaaccaaggggagggccatgtccctatcagatgccctgaagggcgttactgacaacgtggtggacacagtggtgcattacgtgccgctccccaggctgtcgctgatggagcccgagagcgaattccgggacatcgacaacccaccagccgaggtcgagcgccgggaggcggagcgcagagcgtctggggcgccgtccgccggcccggagcccgccccgcgtctcgcacagccccgccgcagcctgcgcagcgcgcagagccccggcgcgccccccggcccgggcctggaggacgaagtcgccacgcccgcagcgccgcgcccgggcttcccggccgtgccccgcgagaagccaaagcgcagggtcagcgacagcttcttccggcccagcgtcatggagcccatcgtgggccgcacgcattacagccagctgcgcaagaagagctgagtcgccgcaccagccgccgcgccccgggccggcgggtttctctaacaaataaacagaacccgcactgcccaggcgagcgttgccactttcaaagtggtcccctggggagctcagcctcatcctgatgatgctgccaaggcgcactttttatttttattttatttttattttttttttagcatccttttggggcttcactctcagagccagtttttaagggacaccagagccgcagcctgctctgattctatggcttggttgttactataagagtaattgcctaacttgatttttcatctctttaaccaaacttgtggccaaaagatatttgaccgtttccaaaattcagattctgcctctgcggataaatatttgccacgaatgagtaactcctgtcaccactctgaaggtccagacagaaggttttgacacattcttagcactgaactcctctgtgatctaggatgatctgttccccctctgatgaacatcctctgatgatctaggctcccagcaggctactttgaagggaacaatcagatgcaaaagctcttgggtgtttatttaaaatactagtgtcactttctgagtacccgccgcttcacaggctgagtccaggcctgtgtgctttgtagagccagctgcttgctcacagccacatttccatttgcatcattactgccttcacctgcatagtcactcttttgatgctggggaaccaaaatggtgatgatatatagactttatgtatagccacagttcatccccaaccctagtcttcgaaatgttaatatttgataaatctagaaaatgcattcatacaattacagaattcaaatattgcaaaaggatgtgtgtctttctccccgagctcccctgttccccttcattgaaaaccaccacggtgccatctcttgtgtatgcagggctatgcacctgcaggcacgtgtgtatgcactccccgcttgtgtttacacaagctgtggggtgttacgcatgcctgcttttttcacttaataatacagcttggagagatttttgtatcacattataaatcccactcgctctttttgatggccacataataactactgcataatatggatacgccttatttgatttaactagttccctaatgatggacttttaagttgtttcctttttttttcttttttgctactgcaaacgatgctataataaatgtccttatcaaaaaaaagtctagt

SEQ ID NO: 49447 - DNA, 143 bp, Homo sapiens
tttccatggaaagctggaacaacgcccgctgacggcaactttctaacagtaacttccccgacccagacaccacaaagctagcacaacggagctcagatgcaggctaggactcggtccatgcctcaggaaccagagaaagccat

SEQ ID NO: 49448 - DNA, 245 bp, Homo sapiens
ggaactctcccatcctggaagggctggtggttcacttttcacaagaatagtctcatattccagatacgaggcttgtcttttcctactcacaagtgtcagccagaaaggcttaaggagtgtttgtttcactgacataagcacacaacatttcaaacgagattcactttatagccaaggaagtgtagtgtccatgggccctcctgcctggcagagcgctgagacagcatgctaaaggcacagcctcc

SEQ ID NO: 49449 - DNA, 428 bp, Homo sapiens
tcccctacccatctgccaccaccacctgtgttcacagtctaattttatgcattgcctttaattgtcacatttccataatctttaatcttgaggattctacaccctttgtctttctatgcttgatatttttgaagagtataggcaagttattttggagaaaggcattcatttggagttgtgtctgatgtaattcatgtgcgggttcacattatgcattgttggtagggataccacagaagtggtgaattgcgggttcagattatgcattgttggtagggataccacagaagtgctgaaatgtccttttcattgcaacataacagggtccaagtgatgtcagtttgtctcttcattggtgatctcaaccttgtccacttggccgagacgctgtctttcagatttctccactataaagttacttaaaaaaa

SEQ ID NO: 49450 - DNA, 239 bp, Homo sapiens
  misc_feature (176)..(176): n is a, c, g, or t
ggggtttcaccgttttggccgggatggtctcgatctcctgacctcgtgatctgcccgcctcggcctcccaaagtgctgggattacaggcgtgagccaccgcgcccggccgggctgtattcttacactgactgtatagaaagaggagatagagtaaacctaccccgtatacttcagnccacgccctgtgcctgttctgtattatgaagcggggttgggggcggtgcagacatagaaaaag

SEQ ID NO: 49451 - DNA, 527 bp, Homo sapiens
aatagaatcgagctcggtccggagaacttacgtggatagagtcttttcatgcaagatgaacattggtggcaggagctagaggctcacgtgcccagagaggctcagcaggtaacatacatgagcaaagtggaaaggctgaaaatgaggtgaacaggagagctcctgttgccatcgaaaggaagcagtcaccactcagcctaagttgattgttgctaaaatttgctgattctttgaattttttttcaaaagatgctgaaaatctgaattattatacaaacttccctgttattaaattaatggaacaaatgcaagatattttaaagatacaatgtaggccagacaacagagcttcaggcaaggtctggacacagcttccagttttcaacttaaaacccagccttttatttggaatagtttcaaacttataagatgtccccaaaatagagaaatcaaggaatacctatatactccatatccagattcacttgttattaactttatactctgctttatcatttgaactcctt

SEQ ID NO: 49452 - DNA, 893 bp, Homo sapiens
taaacatgtagctactgatatttttttttgaaggtgaaagctttatttaaaggaaggtctcatagagagttttaaaattttagaatgaaaaaaggtcttaaatttattaaccaaatagtaaactaattcattcaaccaaaagacttactgaacactccctgagtgaaggtgtgtgtgttaggaaatgtgcttactgggtgaacacaacagaggtgttccccacctcatgatacccacagtctagggagtgacaggcaataattaagtaatttttaaaaatttatagctgtaaagtaaagcaaactatggcacgtccatgaaagagaggttagagcctatgagcggggaggcggggaccagatggagcctgggctcaggggctgccagacacacacagctgcctacgggcaggaaggggccccattggaagcgttaaacaagtgtctgtatagaaggaaggcatgtgaataaagaaaaaaagattgacctttgtgagttgtgacatccaaggtgtccaggaactagtttctccactttctttttctcctttttgtcatggccggcagttgggcccttgtactgttcatcagcttcaccatcaaaatcaaatgaaaagaaagagaagggaatggaatgctcactttctagaccttactttaaattctgttgaagatttattaatatttgggagagagtttgaaatgataatccaaaagatgtctccctttgaacatatgtagaagttaatcatttagattaacttgcatttaaacacataattgtatgtgatcgtatacattttttggctcactgttttgtgttcaaaggcagatttcctagggtagtgctgatttattctacttcttttaggctgtgtaattcaccttttttct

SEQ ID NO: 49453 - DNA, 377 bp, Homo sapiens
caccaaatggcctgttttggtagataggtgtcaatatcatcattattaaactttttctcttcgatatctgctagtcacctcacactttaatatgtcacaaatcaaattcccccaaggagagaaggatctttctctcctagtctttcccagtctcaatatacagcatctctgtccctatgctctagccaaaccctggatttgaccttgacttctctttttcttataccctacatccactccatcaacagttcctgtctgcttcagccttcaagaacctaatcaattctcactatctccaccactcctaccctggtccaagccagcatctcctcttatctgaaccattgcagtagcatcctactagcatcctactaccc

SEQ ID NO: 49454 - DNA, 489 bp, Homo sapiens
gccactgcatgggctgccattccaccaccagtgcctccctcagtgtcactttcctcggtggggaaggatgggtttatggttcttgtttcctggatgttgctgggcttgctgtccttaaataaaagcaaaggatttctccaggattttaaaaccatttagactcacctgtgattacggtgggagtttcatttcagaatgtcttgaacggtcccttctagttggccatagttctgcgtgtttgattgtatcatgaatggggcactcaattaggagttttacttataaaagggaagtattggggattgagggaatgtcttttttgtgtattgttttggttgccactgaattggtttatagtttctgtactttaattccttcttgccagtgatgaccataccctcctgcacacggaagttcttcttcataccggattttaggatatttacaaaatagtgaatggccagaatattgctatagttcattcaggga

SEQ ID NO: 49455 - DNA, 537 bp, Homo sapiens
ttttatatcacaaggtagtgtctctgaaaaatggtagatgatttcaatgtccacaaatatgcaggtgtagacattcaattgaggtactgtacccaaggcagccagcaaaatgctgaacatagaaaataactttgtaaacaaaatgcaatatttctagacagtgagttatcaccagtgtgctgcctatgaccctggccttaaggaaaaagtagcagagctgaagaagttctaaggatggaaattaaaaattattaaggagataatagacttcgtgttataggaaataaaaatagcaagggtcttcaatggtgagtgattttgagattaattacataactatgaattctgtaatattagaactaagctttacaaagcattccttaaaaaaagataattttacaacaaaggtaacattagacagaaaaaaatgtacaaaactaaaattaagtgattaatgcttgggaatgtttcctccaatgttcatctagtcatggttttcacgaatcactcttgccaataaaaccgaaaatcaaagta

SEQ ID NO: 49456 - DNA, 632 bp, Homo sapiens
ttttatatcacaaggtagtgtctctgaaaaatggtagatgatttcaatgtccacaaatatgcaggtgtagacattcaattgaggtactgtacccaaggcagccagcaaaatgctgaacatagaaaataactttgtaaacaaaatgcaatatttctagacagtgagttatcaccagtgtgctgcctatgaccctggccttaaggaaaaagtagcagagctgaagaagttctaaggatggaaattaaaaattattaaggagataatagacttcgtgttataggaaataaaaatagcaagggtcttcaatggtgagtgattttgagattaattacataactatgaattctgtaatattagaactaagctttacaaagcattccttaaaaaaagataattttacaacaaaggtaacattagacagaaaaaaatgtacaaaactaaaattaagtgattaatgcttgggaatgtttcctccaatgttcatctagtcatggttttcacgaatcactcttgccaataaaaccgaaaatcaaagtaatctagtgagtgtaagaaaagttactgtaaatatgtttgcattcgtcagactctatggagtctttttgaagttaaacattaaatctccactgtaa

SEQ ID NO: 49457 - DNA, 820 bp, Homo sapiens
cttccacttgtatcctatctctgttcaacaccagtgcaagtctttacaattgcataactgccttgggccaggcactatctatgttctgcctaccaggaataacagtgtccttgccactgtgacaacatgtagtctgactccaaaatcctatcttagctagcatctgctttcatgcaccacttctggtatcaactcttccagtttaggctcctcaggaagccgatatctaggtgggaattagcatgcaggaggtttattagggagcattgttggggtgggtaggaaagaaatcaaaattgagcagagggggaagttgggctgtgatatgtctaacaaaggccttaggaaaccaaccaggagatctaaacttggaatgaaccttctgacttgcccaagttggggtgaagaactgggcctttatagcccctacatcaaccagtcattgaatgtggacttttccccaggaaaggaaaggccatgaccttggctgaacaatctcttcgctgagacagctcatgaagaaggtgggcagcagagggctgtctgtcaacagagcccccagcagctagaggaattaatccttcagttttgaagagggacctgagaagtgcatcatgtcatccacgatggcctaaggtgccctttcctggtttatctaacaaacatctactcacatttcaagattcagctcagggccgggcgcggtggctcaagcctgtaattccagcctttgggaggctgaggggggtggaacatgaggtcaagagatcgagaccatcctggctaacacggtgaaaccccgtctctattaaaaatacaa

SEQ ID NO: 49458 - DNA, 460 bp, Homo sapiens
gagaaatatgaggaccagatatttataccagtttagttgcaaagagaccctgccttattcaccttgcattcccatttccatttgtcttaagatattttttaatttccttttgatttcttctctgacccattggttgttcgggaacatgttgttaaatgtctgcatatttgtagatttcctgaaattactcttgtgattaatttctagtttcataccctcatggtggggatcttctctttgcctcgtttgtggagtcttcagaccatttgctcacttgtaatagttcagctggctttaccacaaagtaaaactaccttttctatcttcccttgctacctcttgtgctaagctgctgccatactgttgtcctaatgaccacaccctccaggatgcagaggtggttttatcttttaggagccatcagggccgtggatgtggcatgccatccacctctgtgagt

SEQ ID NO: 49459 - DNA, 288 bp, Homo sapiens
acactttggtagactgatgtgagtggatcacctaaggtcagaagttcaagagcaccctggctaacatggtgaaaccccatctctactaaaaatacaaaagttagccggggggtggtggtgtgcacctttagttccagctacttgagaggctgaggcacaagagtcgcttaaacctgggaggtagaggttgccgtgaggcaaaatcgtgccactgccctcagcctgggcagtagagtcagtctccatctcaaagaaaccagcaaacaaaaaatattaaaaaaaaacatt

SEQ ID NO: 49460 - DNA, 275 bp, Homo sapiens
cactaatgaacttatgtaaccaaatacctcctgtaccccaataacttatggaaaaataaaataaaataataattttttaaaaagtattgcagagcagggtgctggaagcaggggcaaaaggcaggcagggccagatcagtcaggctttcaactgtggaaagcacattggattccttctaatgaaacgggaaaccactggagggattggagcaggggagtgacaggatctgatgtacaattgtgaaagacactctggagaatggattagcgggaga

SEQ ID NO: 49461 - DNA, 432 bp, Homo sapiens
ttccctacttttcatacattgagatctgtttaaatttctcacactcatgcagatcagaatatccaacattgtgttttttgtttgaaaagcacaagtcttcgttactttaattagctgcaggtatgatttgcattctgctgttctctgcaaaacttgtttcttctatggaaagagttaagactactatttgccagaggaagtccaaattccttaagttaacatttaagaccccttcagataattcctattctgctctttcaatcttaattgctttttcccacatgtattttatgttcttagaatctccattcctggctgggcacagtggctcatgcctgtaatcccagcactttgggaggccaaggcaggcgggtcgtttgagcccaggagttgcagaccagcctgggtaatgtgacaaaatcctgtctctac

SEQ ID NO: 49462 - DNA, 456 bp, Homo sapiens
aaggacctttggatagtctggctttcttgggtcactgtctgcagtaggtcttattctgggaaagaagcaattttggcctcttctcctaagaccaatgtttctcaaattgtagaattcacaccacctccatttgaatcatctggagagccttgttgaaaatgcagattactagatcctcctcaagacccactgaatcagcacctctgggagtgaagctacagactctgcattattttcaacaagctccccagataattctgatgcactgttatgagggagagcccagccttatagaatgttgtcactactaaactaaggctggtacgtttgatgctgggtctgatacaatttcagatggaagctgctcgagtggaaaactaaggtcattgcctctcatggataaaatgttatttcactggtaaagaaaaataaaataaaatctaccatgttgggctg

SEQ ID NO: 49463 - DNA, 336 bp, Homo sapiens
gctcaagacccactgaatcagcacctctgggagtgaaaatgcagattactagatcctcctcaagacccactgaatcagcacctctgggagtgaagctacagactctgcattattttcaacaagctccccagataattctgatgcactgttatgagggagagcccagccttatagaatgttgtcactactaaactaaggctggtacgtttgatgctgggtctgatacaatttcagatggaagctgctcgagtggaaaactaaggtcattgcctctcatggataaaatgttatttcactggtaaagaaaaataaaataaaatctaccatgttgggctg

SEQ ID NO: 49464 - DNA, 1114 bp, Homo sapiens
agatttcaccttgcaccctaggccacttgcccatgtccttgccatcttttaactcctgtctcaggagggggcagcagaaagtagtcttgagagttaatgggattgctactagtttgagtacctgcgggaggatttggtctccatcgagaaacaggggaagatgtcatctgcttaagaaggtatttatgtttgtttttctgcccggtgatatacatgaacccggtagtgtgtgaaataaagcatcttagtcctcatttcagtgaatcagaagaaactaaaaggcatggttatttctccctcggtatgatgaagtctatataatatttgcaaaatctcctttggtgaatttgtataaacaatctatcacaaagaaagtattgttttctatatgggcttaaaggatttttggaaaatgggcagaggattttcccatgtattccctgagcctggggaatggaaatcatctcatggagacagatgaccacaggctttccacccagtccccgtggcccactagaattgtccagcatgtttcagtggttatttgattgggctcaagaccaaagttggaactgaatcaaatgatggtttggttcagaatatttttccgttttggtacgttttgaaaacctaggtttgatgctggttgcagttgttcaacagattttttaaaaaaaactttgagtacaacacacactgaggccttttgcgggtggaggtagggaaagcatcaggataaatagctaatgcatgtgggacttaatacctaggtgatgggttataggtgcagcaaaccaccatggcacttgtttacctatgtaacaaaactgcacatcctgcatatttatcctagaacttcaaataaaataaaaacattttaaaaagaaaataaaaagagaagatttttagaaaaaaataaagaaaaagattttagagccacagaatctctttttagagtatgggaagaacagaaattctctgggtagagcaatttttgacagaagatgatttgggtttatatgagatatacaaaactattcttacgcatttttactgcatgccacaacttgggatttcttagtattttccacatcaaccacactactttaagtcg

SEQ ID NO: 49465 - DNA, 458 bp, Homo sapiens
atgacatttgaagaaaacggaagtgacccggctgctcaggagcaatattcatgatactgaaatcagagggaatttttttttaaagtttctggtttaagttggtgcccaggaggtgtggtcttttaactggtgtggtcggtgctctgtttgttactggtctgtgacaaggtaagtacagaaaatgagagtaaatttagaagcttttatagcaagttcctgagacatttacatctaatcatttttttttagtaactcaccttcagttgtattttacaaaagaaccagttcatgatggattagaaatttaaaatgaggatgctgacaataactagttctttactgcagacagtttgagaagcactggtttagaggatcctgtgtaaagtgattacgaatatcgtccatatagtaagttctatgttgtcttctcacttaacaggatgcactgttggctgatg

SEQ ID NO: 49466 - DNA, 146 bp, Homo sapiens
gtgacagagtgagatcctctttctcttaaaaaaaaaggggggatgaaatgagtgttaacaaatgcatagcacttggtacagtgccggcacataagaagtacactatacatgggcaacaatcttcctctttcaaaaagaatgtgttg

SEQ ID NO: 49467 - DNA, 2281 bp, Homo sapiens
  misc_feature (625)..(625): n is a, c, g, or t
ctgagaggtccactgtaagcctgatgggatttcctttgcaggtaacctgcgttttctttctggctgcctttaacattctttctttcatttttaccttggaaaatctgacaattatgtgtcttggggatgatcttcctgtgtagaatcttgcaggagttgtctgtatttcctgtatttgactgttgtcctctctagcaaggttgtggaagttttcatggacaatatattgaaatacgttttccaaactgtttgctttctcccccttcctttcagggatgacagtgatttgtagatttggcttctttacataatcccctacttcttggaggttttgttcattcctttttattcttttttctttatttttgtctgactgtcttatttcagaaagccagttttcgagttctgagattctttcctcagcttggtttattctactattaatacttgtgattgcattgtgaaattcttgtactgtgttattcagctatgtcggacccattaggttctttattatactggctattttgtctttcagctcctgtatcactttattgtgatttgtagtttctttggattgggttttgctgtcctcctgaatctcaatgatcttcattcctatacntatcctaaattctatttctgtcatttcagccagctcagcctggataaacactcttgttagagaatttgtatggtcatttggagcacatatgacactctggccgttttaatttttggagttcttgcgttagttctttctcatctccatgtgtgggtgttcctttaactgccatatagattgagtacagtcaatagatttctggctgttttcactaggctgaggccttgtgcagggtctttttttgaagctgacttcttgtctctagtttcagaggtgagtatgttagtgaggtattcttggtgttgaagctttggggtgtgatccagtaggtggcacttaggcttattggtcaactggtagactcttgctcagttgtgtggctcctctgtgttttctcatagttacagctgtgttcactctcaatgctctgaaagtgtgggttcctctcccccttcagtgccagctgtatggctatagattgtggtttgacactcctggctgcccactgcagctctggggcaatgtcagtgtttacgttccttcctcaacttggcggcaacagaggaaaggaccttagtagtggttgtggtcaagggtcttttgcttgtatcctgggagctccacaccagagagatgtaggtcagcaattcctcagtgcaatcaccccaggatgaagggtctgtgctgtgggctcaagccaggggttctctctggtgatgagtgggggttgggggtgtgggaaccatgggagacagactggcctcctcttcttgggttgattgcagcttgttggaggtataaataaggtacttagggtcttttcttcttcattagtctgagggtagcaagggcagttctactgcagagacagtggcagagaggctttcaggaacagtatttattaaccaattgtttcaacaaatatttattgacaattcaacatgtaccagacactgtgttaggcaaggggtcttcaatgggccacaaatagatgtggtccttgaccatgtcattggagcttaatgggagagactgatagtaagcaagtaaacaacaacaaaaaaataaggtaattcaggttgtgacaacctctctgaaggaaatatataggatgctataaaagtgactagagcaaggaacggcctaattgagctaagataatcaggtagggtctctgtaaggagttgacattaagctaacaactaaagaataagaagccagccatgtaaatagcttggataagagctttccaggctgaagggaatggaaatacacaggcctagaggtaagaaggagatgggtgtcttccggaaactgataaaaagtcagagtggctcagatatgctgatatgtcccctggtattttttaaaatttttggccgggtacagtggctcatgcctgtaatcccagcactttgggaggccgaggtgggcggatcacgaggtcaggagtcaagaccagcctgactaacataatgaaaccccatctctactaaaaatacaaaaattagctgggtgtggtggcacgtgcctgtaatctcagctactcagaaggctgaggcaggagaatctcttgaacttgggaggcggaggttacagtgagttgcgatcgcgccactgcactccagcctgggtgacagagcaagactccatctc

SEQ ID NO: 49468 - DNA, 515 bp, Homo sapiens
gcatttcattcctctgctactttatgcattttgttcaattctttgttcaaaacgccaaagacctggacaactcgtagtcaatctgctgtgctaagtgctctgctagtctgtgtcatttactgtgcacacccatctcttgggtggatattaggaatgagcccatttctccaatgagccaagctaggccatggaggggttgagccatggtgcagtttctgcagtgaagaagcaacagggccagaataggcccacatggtcagactctcagacttacaaccttactcaagtacaatgagtgttccaatgatctgagcagaagaagttgtctttgtaagcagaaaatggctgaagaaagcaaaaagagaaaacagagcagattagtcattgatgtggtttggctgttttgtccctctaaatctcatgttgaaatgtgaccttcagcgttggaggtgggtttagtgggaggtgtttgggtcatagaggtggatctctcataaatggtttggtgctgtcaa

SEQ ID NO: 49469 - DNA, 1114 bp, Homo sapiens
  misc_feature (1112)..(1112): n is a, c, g, or t
cgaaagcactccgtgctggaagtaggaggagagtcaggactcccaggacagagagtgcacaaactacccagcacagccccctccgccccctctggaggctgaagagggattccagcccctgccacccacagacacgggctgactggggtgtctgccccccttgggggggggcagcacagggcctcaggcctgggtgccacctggcacctagaagatgcctgtgccctggttcttgctgtccttggcactgggccgaagcccagtggtcctttctctggagaggcttgtggggcctcaggacgctacccactgctctccgcctctcctgccgcctctgggacagtgacatactctgcctgcctggggacatcgtgcctgctccgggccccgtgctggcgcctacgcacctgcagacagagctggtgctgaggtgccagaaggagaccgactgtgacctctgtctgcgtgtggctgtccacttggccgtgcatgggcactgggaagagcctgaagatgaggaaaagtttggaggagcagctgactcaggggtggaggagcctaggaatgcctctctccaggcccaagtcgtgctctccttccaggcctaccctactgcccgctgcgtcctgctggaggtgcaagtgcctgctgcccttgtgcagtttggtcagtctgtgggctctgtggtatatgactgcttcgaggctgccctagggagtgaggtacgaatctggtcctatactcagcccaggtacgagaaggaactcaaccacacacagcagctgcctgccctgccctggctcaacgtgtcagcagatggtgacaacgtgcatctggttctgaatgtctctgaggagcagcacttcggcctctccctgtactggaatcaggtccagggccccccaaaaccccggtggcacaaaaacctgagaacctgatggacggaatattacttgaccaacagactggttctggccggatcagtgggtctggacgatccgtagagttgcttcgggagcgcggcccttgaacgcgagacgacctgacgtgtggcagctgccaagaggggcgggcccagccctggagtcttacctgctgtgtggggctcatcntt

SEQ ID NO: 49470 - DNA, 2462 bp, Homo sapiens
cgaaagcactccgtgctggaagtaggaggagagtcaggactcccaggacagagagtgcacaaactacccagcacagccccctccgccccctctggaggctgaagagggattccagcccctgccacccacagacacgggctgactggggtgtctgccccccttgggggggggcagcacagggcctcaggcctgggtgccacctggcacctagaagatgcctgtgccctggttcttgctgtccttggcactgggccgaagcccagtggtcctttctctggagaggcttgtggggcctcaggacgctacccactgctctccgggcctctcctgccgcctctgggacagtgacatactctgcctgcctggggacatcgtgcctgctccgggccccgtgctggcgcctacgcacctgcagacagagctggtgctgaggtgccagaaggagaccgactgtgacctctgtctgcgtgtggctgtccacttggccgtgcatgggcactgggaagagcctgaagatgaggaaaagtttggaggagcagctgactcaggggtggaggagcctaggaatgcctctctccaggcccaagtcgtgctctccttccaggcctaccctactgcccgctgcgtcctgctggaggtgcaagtgcctgctgcccttgtgcagtttggtcagtctgtgggctctgtggtatatgactgcttcgaggctgccctagggagtgaggtacgaatctggtcctatactcagcccaggtacgagaaggaactcaaccacacacagcagctgcctgccctgccctggctcaacgtgtcagcagatggtgacaacgtgcatctggttctgaatgtctctgaggagcagcacttcggcctctccctgtactggaatcaggtccagggccccccaaaaccccggtggcacaaaaacctgactggaccgcagatcattaccttgaaccacacagacctggttccctgcctctgtattcaggtgtggcctctggaacctgactccgttaggacgaacatctgccccttcagggaggacccccgcgcacaccagaacctctggcaagccgcccgactgcgactgctgaccctgcagagctggctgctggacgcaccgtgctcgctgcccgcagaagcggcactgtgctggcgggctccgggtggggacccctgccagccactggtcccaccgctttcctgggagaacgtcactgtggacaaggttctcgagttcccattgctgaaaggccaccctaacctctgtgttcaggtgaacagctcggagaagctgcagctgcaggagtgcttgtgggctgactccctggggcctctcaaagacgatgtgctactgttggagacacgaggcccccaggacaacagatccctctgtgccttggaacccagtggctgtacttcactacccagcaaagcctccacgagggcagctcgccttggagagtacttactacaagacctgcagtcaggccagtgtctgcagctatgggacgatgacttgggagcgctatgggcctgccccatggacaaatacatccacaagcgctgggccctcgtgtggctggcctgcctactctttgccgctgcgctttccctcatcctccttctcaaaaaggatcacgcgaaagggtggctgaggctcttgaaacaggacgtccgctcggggggtgagtgggagcaagcgctgggcggagggccgcccccggggagccaggcctgtgccagctcacctcttccctccccatctgttttctccggcagcggccgccaggggccgcgcggctctgctcctctactcagccgatgactcgggtttcgagcgcctggtgggcgccctggcgtcggccctgtgccagctgccgctgcgcgtggccgtagacctgtggagccgtcgtgaactgagcgcgcaggggcccgtggcttggtttcacgcgcagcggcgccagaccctgcaggagggcggcgtggtggtcttgctcttctctcccggtgcggtggcgctgtgcagcgagtggctacaggatggggtgtccgggcccggggcgcacggcccgcacgacgccttccgcgcctcgctcagctgcgtgctgcccgacttcttgcagggccgggcgcccggcagctacgtgggggcctgcttcgacaggctgctccacccggacgccgtacccgcccttttccgcaccgtgcccgtcttcacactgccctcccaactgccagacttcctgggggccctgcagcagcctcgcgccccgcgttccgggcggctccaagagagagcggagcaagtgtcccgggcccttcagccagccctggatagctacttccatcccccggggactcccgcgccgggacgcggggtgggaccaggggcgggacctggggcgggggacgggacttaaataaaggcagacgctgtttttctacccaaaaaacca

SEQ ID NO: 49471 - DNA, 2317 bp, Homo sapiens
cgaaagcactccgtgctggaagtaggaggagagtcaggactcccaggacagagagtgcacaaactacccagcacagccccctccgccccctctggaggctgaagagggattccagcccctgccacccacagacacgggctgactggggtgtctgccccccttgggggggggcagcacagggcctcaggcctgggtgccacctggcacctagaagatgcctgtgccctggttcttgctgtccttggcactgggccgaagcccagtggtcctttctctggagaggcttgtggggcctcaggacgctacccactgctctccgggcctctcctgccgcctctgggacagtgacatactctgcctgcctggggacatcgtgcctgctccgggccccgtgctggcgcctacgcacctgcagacagagctggtgctgaggtgccagaaggagaccgactgtgacctctgtctgcgtgtggctgtccacttggccgtgcatgggcactgggaagagcctgaagatgaggaaaagtttggaggagcagctgactcaggggtggaggagcctaggaatgcctctctccaggcccaagtcgtgctctccttccaggcctaccctactgcccgctgcgtcctgctggaggtgcaagtgcctgctgcccttgtgcagtttggtcagtctgtgggctctgtggtatatgactgcttcgaggctgccctagggagtgaggtacgaatctggtcctatactcagcccaggtacgagaaggaactcaaccacacacagcagctgcctgccctgccctggctcaacgtgtcagcagatggtgacaacgtgcatctggttctgaatgtctctgaggagcagcacttcggcctctccctgtactggaatcaggtccagggccccccaaaaccccggtggcacaaaaacctgactggaccgcagatcattaccttgaaccacacagacctggttccctgcctctgtattcaggtgtggcctctggaacctgactccgttaggacgaacatctgccccttcagggaggacccccgcgcacaccagaacctctggcaagccgcccgactgcgactgctgaccctgcagagctggctgctggacgcaccgtgctcgctgcccgcagaagcggcactgtgctggcgggctccgggtggggacccctgccagccactggtcccaccgctttcctgggagaacgtcactgtggacgtgaacagctcggagaagctgcagctgcaggagtgcttgtgggctgactccctggggcctctcaaagacgatgtgctactgttggagacacgaggcccccaggacaacagatccctctgtgccttggaacccagtggctgtacttcactacccagcaaagcctccacgagggcagctcgccttggagagtacttactacaagacctgcagtcaggccagtgtctgcagctatgggacgatgacttgggagcgctatgggcctgccccatggacaaatacatccacaagcgctgggccctcgtgtggctggcctgcctactctttgccgctgcgctttccctcatcctccttctcaaaaaggatcacgcgaaagggtggctgaggctcttgaaacaggacgtccgctcgggggcggccgccaggggccgcgcggctctgctcctctactcagccgatgactcgggtttcgagcgcctggtgggcgccctggcgtcggccctgtgccagctgccgctgcgcgtggccgtagacctgtggagccgtcgtgaactgagcgcgcaggggcccgtggcttggtttcacgcgcagcggcgccagaccctgcaggagggcggcgtggtggtcttgctcttctctcccggtgcggtggcgctgtgcagcgagtggctacaggatggggtgtccgggcccggggcgcacggcccgcacgacgccttccgcgcctcgctcagctgcgtgctgcccgacttcttgcagggccgggcgcccggcagctacgtgggggcctgcttcgacaggctgctccacccggacgccgtacccgcccttttccgcaccgtgcccgtcttcacactgccctcccaactgccagacttcctgggggccctgcagcagcctcgcgccccgcgttccgggcggctccaagagagagcggagcaagtgtcccgggcccttcagccagccctggatagctacttccatcccccggggactcccgcgccgggacgcggggtgggaccaggggcgggacctggggcgggggacgggacttaaataaaggcagacgctgtttttctacccaaaaaacca

SEQ ID NO: 49472 - DNA, 2258 bp, Homo sapiens
cgaaagcactccgtgctggaagtaggaggagagtcaggactcccaggacagagagtgcacaaactacccagcacagccccctccgccccctctggaggctgaagagggattccagcccctgccacccacagacacgggctgactggggtgtctgccccccttgggggggggcagcacagggcctcaggcctgggtgccacctggcacctagaagatgcctgtgccctggttcttgctgtccttggcactgggccgaagcccagtggtcctttctctggagaggcttgtggggcctcaggacgctacccactgctctccgggcctctcctgccgcctctgggacagtgacatactctgcctgcctggggacatcgtgcctgctccgggccccgtgctggcgcctacgcacctgcagacagagctggtgctgaggtgccagaaggagaccgactgtgacctctgtctgcgtgtggctgtccacttggccgtgcatgggcactgggaagagcctgaagatgaggaaaagtttggaggagcagctgactcaggggtggaggagcctaggaatgcctctctccaggcccaagtcgtgctctccttccaggcctaccctactgcccgctgcgtcctgctggaggtgcaagtgcctgctgcccttgtgcagtttggtcagtctgtgggctctgtggtatatgactgcttcgaggctgccctagggagtgaggtacgaatctggtcctatactcagcccaggtacgagaaggaactcaaccacacacagcagctgcctgccctgccctggctcaacgtgtcagcagatggtgacaacgtgcatctggttctgaatgtctctgaggagcagcacttcggcctctccctgtactggaatcaggtccagggccccccaaaaccccggtggcacaaaaacctgactggaccgcagatcattaccttgaaccacacagacctggttccctgcctctgtattcaggtgtggcctctggaacctgactccgttaggacgaacatctgccccttcagggaggacccccgcgcacaccagaacctctggcaagccgcccgactgcgactgctgaccctgcagagctggctgctggacgcaccgtgctcgctgcccgcagaagcggcactgtgctggcgggctccgggtgaacagctcggagaagctgcagctgcaggagtgcttgtgggctgactccctggggcctctcaaagacgatgtgctactgttggagacacgaggcccccaggacaacagatccctctgtgccttggaacccagtggctgtacttcactacccagcaaagcctccacgagggcagctcgccttggagagtacttactacaagacctgcagtcaggccagtgtctgcagctatgggacgatgacttgggagcgctatgggcctgccccatggacaaatacatccacaagcgctgggccctcgtgtggctggcctgcctactctttgccgctgcgctttccctcatcctccttctcaaaaaggatcacgcgaaagggtggctgaggctcttgaaacaggacgtccgctcgggggcggccgccaggggccgcgcggctctgctcctctactcagccgatgactcgggtttcgagcgcctggtgggcgccctggcgtcggccctgtgccagctgccgctgcgcgtggccgtagacctgtggagccgtcgtgaactgagcgcgcaggggcccgtggcttggtttcacgcgcagcggcgccagaccctgcaggagggcggcgtggtggtcttgctcttctctcccggtgcggtggcgctgtgcagcgagtggctacaggatggggtgtccgggcccggggcgcacggcccgcacgacgccttccgcgcctcgctcagctgcgtgctgcccgacttcttgcagggccgggcgcccggcagctacgtgggggcctgcttcgacaggctgctccacccggacgccgtacccgcccttttccgcaccgtgcccgtcttcacactgccctcccaactgccagacttcctgggggccctgcagcagcctcgcgccccgcgttccgggcggctccaagagagagcggagcaagtgtcccgggcccttcagccagccctggatagctacttccatcccccggggactcccgcgccgggacgcggggtgggaccaggggcgggacctggggcgggggacgggacttaaataaaggcagacgctgtttttctacccaaaaaacca

SEQ ID NO: 49473 - DNA, 2251 bp, Homo sapiens
cgaaagcactccgtgctggaagtaggaggagagtcaggactcccaggacagagagtgcacaaactacccagcacagccccctccgccccctctggaggctgaagagggattccagcccctgccacccacagacacgggctgactggggtgtctgccccccttgggggggggcagcacagggcctcaggcctgggtgccacctggcacctagaagatgcctgtgccctggttcttgctgtccttggcactgggccgaagcccagtggtcctttctctggagaggcttgtggggcctcaggacgctacccactgctctccgggcctctcctgccgcctctgggacagtgacatactctgcctgcctggggacatcgtgcctgctccgggccccgtgctggcgcctacgcacctgcagacagagctggtgctgaggtgccagaaggagaccgactgtgacctctgtctgcgtgtggctgtccacttggccgtgcatgggcactgggaagagcctgaagatgaggaaaagtttggaggagcagctgactcaggggtggaggagcctaggaatgcctctctccaggcccaagtcgtgctctccttccaggcctaccctactgcccgctgcgtcctgctggaggtgcaagtgcctgctgcccttgtgcagtttggtcagtctgtgggctctgtggtatatgactgcttcgaggctgccctagggagtgaggtacgaatctggtcctatactcagcccaggtacgagaaggaactcaaccacacacagcagctgcctgccctgccctggctcaacgtgtcagcagatggtgacaacgtgcatctggttctgaatgtctctgaggagcagcacttcggcctctccctgtactggaatcaggtccagggccccccaaaaccccggtggcacaaaaacctgactggaccgcagatcattaccttgaaccacacagacctggttccctgcctctgtattcaggtgtggcctctggaacctgactccgttaggacgaacatctgccccttcagggaggacccccgcgcacaccagaacctctggcaagccgcccgactgcgactgctgaccctgcagagctggctgctggacgcaccgtgctcgctgcccgcagaagcggcactgtgctggcgggctccgggtggggacccctgccagccactggtcccaccgctttcctgggagaacgtcactgtggacgtgaacagctcggagaagctgcagctgcaggagtgcttgtgggctgctatgggacgatgacttgggagcgctatgggcctgccccatggacaaatacatccacaagcgctgggccctcgtgtggctggcctgcctactctttgccgctgcgctttccctcatcctccttctcaaaaaggatcacgcgaaaggtgagcgcttcccggctccccattcccctgggggaggaccagagtggctgtgggagttctccgagggaaagcggcggccgagctcactggctgcctccgcccctctcccctaacagggtggctgaggctcttgaaacaggacgtccgctcgggggcggccgccaggggccgcgcggctctgctcctctactcagccgatgactcgggtttcgagcgcctggtgggcgccctggcgtcggccctgtgccagctgccgctgcgcgtggccgtagacctgtggagccgtcgtgaactgagcgcgcaggggcccgtggcttggtttcacgcgcagcggcgccagaccctgcaggagggcggcgtggtggtcttgctcttctctcccggtgcggtggcgctgtgcagcgagtggctacaggatggggtgtccgggcccggggcgcacggcccgcacgacgccttccgcgcctcgctcagctgcgtgctgcccgacttcttgcagggccgggcgcccggcagctacgtgggggcctgcttcgacaggctgctccacccggacgccgtacccgcccttttccgcaccgtgcccgtcttcacactgccctcccaactgccagacttcctgggggccctgcagcagcctcgcgccccgcgttccgggcggctccaagagagagcggagcaagtgtcccgggcccttcagccagccctggatagctacttccatcccccggggactcccgcgccgggacgcggggtgggaccaggggcgggacctggggcgggggacgggacttaaataaaggcagacgctgtttttctacccaaaaaacca

SEQ ID NO: 49474 - DNA, 2373 bp, Homo sapiens
cgaaagcactccgtgctggaagtaggaggagagtcaggactcccaggacagagagtgcacaaactacccagcacagccccctccgccccctctggaggctgaagagggattccagcccctgccacccacagacacgggctgactggggtgtctgccccccttgggggggggcagcacagggcctcaggcctgggtgccacctggcacctagaagatgcctgtgccctggttcttgctgtccttggcactgggccgaagcccagtggtcctttctctggagaggcttgtggggcctcaggacgctacccactgctctccgggcctctcctgccgcctctgggacagtgacatactctgcctgcctggggacatcgtgcctgctccgggccccgtgctggcgcctacgcacctgcagacagagctggtgctgaggtgccagaaggagaccgactgtgacctctgtctgcgtgtggctgtccacttggccgtgcatgggcactgggaagagcctgaagatgaggaaaagtttggaggagcagctgactcaggggtggaggagcctaggaatgcctctctccaggcccaagtcgtgctctccttccaggcctaccctactgcccgctgcgtcctgctggaggtgcaagtgcctgctgcccttgtgcagtttggtcagtctgtgggctctgtggtatatgactgcttcgaggctgccctagggagtgaggtacgaatctggtcctatactcagcccaggtacgagaaggaactcaaccacacacagcagctgcctgccctgccctggctcaacgtgtcagcagatggtgacaacgtgcatctggttctgaatgtctctgaggagcagcacttcggcctctccctgtactggaatcaggtccagggccccccaaaaccccggtggcacaaaaacctgactggaccgcagatcattaccttgaaccacacagacctggttccctgcctctgtattcaggtgtggcctctggaacctgactccgttaggacgaacatctgccccttcagggaggacccccgcgcacaccagaacctctggcaagccgcccgactgcgactgctgaccctgcagagctggctgctggacgcaccgtgctcgctgcccgcagaagcggcactgtgctggcgggctccgggtggggacccctgccagccactggtcccaccgctttcctgggagaacgtcactgtggacgtgaacagctcggagaagctgcagctgcaggagtgcttgtgggctgactccctggggcctctcaaagacgatgtgctactgttggagacacgaggcccccaggacaacagatccctctgtgccttggaacccagtggctgtacttcactacccagcaaagcctccacgctatgggacgatgacttgggagcgctatgggcctgccccatggacaaatacatccacaagcgctgggccctcgtgtggctggcctgcctactctttgccgctgcgctttccctcatcctccttctcaaaaaggatcacgcgaaaggtgagcgcttcccggctccccattcccctgggggaggaccagagtggctgtgggagttctccgagggaaagcggcggccgagctcactggctgcctccgcccctctcccctaacagggtggctgaggctcttgaaacaggacgtccgctcgggggcggccgccaggggccgcgcggctctgctcctctactcagccgatgactcgggtttcgagcgcctggtgggcgccctggcgtcggccctgtgccagctgccgctgcgcgtggccgtagacctgtggagccgtcgtgaactgagcgcgcaggggcccgtggcttggtttcacgcgcagcggcgccagaccctgcaggagggcggcgtggtggtcttgctcttctctcccggtgcggtggcgctgtgcagcgagtggctacaggatggggtgtccgggcccggggcgcacggcccgcacgacgccttccgcgcctcgctcagctgcgtgctgcccgacttcttgcagggccgggcgcccggcagctacgtgggggcctgcttcgacaggctgctccacccggacgccgtacccgcccttttccgcaccgtgcccgtcttcacactgccctcccaactgccagacttcctgggggccctgcagcagcctcgcgccccgcgttccgggcggctccaagagagagcggagcaagtgtcccgggcccttcagccagccctggatagctacttccatcccccggggactcccgcgccgggacgcggggtgggaccaggggcgggacctggggcgggggacgggacttaaataaaggcagacgctgtttttctacccaaaaaacca

SEQ ID NO: 49475 - DNA, 1886 bp, Homo sapiens
cgaaagcactccgtgctggaagtaggaggagagtcaggactcccaggacagagagtgcacaaactacccagcacagccccctccgccccctctggaggctgaagagggattccagcccctgccacccacagacacgggctgactggggtgtctgccccccttgggggggggcagcacagggcctcaggcctgggtgccacctggcacctagaagatgcctgtgccctggttcttgctgtccttggcactgggccgaagcccagtggtcctttctctggagaggcttgtggggcctcaggacgctacccactgctctccgggcctctcctgccgcctctgggacagtgacatactctgcctgcctggggacatcgtgcctgctccgggccccgtgctggcgcctacgcacctgcagacagagctggtgctgaggtgccagaaggagaccgactgtgacctctgtctgcgtgtggctgtccacttggccgtgcatgggcactgggaagagcctgaagatgaggaaaagtttggaggagcagctgactcaggggtggaggagcctaggaatgcctctctccaggcccaagtcgtgctctccttccaggcctaccctactgcccgctgcgtcctgctggaggtgcaagtgcctgctgcccttgtgcagtttggtcagtctgtgggctctgtggtatatgactgcttcgaggctgccctagggagtgaggtacgaatctggtcctatactcagcccaggtacgagaaggaactcaaccacacacagcagctgcctgccctgccctggctcaacgtgtcagcagatggtgacaacgtgcatctggttctgaatgtctctgaggagcagcacttcggcctctccctgtactggaatcaggtccagggccccccaaaaccccggtggcacaaaaacctgtggctgtacttcactacccagcaaagcctccacgagggcagctcgccttggagagtacttactacaagacctgcagtcaggccagtgtctgcagctatgggacgatgacttgggagcgctatgggcctgccccatggacaaatacatccacaagcgctgggccctcgtgtggctggcctgcctactctttgccgctgcgctttccctcatcctccttctcaaaaaggatcacgcgaaagggtggctgaggctcttgaaacaggacgtccgctcgggggcggccgccaggggccgcgcggctctgctcctctactcagccgatgactcgggtttcgagcgcctggtgggcgccctggcgtcggccctgtgccagctgccgctgcgcgtggccgtagacctgtggagccgtcgtgaactgagcgcgcaggggcccgtggcttggtttcacgcgcagcggcgccagaccctgcaggagggcggcgtggtggtcttgctcttctctcccggtgcggtggcgctgtgcagcgagtggctacaggatggggtgtccgggcccggggcgcacggcccgcacgacgccttccgcgcctcgctcagctgcgtgctgcccgacttcttgcagggccgggcgcccggcagctacgtgggggcctgcttcgacaggctgctccacccggacgccgtacccgcccttttccgcaccgtgcccgtcttcacactgccctcccaactgccagacttcctgggggccctgcagcagcctcgcgccccgcgttccgggcggctccaagagagagcggagcaagtgtcccgggcccttcagccagccctggatagctacttccatcccccggggactcccgcgccgggacgcggggtgggaccaggggcgggacctggggcgggggacgggacttaaataaaggcagacgctgtttttctacccaaaaaacca

SEQ ID NO: 49476 - DNA, 2413 bp, Homo sapiens
cgaaagcactccgtgctggaagtaggaggagagtcaggactcccaggacagagagtgcacaaactacccagcacagccccctccgccccctctggaggctgaagagggattccagcccctgccacccacagacacgggctgactggggtgtctgccccccttgggggggggcagcacagggcctcaggcctgggtgccacctggcacctagaagatgcctgtgccctggttcttgctgtccttggcactgggccgaagcccagtggtcctttctctggagaggcttgtggggcctcaggacgctacccactgctctccgggcctctcctgccgcctctgggacagtgacatactctgcctgcctggggacatcgtgcctgctccgggccccgtgctggcgcctacgcacctgcagacagagctggtgctgaggtgccagaaggagaccgactgtgacctctgtctgcgtgtggctgtccacttggccgtgcatgggcactgggaagagcctgaagatgaggaaaagtttggaggagcagctgactcaggggtggaggagcctaggaatgcctctctccaggcccaagtcgtgctctccttccaggcctaccctactgcccgctgcgtcctgctggaggtgcaagtgcctgctgcccttgtgcagtttggtcagtctgtgggctctgtggtatatgactgcttcgaggctgccctagggagtgaggtacgaatctggtcctatactcagcccaggtacgagaaggaactcaaccacacacagcagctgcctgactgcagggggctcgaagtctggaacagcatcccgagctgctgggccctgccctggctcaacgtgtcagcagatggtgacaacgtgcatctggttctgaatgtctctgaggagcagcacttcggcctctccctgtactggaatcaggtccagggccccccaaaaccccggtggcacaaaaacctgactggaccgcagatcattaccttgaaccacacagacctggttccctgcctctgtattcaggtgtggcctctggaacctgactccgttaggacgaacatctgccccttcagggaggacccccgcgcacaccagaacctctggcaagccgcccgactgcgactgctgaccctgcagagctggctgctggacgcaccgtgctcgctgcccgcagaagcggcactgtgctggcgggctccgggtggggacccctgccagccactggtcccaccgctttcctgggagaacgtcactgtggacaaggttctcgagttcccattgctgaaaggccaccctaacctctgtgttcaggtgaacagctcggagaagctgcagctgcaggagtgcttgtgggctgactccctggggcctctcaaagacgatgtgctactgttggagacacgaggcccccaggacaacagatccctctgtgccttggaacccagtggctgtacttcactacccagcaaagcctccacgagggcagctcgccttggagagtacttactacaagacctgcagtcaggccagtgtctgcagctatgggacgatgacttgggagcgctatgggcctgccccatggacaaatacatccacaagcgctgggccctcgtgtggctggcctgcctactctttgccgctgcgctttccctcatcctccttctcaaaaaggatcacgcgaaagggtggctgaggctcttgaaacaggacgtccgctcgggggcggccgccaggggccgcgcggctctgctcctctactcagccgatgactcgggtttcgagcgcctggtgggcgccctggcgtcggccctgtgccagctgccgctgcgcgtggccgtagacctgtggagccgtcgtgaactgagcgcgcaggggcccgtggcttggtttcacgcgcagcggcgccagaccctgcaggagggcggcgtggtggtcttgctcttctctcccggtgcggtggcgctgtgcagcgagtggctacaggatggggtgtccgggcccggggcgcacggcccgcacgacgccttccgcgcctcgctcagctgcgtgctgcccgacttcttgcagggccgggcgcccggcagctacgtgggggcctgcttcgacaggctgctccacccggacgccgtacccgcccttttccgcaccgtgcccgtcttcacactgccctcccaactgccagacttcctgggggccctgcagcagcctcgcgccccgcgttccgggcggctccaagagagagcggagcaagtgtcccgggcccttcagccagccctggatagctacttccatcccccggggactcccgcgccgggacgcggggtgggaccaggggcgggacctggggcgggggacgggacttaaataaaggcagacgctgtttttctacccaaaaaacca

SEQ ID NO: 49477 - DNA, 2582 bp, Homo sapiens
cgaaagcactccgtgctggaagtaggaggagagtcaggactcccaggacagagagtgcacaaactacccagcacagccccctccgccccctctggaggctgaagagggattccagcccctgccacccacagacacgggctgactggggtgtctgccccccttgggggggggcagcacagggcctcaggcctgggtgccacctggcacctagaagatgcctgtgccctggttcttgctgtccttggcactgggccgaagcccagtggtcctttctctggagaggcttgtggggcctcaggacgctacccactgctctccgtgagtctggaaccctggggagacgaggaaaggctcagggttcagtttttggctcagcaaagccttagcctggctcctgtcactgctgccactgccagaactgccctgtctggtctgtctggtgctgatggtagaagagaagaacggggaaggggcaagagctgggtctgtctttctctgggagggtctgggaatacggagccccagaaaaaggtagcctctcctgccgcctctgggacagtgacatactctgcctgcctggggacatcgtgcctgctccgggccccgtgctggcgcctacgcacctgcagacagagctggtgctgaggtgccagaaggagaccgactgtgacctctgtctgcgtgtggctgtccacttggccgtgcatgggcactgggaagagcctgaagatgaggaaaagtttggaggagcagctgactcaggggtggaggagcctaggaatgcctctctccaggcccaagtcgtgctctccttccaggcctaccctactgcccgctgcgtcctgctggaggtgcaagtgcctgctgcccttgtgcagtttggtcagtctgtgggctctgtggtatatgactgcttcgaggctgccctagggagtgaggtacgaatctggtcctatactcagcccaggtacgagaaggaactcaaccacacacagcagctgcctgccctgccctggctcaacgtgtcagcagatggtgacaacgtgcatctggttctgaatgtctctgaggagcagcacttcggcctctccctgtactggaatcaggtccagggccccccaaaaccccggtggcacaaaaacctgactggaccgcagatcattaccttgaaccacacagacctggttccctgcctctgtattcaggtgtggcctctggaacctgactccgttaggacgaacatctgccccttcagggaggacccccgcgcacaccagaacctctggcaagccgcccgactgcgactgctgaccctgcagagctggctgctggacgcaccgtgctcgctgcccgcagaagcggcactgtgctggcgggctccgggtggggacccctgccagccactggtcccaccgctttcctgggagaacgtcactgtggacaaggttctcgagttcccattgctgaaaggccaccctaacctctgtgttcaggtgaacagctcggagaagctgcagctgcaggagtgcttgtgggctgactccctggggcctctcaaagacgatgtgctactgttggagacacgaggcccccaggacaacagatccctctgtgccttggaacccagtggctgtacttcactacccagcaaagcctccacgagggcagctcgccttggagagtacttactacaagacctgcagtcaggccagtgtctgcagctatgggacgatgacttgggagcgctatgggcctgccccatggacaaatacatccacaagcgctgggccctcgtgtggctggcctgcctactctttgccgctgcgctttccctcatcctccttctcaaaaaggatcacgcgaaagggtggctgaggctcttgaaacaggacgtccgctcgggggcggccgccaggggccgcgcggctctgctcctctactcagccgatgactcgggtttcgagcgcctggtgggcgccctggcgtcggccctgtgccagctgccgctgcgcgtggccgtagacctgtggagccgtcgtgaactgagcgcgcaggggcccgtggcttggtttcacgcgcagcggcgccagaccctgcaggagggcggcgtggtggtcttgctcttctctcccggtgcggtggcgctgtgcagcgagtggctacaggatggggtgtccgggcccggggcgcacggcccgcacgacgccttccgcgcctcgctcagctgcgtgctgcccgacttcttgcagggccgggcgcccggcagctacgtgggggcctgcttcgacaggctgctccacccggacgccgtacccgcccttttccgcaccgtgcccgtcttcacactgccctcccaactgccagacttcctgggggccctgcagcagcctcgcgccccgcgttccgggcggctccaagagagagcggagcaagtgtcccgggcccttcagccagccctggatagctacttccatcccccggggactcccgcgccgggacgcggggtgggaccaggggcgggacctggggcgggggacgggacttaaataaaggcagacgctgtttttctacccaaaaaacca

SEQ ID NO: 49478 - DNA, 2582 bp, Homo sapiens
cgaaagcactccgtgctggaagtaggaggagagtcaggactcccaggacagagagtgcacaaactacccagcacagccccctccgccccctctggaggctgaagagggattccagcccctgccacccacagacacgggctgactggggtgtctgccccccttgggggggggcagcacagggcctcaggcctgggtgccacctggcacctagaagatgcctgtgccctggttcttgctgtccttggcactgggccgaagcccagtggtcctttctctggagaggcttgtggggcctcaggacgctacccactgctctccgcctctcctgccgcctctgggacagtgacatactctgcctgcctggggacatcgtgcctgctccgggccccgtgctggcgcctacgcacctgcagacagagctggtgctgaggtgccagaaggagaccgactgtgacctctgtctgcgtgtggctgtccacttggccgtgcatgggcactgggaagagcctgaagatgaggaaaagtttggaggagcagctgactcaggggtggaggagcctaggaatgcctctctccaggcccaagtcgtgctctccttccaggcctaccctactgcccgctgcgtcctgctggaggtgcaagtgcctgctgcccttgtgcagtttggtcagtctgtgggctctgtggtatatgactgcttcgaggctgccctagggagtgaggtacgaatctggtcctatactcagcccaggtacgagaaggaactcaaccacacacagcagctgcctgccctgccctggctcaacgtgtcagcagatggtgacaacgtgcatctggttctgaatgtctctgaggagcagcacttcggcctctccctgtactggaatcaggtccagggccccccaaaaccccggtggcacaaaaacctgacctggtgaggcctcccccttcccaagtccattcccactgtaggccgatgcctgtgcaaaggacgcagtgccatatcagagaggatccttgaagaggactcaccccaagcaagggaaaattggtgggggaacttctgccttcctggtttccttgactttggcctcctcctcttcctccttatcttctccaacctccttcctttatttgttccacagactggaccgcagatcattaccttgaaccacacagacctggttccctgcctctgtattcaggtgtggcctctggaacctgactccgttaggacgaacatctgccccttcagggaggacccccgcgcacaccagaacctctggcaagccgcccgactgcgactgctgaccctgcagagctggctgctggacgcaccgtgctcgctgcccgcagaagcggcactgtgctggcgggctccgggtggggacccctgccagccactggtcccaccgctttcctgggagaacgtcactgtggacaaggttctcgagttcccattgctgaaaggccaccctaacctctgtgttcaggtgaacagctcggagaagctgcagctgcaggagtgcttgtgggctgactccctggggcctctcaaagacgatgtgctactgttggagacacgaggcccccaggacaacagatccctctgtgccttggaacccagtggctgtacttcactacccagcaaagcctccacgagggcagctcgccttggagagtacttactacaagacctgcagtcaggccagtgtctgcagctatgggacgatgacttgggagcgctatgggcctgccccatggacaaatacatccacaagcgctgggccctcgtgtggctggcctgcctactctttgccgctgcgctttccctcatcctccttctcaaaaaggatcacgcgaaagggtggctgaggctcttgaaacaggacgtccgctcgggggcggccgccaggggccgcgcggctctgctcctctactcagccgatgactcgggtttcgagcgcctggtgggcgccctggcgtcggccctgtgccagctgccgctgcgcgtggccgtagacctgtggagccgtcgtgaactgagcgcgcaggggcccgtggcttggtttcacgcgcagcggcgccagaccctgcaggagggcggcgtggtggtcttgctcttctctcccggtgcggtggcgctgtgcagcgagtggctacaggatggggtgtccgggcccggggcgcacggcccgcacgacgccttccgcgcctcgctcagctgcgtgctgcccgacttcttgcagggccgggcgcccggcagctacgtgggggcctgcttcgacaggctgctccacccggacgccgtacccgcccttttccgcaccgtgcccgtcttcacactgccctcccaactgccagacttcctgggggccctgcagcagcctcgcgccccgcgttccgggcggctccaagagagagcggagcaagtgtcccgggcccttcagccagccctggatagctacttccatcccccggggactcccgcgccgggacgcggggtgggaccaggggcgggacctggggcgggggacgggacttaaataaaggcagacgctgtttttctacccaaaaaacca

SEQ ID NO: 49479 - DNA, 1527 bp, Homo sapiens
cgaaagcactccgtgctggaagtaggaggagagtcaggactcccaggacagagagtgcacaaactacccagcacagccccctccgccccctctggaggctgaagagggattccagcccctgccacccacagacacgggctgactggggtgtctgccccccttgggggggggcagcacagggcctcaggcctgggtgccacctggcacctagaagatgcctgtgccctggttcttgctgtccttggcactgggccgaagcccagtggtcctttctctggagaggcttgtggggcctcaggacgctacccactgctctccgggcctctcctgccgcctctgggacagtgacatactctgcctgcctggggacatcgtgcctgctccgggccccgtgctggcgcctacgcacctgcagacagagctggtgctgaggtgccagaaggagaccgactgtgacctctgtctgcgtgtggctgtccacttggccgtgcatgggcactgggaagagcctgaagatgaggaaaagtttggaggagcagctgactcaggggtggaggagcctaggaatgcctctctccaggcccaagtcgtgctctccttccaggcctaccctactgcccgctgcgtcctgctggaggtgcaagtgcctgctgcccttgtgcagtttggtcagtctgtgggctctgtggtatatgactgcttcgaggctgccctagggagtgaggtacgaatctggtcctatactcagcccaggtacgagaaggaactcaaccacacacagcagctgcctgccctgccctggctcaacgtgtcagcagatggtgacaacgtgcatctggttctgaatgtctctgaggagcagcacttcggcctctccctgtactggaatcaggtccagggccccccaaaaccccggtggcacaaaaacctgacctggtgaggcctcccccttcccaagtccattcccactgtaggccgatgcctgtgcaaaggacgcagtgccatatcagagaggatccttgaagaggactcaccccaagcaagggaaaattgactggaccgcagatcattaccttgaaccacacagacctggttccctgcctctgtattcaggtgtggcctctggaacctgactccgttaggacgaacatctgccccttcagggaggacccccgcgcacaccagaacctctggcaagccgcccgactgcgactgctgaccctgcagagctggctgctggacgcaccgtgctcgctgcccgcagaagcggcactgtgctggcgggctccgggtggggacccctgccagccactggtcccaccgctttcctgggagaacgtcactgtggaccaccaggttctcgagttcccattgctcgcaccggccacccctacacctcctgtgctcccgggctgccaccagctccggcaccaaccctgccagctgccggcactgccttgctgcgccctgactccccgcgggcctcctcccagcacgatgtggctactgctgcgagaccgaggcccc

SEQ ID NO: 49480 - DNA, 1212 bp, Homo sapiens
ctcaggtcagattgagtgcagattcccaacccaacaggccttctgttgcctgccccattctggtctttctgcctttggcttttgcttttcttagtggccctaaccatggtctcttcccagcaggtgaacagctcggagaagctgcagctgcaggagtgcttgtgggctgactccctggggcctctcaaagacgatgtgctactgttggagacacgaggcccccaggacaacagatccctctgtgccttggaacccagtggctgtacttcactacccagcaaagcctccacgagggcagctcgccttggagagtacttactacaagacctgcagtcaggccagtgtctgcagctatgggacgatgacttgggagcgctatgggcctgccccatggacaaatacatccacaagcgctgggccctcgtgtggctggcctgcctactctttgccgctgcgctttccctcatcctccttctcaaaaaggatcacgcgaaagggtggctgaggctcttgaaacaggacgtccgctcgggggcggccgccaggggccgcgcggctctgctcctctactcagccgatgactcgggtttcgagcgcctggtgggcgccctggcgtcggccctgtgccagctgccgctgcgcgtggccgtagacctgtggagccgtcgtgaactgagcgcgcaggggcccgtggcttggtttcacgcgcagcggcgccagaccctgcaggagggcggcgtggtggtcttgctcttctctcccggtgcggtggcgctgtgcagcgagtggctacaggatggggtgtccgggcccggggcgcacggcccgcacgacgccttccgcgcctcgctcagctgcgtgctgcccgacttcttgcagggccgggcgcccggcagctacgtgggggcctgcttcgacaggctgctccacccggacgccgtacccgcccttttccgcaccgtgcccgtcttcacactgccctcccaactgccagacttcctgggggccctgcagcagcctcgcgccccgcgttccgggcggctccaagagagagcggagcaagtgtcccgggcccttcagccagccctggatagctacttccatcccccggggactcccgcgccgggacgcggggtgggaccaggggcgggacctggggcgggggacgggacttaaataaaggcagacgctgtttttctacccaaaaaacca

SEQ ID NO: 49481 - DNA, 1129 bp, Homo sapiens
tagtagagacggggtttcaccgtgttagccaggatggtcttgatgtcctgacctcgtgatctgcccgcctcggcctcccgaagtgctgggattatataaaggcatgagccaccgcacccggcccaattcatttctgttaagtctcagtttttcttctctgtggagggtaagtttctaactcttcttctctgggtctcccagacatccacaagcgctgggccctcgtgtggctggcctgcctactctttgccgctgcgctttccctcatcctccttctcaaaaaggatcacgcgaaaggtgagcgcttcccggctccccattcccctgggggaggaccagagtggctgtgggagttctccgagggaaagcggcggccgagctcactggctgcctccgcccctctcccctaacagggtggctgaggctcttgaaacaggacgtccgctcgggggcggccgccaggggccgcgcggctctgctcctctactcagccgatgactcgggtttcgagcgcctggtgggcgccctggcgtcggccctgtgccagctgccgctgcgcgtggccgtagacctgtggagccgtcgtgaactgagcgcgcaggggcccgtggcttggtttcacgcgcagcggcgccagaccctgcaggagggcggcgtggtggtcttgctcttctctcccggtgcggtggcgctgtgcagcgagtggctacaggatggggtgtccgggcccggggcgcacggcccgcacgacgccttccgcgcctcgctcagctgcgtgctgcccgacttcttgcagggccgggcgcccggcagctacgtgggggcctgcttcgacaggctgctccacccggacgccgtacccgcccttttccgcaccgtgcccgtcttcacactgccctcccaactgccagacttcctgggggccctgcagcagcctcgcgccccgcgttccgggcggctccaagagagagcggagcaagtgtcccgggcccttcagccagccctggatagctacttccatcccccggggactcccgcgccgggacgcggggtgggaccaggggcgggacctggggcgggggacgggacttaaataaaggcagacgctgtttttctacccaaaaaacca

SEQ ID NO: 49482 - DNA, 1384 bp, Homo sapiens
aagcacagttcctatccccaaggagcacactgttggctagacacccataaacagataaccacacctacaggtgctaagttttgggttccagggagagcttccgggaagaatttcttcctataagccagatttggtatggaagaagtcataccctagtcagtgggcacagcacaaaggcagagcagctgcaggaaccttagccgggagatatgcatagttgatgctggaaatttggagatcaggccaccagagcttggtgaatattggaacacctggctggtgccctggatttggttctgtttgtatcttacagctatgggacgatgacttgggagcgctatgggcctgccccatggacaaatacatccacaagcgctgggccctcgtgtggctggcctgcctactctttgccgctgcgctttccctcatcctccttctcaaaaaggatcacgcgaaaggtgagcgcttcccggctccccattcccctgggggaggaccagagtggctgtgggagttctccgagggaaagcggcggccgagctcactggctgcctccgcccctctcccctaacagggtggctgaggctcttgaaacaggacgtccgctcggggggtgagtgggagcaagcgctgggcggagggccgcccccggggagccaggcctgtgccagctcacctcttccctccccatctgttttctccggcagcggccgccaggggccgcgcggctctgctcctctactcagccgatgactcgggtttcgagcgcctggtgggcgccctggcgtcggccctgtgccagctgccgctgcgcgtggccgtagacctgtggagccgtcgtgaactgagcgcgcaggggcccgtggcttggtttcacgcgcagcggcgccagaccctgcaggagggcggcgtggtggtcttgctcttctctcccggtgcggtggcgctgtgcagcgagtggctacaggatggggtgtccgggcccggggcgcacggcccgcacgacgccttccgcgcctcgctcagctgcgtgctgcccgacttcttgcagggccgggcgcccggcagctacgtgggggcctgcttcgacaggctgctccacccggacgccgtacccgcccttttccgcaccgtgcccgtcttcacactgccctcccaactgccagacttcctgggggccctgcagcagcctcgcgccccgcgttccgggcggctccaagagagagcggagcaagtgtcccgggcccttcagccagccctggatagctacttccatcccccggggactcccgcgccgggacgcggggtgggaccaggggcgggacctggggcgggggacgggacttaaataaaggcagacgctgtttttctacccaaaaaacca

SEQ ID NO: 49483 - DNA, 1134 bp, Homo sapiens
cgaaagcactccgtgctggaagtaggaggagagtcaggactcccaggacagagagtgcacaaactacccagcacagccccctccgccccctctggaggctgaagagggattccagcccctgccacccacagacacgggctgactggggtgtctgccccccttgggggggggcagcacagggcctcaggcctgggtgccacctggcacctagaagatgcctgtgccctggttcttgctgtccttggcactgggccgaagcccagtggtcctttctctggagaggcttgtggggcctcaggacgctacccactgctctccgggcctctcctgccgcctctgggacagtgacatactctgcctgcctggggacatcgtgcctgctccgggccccgtgctggcgcctacgcacctgcagacagagctggtgctgaggtgccagaaggagaccgactgtgacctctgtctgcgtgtggctgtccacttggccgtgcatgggcactgggaagagcctgaagatgaggaaaagtttggaggagcagctgactcaggggtggaggagcctaggaatgcctctctccaggcccaagtcgtgctctccttccaggcctaccctactgcccgctgcgtcctgctggaggtgcaagtgcctgctgcccttgtgcagtttggtcagtctgtgggctctgtggtatatgactgcttcgaggctgccctagggagtgaggtacgaatctggtcctatactcagcccaggtacgagaaggaactcaaccacacacagcagctgcctgccctgccctggctcaacgtgtcagcagatggtgacaacgtgcatctggttctgaatgtctctgaggagcagcacttcggcctctccctgtactggaatcaggtccagggccccccaaaaccccggtggcacaaaaacctgaagggcgcgaacatacctgaccaacaccggtaccgccggataaggtggcctgacctacccacaaaaatgccccgagagcccccgccacaattgaagcgcgacacaacccaacgtgaaacacaccacgggacggaggactcacccgtacccgcacacaccgaccgctgtgatgctcctctatattggcagcacgccctacagag

SEQ ID NO: 49484 - DNA, 2368 bp, Homo sapiens
cgaaagcactccgtgctggaagtaggaggagagtcaggactcccaggacagagagtgcacaaactacccagcacagccccctccgccccctctggaggctgaagagggattccagcccctgccacccacagacacgggctgactggggtgtctgccccccttgggggggggcagcacagggcctcaggcctgggtgccacctggcacctagaagatgcctgtgccctggttcttgctgtccttggcactgggccgaagcccagtggtcctttctctggagaggcttgtggggcctcaggacgctacccactgctctccgggcctctcctgccgcctctgggacagtgacatactctgcctgcctggggacatcgtgcctgctccgggccccgtgctggcgcctacgcacctgcagacagagctggtgctgaggtgccagaaggagaccgactgtgacctctgtctgcgtgtggctgtccacttggccgtgcatgggcactgggaagagcctgaagatgaggaaaagtttggaggagcagctgactcaggggtggaggagcctaggaatgcctctctccaggcccaagtcgtgctctccttccaggcctaccctactgcccgctgcgtcctgctggaggtgcaagtgcctgctgcccttgtgcagtttggtcagtctgtgggctctgtggtatatgactgcttcgaggctgccctagggagtgaggtacgaatctggtcctatactcagcccaggtacgagaaggaactcaaccacacacagcagctgcctgccctgccctggctcaacgtgtcagcagatggtgacaacgtgcatctggttctgaatgtctctgaggagcagcacttcggcctctccctgtactggaatcaggtccagggccccccaaaaccccggtggcacaaaaacctgactggaccgcagatcattaccttgaaccacacagacctggttccctgcctctgtattcaggtgtggcctctggaacctgactccgttaggacgaacatctgccccttcagggaggacccccgcgcacaccagaacctctggcaagccgcccgactgcgactgctgaccctgcagagctggctgctggacgcaccgtgctcgctgcccgcagaagcggcactgtgctggcgggctccgggtggggacccctgccagccactggtcccaccgctttcctgggagaacgtcactgtggacaaggttctcgagttcccattgctgaaaggccaccctaacctctgtgttcaggtgaacagctcggagaagctgcagctgcaggagtgcttgtgggctgactccctggggcctctcaaagacgatgtgctactgttggagacacgaggcccccaggacaacagatccctctgtgccttggaacccagtggctgtacttcactacccagcaaagcctccacgagggcagctcgccttggagagtacttactacaagacctgcagtcaggccagtgtctgcagctatgggacgatgacttgggagcgctatgggcctgccccatggacaaatacatccacaagcgctgggccctcgtgtggctggcctgcctactctttgccgctgcgctttccctcatcctccttctcaaaaaggatcacgcgaaagggtggctgaggctcttgaaacaggacgtccgctcgggggcggccgccaggggccgcgcggctctgctcctctactcagccgatgactcgggtttcgagcgcctggtgggcgccctggcgtcggccctgtgccagctgccgctgcgcgtggccgtagacctgtggagccgtcgtgaactgagcgcgcaggggcccgtggcttggtttcacgcgcagcggcgccagaccctgcaggagggcggcgtggtggtcttgctcttctctcccggtgcggtggcgctgtgcagcgagtggctacaggatggggtgtccgggcccggggcgcacggcccgcacgacgccttccgcgcctcgctcagctgcgtgctgcccgacttcttgcagggccgggcgcccggcagctacgtgggggcctgcttcgacaggctgctccacccggacgccgtacccgcccttttccgcaccgtgcccgtcttcacactgccctcccaactgccagacttcctgggggccctgcagcagcctcgcgccccgcgttccgggcggctccaagagagagcggagcaagtgtcccgggcccttcagccagccctggatagctacttccatcccccggggactcccgcgccgggacgcggggtgggaccaggggcgggacctggggcgggggacgggacttaaataaaggcagacgctgtttttctacccaaaaaacca

SEQ ID NO: 49485 - DNA, 2246 bp, Homo sapiens
cgaaagcactccgtgctggaagtaggaggagagtcaggactcccaggacagagagtgcacaaactacccagcacagccccctccgccccctctggaggctgaagagggattccagcccctgccacccacagacacgggctgactggggtgtctgccccccttgggggggggcagcacagggcctcaggcctgggtgccacctggcacctagaagatgcctgtgccctggttcttgctgtccttggcactgggccgaagcccagtggtcctttctctggagaggcttgtggggcctcaggacgctacccactgctctccgggcctctcctgccgcctctgggacagtgacatactctgcctgcctggggacatcgtgcctgctccgggccccgtgctggcgcctacgcacctgcagacagagctggtgctgaggtgccagaaggagaccgactgtgacctctgtctgcgtgtggctgtccacttggccgtgcatgggcactgggaagagcctgaagatgaggaaaagtttggaggagcagctgactcaggggtggaggagcctaggaatgcctctctccaggcccaagtcgtgctctccttccaggcctaccctactgcccgctgcgtcctgctggaggtgcaagtgcctgctgcccttgtgcagtttggtcagtctgtgggctctgtggtatatgactgcttcgaggctgccctagggagtgaggtacgaatctggtcctatactcagcccaggtacgagaaggaactcaaccacacacagcagctgcctgccctgccctggctcaacgtgtcagcagatggtgacaacgtgcatctggttctgaatgtctctgaggagcagcacttcggcctctccctgtactggaatcaggtccagggccccccaaaaccccggtggcacaaaaacctgactggaccgcagatcattaccttgaaccacacagacctggttccctgcctctgtattcaggtgtggcctctggaacctgactccgttaggacgaacatctgccccttcagggaggacccccgcgcacaccagaacctctggcaagccgcccgactgcgactgctgaccctgcagagctggctgctggacgcaccgtgctcgctgcccgcagaagcggcactgtgctggcgggctccgggtggggacccctgccagccactggtcccaccgctttcctgggagaacgtcactgtggacaaggttctcgagttcccattgctgaaaggccaccctaacctctgtgttcaggtgaacagctcggagaagctgcagctgcaggagtgcttgtgggctgagggcagctcgccttggagagtacttactacaagacctgcagtcaggccagtgtctgcagctatgggacgatgacttgggagcgctatgggcctgccccatggacaaatacatccacaagcgctgggccctcgtgtggctggcctgcctactctttgccgctgcgctttccctcatcctccttctcaaaaaggatcacgcgaaagggtggctgaggctcttgaaacaggacgtccgctcgggggcggccgccaggggccgcgcggctctgctcctctactcagccgatgactcgggtttcgagcgcctggtgggcgccctggcgtcggccctgtgccagctgccgctgcgcgtggccgtagacctgtggagccgtcgtgaactgagcgcgcaggggcccgtggcttggtttcacgcgcagcggcgccagaccctgcaggagggcggcgtggtggtcttgctcttctctcccggtgcggtggcgctgtgcagcgagtggctacaggatggggtgtccgggcccggggcgcacggcccgcacgacgccttccgcgcctcgctcagctgcgtgctgcccgacttcttgcagggccgggcgcccggcagctacgtgggggcctgcttcgacaggctgctccacccggacgccgtacccgcccttttccgcaccgtgcccgtcttcacactgccctcccaactgccagacttcctgggggccctgcagcagcctcgcgccccgcgttccgggcggctccaagagagagcggagcaagtgtcccgggcccttcagccagccctggatagctacttccatcccccggggactcccgcgccgggacgcggggtgggaccaggggcgggacctggggcgggggacgggacttaaataaaggcagacgctgtttttctacccaaaaaacca

SEQ ID NO: 49486 - DNA, 2462 bp, Homo sapiens
cgaaagcactccgtgctggaagtaggaggagagtcaggactcccaggacagagagtgcacaaactacccagcacagccccctccgccccctctggaggctgaagagggattccagcccctgccacccacagacacgggctgactggggtgtctgccccccttgggggggggcagcacagggcctcaggcctgggtgccacctggcacctagaagatgcctgtgccctggttcttgctgtccttggcactgggccgaagcccagtggtcctttctctggagaggcttgtggggcctcaggacgctacccactgctctccgggcctctcctgccgcctctgggacagtgacatactctgcctgcctggggacatcgtgcctgctccgggccccgtgctggcgcctacgcacctgcagacagagctggtgctgaggtgccagaaggagaccgactgtgacctctgtctgcgtgtggctgtccacttggccgtgcatgggcactgggaagagcctgaagatgaggaaaagtttggaggagcagctgactcaggggtggaggagcctaggaatgcctctctccaggcccaagtcgtgctctccttccaggcctaccctactgcccgctgcgtcctgctggaggtgcaagtgcctgctgcccttgtgcagtttggtcagtctgtgggctctgtggtatatgactgcttcgaggctgccctagggagtgaggtacgaatctggtcctatactcagcccaggtacgagaaggaactcaaccacacacagcagctgcctgccctgccctggctcaacgtgtcagcagatggtgacaacgtgcatctggttctgaatgtctctgaggagcagcacttcggcctctccctgtactggaatcaggtccagggccccccaaaaccccggtggcacaaaaacctgacctggtgaggcctcccccttcccaagtccattcccactgtaggccgatgcctgtgcaaaggacgcagtgccatatcagagaggatccttgaagaggactcaccccaagcaagggaaaattggtgggggaacttctgccttcctggtttccttgactttggcctcctcctcttcctccttatcttctccaacctccttcctttatttgttccacagactggaccgcagatcattaccttgaaccacacagacctggttccctgcctctgtattcaggtgtggcctctggaacctgactccgttaggacgaacatctgccccttcagggaggacccccgcgcacaccagaacctctggcaagccgcccgactgcgactgctgaccctgcagagctggctgctggacgcaccgtgctcgctgcccgcagaagcggcactgtgctggcgggctccgggtggggacccctgccagccactggtcccaccgctttcctgggagaacgtcactgtggacaaggttctcgagttcccattgctgaaaggccaccctaacctctgtgttcaggtgaacagctcggagaagctgcagctgcaggagtgcttgtgggctgagggcagctcgccttggagagtacttactacaagacctgcagtcaggccagtgtctgcagctatgggacgatgacttgggagcgctatgggcctgccccatggacaaatacatccacaagcgctgggccctcgtgtggctggcctgcctactctttgccgctgcgctttccctcatcctccttctcaaaaaggatcacgcgaaagggtggctgaggctcttgaaacaggacgtccgctcgggggcggccgccaggggccgcgcggctctgctcctctactcagccgatgactcgggtttcgagcgcctggtgggcgccctggcgtcggccctgtgccagctgccgctgcgcgtggccgtagacctgtggagccgtcgtgaactgagcgcgcaggggcccgtggcttggtttcacgcgcagcggcgccagaccctgcaggagggcggcgtggtggtcttgctcttctctcccggtgcggtggcgctgtgcagcgagtggctacaggatggggtgtccgggcccggggcgcacggcccgcacgacgccttccgcgcctcgctcagctgcgtgctgcccgacttcttgcagggccgggcgcccggcagctacgtgggggcctgcttcgacaggctgctccacccggacgccgtacccgcccttttccgcaccgtgcccgtcttcacactgccctcccaactgccagacttcctgggggccctgcagcagcctcgcgccccgcgttccgggcggctccaagagagagcggagcaagtgtcccgggcccttcagccagccctggatagctacttccatcccccggggactcccgcgccgggacgcggggtgggaccaggggcgggacctggggcgggggacgggacttaaataaaggcagacgctgtttttctacccaaaaaacca

SEQ ID NO: 49487 - DNA, 2286 bp, Homo sapiens
cgaaagcactccgtgctggaagtaggaggagagtcaggactcccaggacagagagtgcacaaactacccagcacagccccctccgccccctctggaggctgaagagggattccagcccctgccacccacagacacgggctgactggggtgtctgccccccttgggggggggcagcacagggcctcaggcctgggtgccacctggcacctagaagatgcctgtgccctggttcttgctgtccttggcactgggccgaagcccagtggtcctttctctggagaggcttgtggggcctcaggacgctacccactgctctccgggcctctcctgccgcctctgggacagtgacatactctgcctgcctggggacatcgtgcctgctccgggccccgtgctggcgcctacgcacctgcagacagagctggtgctgaggtgccagaaggagaccgactgtgacctctgtctgcgtgtggctgtccacttggccgtgcatgggcactgggaagagcctgaagatgaggaaaagtttggaggagcagctgactcaggggtggaggagcctaggaatgcctctctccaggcccaagtcgtgctctccttccaggcctaccctactgcccgctgcgtcctgctggaggtgcaagtgcctgctgcccttgtgcagtttggtcagtctgtgggctctgtggtatatgactgcttcgaggctgccctagggagtgaggtacgaatctggtcctatactcagcccaggtacgagaaggaactcaaccacacacagcagctgcctgccctgccctggctcaacgtgtcagcagatggtgacaacgtgcatctggttctgaatgtctctgaggagcagcacttcggcctctccctgtactggaatcaggtccagggccccccaaaaccccggtggcacaaaaacctgactggaccgcagatcattaccttgaaccacacagacctggttccctgcctctgtattcaggtgtggcctctggaacctgactccgttaggacgaacatctgccccttcagggaggacccccgcgcacaccagaacctctggcaagccgcccgactgcgactgctgaccctgcagagctggctgctggacgcaccgtgctcgctgcccgcagaagcggcactgtgctggcgggctccgggtggggacccctgccagccactggtcccaccgctttcctgggagaacgtcactgtggacaaggttctcgagttcccattgctgaaaggccaccctaacctctgtgttcaggtgaacagctcggagaagctgcagctgcaggagtgcttgtgggctgactccctggggcctctcaaagacgatgtgctactgttggagacacgaggcccccaggacaacagatccctctgtgccttggaacccagtggctgtacttcactacccagcaaagcctccacgagggcagctcgccttggagagtacttactacaagacctgcagtcaggccagtgtctgcagctatgggacgatgacttgggagcgctatgggcctgccccatggacaaatacatccacaagcgctgggccctcgtgtggctggcctgcctactctttgccgctgcgctttccctcatcctccttctcaaaaaggatcacgcgaaagggtggctgaggctcttgaaacaggacgtccgctcgggggcggccgccaggggccgcgcggctctgctcctctactcagccgatgactcgggtttcgagcgcctggtgggcgccctggcgtcggccctgtgccacggcgccagaccctgcaggagggcggcgtggtggtcttgctcttctctcccggtgcggtggcgctgtgcagcgagtggctacaggatggggtgtccgggcccggggcgcacggcccgcacgacgccttccgcgcctcgctcagctgcgtgctgcccgacttcttgcagggccgggcgcccggcagctacgtgggggcctgcttcgacaggctgctccacccggacgccgtacccgcccttttccgcaccgtgcccgtcttcacactgccctcccaactgccagacttcctgggggccctgcagcagcctcgcgccccgcgttccgggcggctccaagagagagcggagcaagtgtcccgggcccttcagccagccctggatagctacttccatcccccggggactcccgcgccgggacgcggggtgggaccaggggcgggacctggggcgggggacgggacttaaataaaggcagacgctgtttttctacccaaaaaacca

SEQ ID NO: 49488 - DNA, 2254 bp, Homo sapiens
cgaaagcactccgtgctggaagtaggaggagagtcaggactcccaggacagagagtgcacaaactacccagcacagccccctccgccccctctggaggctgaagagggattccagcccctgccacccacagacacgggctgactggggtgtctgccccccttgggggggggcagcacagggcctcaggcctgggtgccacctggcacctagaagatgcctgtgccctggttcttgctgtccttggcactgggccgaagcccagtggtcctttctctggagaggcttgtggggcctcaggacgctacccactgctctccgggcctctcctgccgcctctgggacagtgacatactctgcctgcctggggacatcgtgcctgctccgggccccgtgctggcgcctacgcacctgcagacagagctggtgctgaggtgccagaaggagaccgactgtgacctctgtctgcgtgtggctgtccacttggccgtgcatgcctctctccaggcccaagtcgtgctctccttccaggcctaccctactgcccgctgcgtcctgctggaggtgcaagtgcctgctgcccttgtgcagtttggtcagtctgtgggctctgtggtatatgactgcttcgaggctgccctagggagtgaggtacgaatctggtcctatactcagcccaggtacgagaaggaactcaaccacacacagcagctgcctgccctgccctggctcaacgtgtcagcagatggtgacaacgtgcatctggttctgaatgtctctgaggagcagcacttcggcctctccctgtactggaatcagactggaccgcagatcattaccttgaaccacacagacctggttccctgcctctgtattcaggtgtggcctctggaacctgactccgttaggacgaacatctgccccttcagggaggacccccgcgcacaccagaacctctggcaagccgcccgactgcgactgctgaccctgcagagctggctgctggacgcaccgtgctcgctgcccgcagaagcggcactgtgctggcgggctccgggtggggacccctgccagccactggtcccaccgctttcctgggagaacgtcactgtggacaaggttctcgagttcccattgctgaaaggccaccctaacctctgtgttcaggtgaacagctcggagaagctgcagctgcaggagtgcttgtgggctgactccctggggcctctcaaagacgatgtgctactgttggagacacgaggcccccaggacaacagatccctctgtgccttggaacccagtggctgtacttcactacccagcaaagcctccacgagggcagctcgccttggagagtacttactacaagacctgcagtcaggccagtgtctgcagctatgggacgatgacttgggagcgctatgggcctgccccatggacaaatacatccacaagcgctgggccctcgtgtggctggcctgcctactctttgccgctgcgctttccctcatcctccttctcaaaaaggatcacgcgaaagggtggctgaggctcttgaaacaggacgtccgctcgggggcggccgccaggggccgcgcggctctgctcctctactcagccgatgactcgggtttcgagcgcctggtgggcgccctggcgtcggccctgtgccagctgccgctgcgcgtggccgtagacctgtggagccgtcgtgaactgagcgcgcaggggcccgtggcttggtttcacgcgcagcggcgccagaccctgcaggagggcggcgtggtggtcttgctcttctctcccggtgcggtggcgctgtgcagcgagtggctacaggatggggtgtccgggcccggggcgcacggcccgcacgacgccttccgcgcctcgctcagctgcgtgctgcccgacttcttgcagggccgggcgcccggcagctacgtgggggcctgcttcgacaggctgctccacccggacgccgtacccgcccttttccgcaccgtgcccgtcttcacactgccctcccaactgccagacttcctgggggccctgcagcagcctcgcgccccgcgttccgggcggctccaagagagagcggagcaagtgtcccgggcccttcagccagccctggatagctacttccatcccccggggactcccgcgccgggacgcggggtgggaccaggggcgggacctggggcgggggacgggacttaaataaaggcagacgctgtttttctacccaaaaaacca

SEQ ID NO: 49489 - DNA, 1773 bp, Homo sapiens
tatttcagtgcgcgggccgggctgtgttgtacatgactgggcgtgggccgacagtttgcacttgtgcagtttggtcagtctgtgggctctgtggtatatgactgcttcgaggctgccctagggagtgaggtacgaatctggtcctatactcagcccaggtacgagaaggaactcaaccacacacagcagctgcctgccctgccctggctcaacgtgtcagcagatggtgacaacgtgcatctggttctgaatgtctctgaggagcagcacttcggcctctccctgtactggaatcaggtccagggccccccaaaaccccggtggcacaaaaacctgactggaccgcagatcattaccttgaaccacacagacctggttccctgcctctgtattcaggtgtggcctctggaacctgactccgttaggacgaacatctgccccttcagggaggacccccgcgcacaccagaacctctggcaagccgcccgactgcgactgctgaccctgcagagctggctgctggacgcaccgtgctcgctgcccgcagaagcggcactgtgctggcgggctccgggtggggacccctgccagccactggtcccaccgctttcctgggagaacgtcactgtggacaaggttctcgagttcccattgctgaaaggccaccctaacctctgtgttcaggtgaacagctcggagaagctgcagctgcaggagtgcttgtgggctgactccctggggcctctcaaagacgatgtgctactgttggagacacgaggcccccaggacaacagatccctctgtgccttggaacccagtggctgtacttcactacccagcaaagcctccacgagggcagctcgccttggagagtacttactacaagacctgcagtcaggccagtgtctgcagctatgggacgatgacttgggagcgctatgggcctgccccatggacaaatacatccacaagcgctgggccctcgtgtggctggcctgcctactctttgccgctgcgctttccctcatcctccttctcaaaaaggatcacgcgaaagggtggctgaggctcttgaaacaggacgtccgctcgggggcggccgccaggggccgcgcggctctgctcctctactcagccgatgactcgggtttcgagcgcctggtgggcgccctggcgtcggccctgtgccagctgccgctgcgcgtggccgtagacctgtggagccgtcgtgaactgagcgcgcaggggcccgtggcttggtttcacgcgcagcggcgccagaccctgcaggagggcggcgtggtggtcttgctcttctctcccggtgcggtggcgctgtgcagcgagtggctacaggatggggtgtccgggcccggggcgcacggcccgcacgacgccttccgcgcctcgctcagctgcgtgctgcccgacttcttgcagggccgggcgcccggcagctacgtgggggcctgcttcgacaggctgctccacccggacgccgtacccgcccttttccgcaccgtgcccgtcttcacactgccctcccaactgccagacttcctgggggccctgcagcagcctcgcgccccgcgttccgggcggctccaagagagagcggagcaagtgtcccgggcccttcagccagccctggatagctacttccatcccccggggactcccgcgccgggacgcggggtgggaccaggggcgggacctggggcgggggacgggacttaaataaaggcagacgctgtttttctacccaaaaaacca

SEQ ID NO: 49490 - DNA, 1290 bp, Homo sapiens
aagcacagttcctatccccaaggagcacactgttggctagacacccataaacagataaccacacctacaggtgctaagttttgggttccagggagagcttccgggaagaatttcttcctataagccagatttggtatggaagaagtcataccctagtcagtgggcacagcacaaaggcagagcagctgcaggaaccttagccgggagatatgcatagttgatgctggaaatttggagatcaggccaccagagcttggtgaatattggaacacctggctggtgccctggatttggttctgtttgtatcttacagctatgggacgatgacttgggagcgctatgggcctgccccatggacaaatacatccacaagcgctgggccctcgtgtggctggcctgcctactctttgccgctgcgctttccctcatcctccttctcaaaaaggatcacgcgaaaggtgagcgcttcccggctccccattcccctgggggaggaccagagtggctgtgggagttctccgagggaaagcggcggccgagctcactggctgcctccgcccctctcccctaacagggtggctgaggctcttgaaacaggacgtccgctcgggggcggccgccaggggccgcgcggctctgctcctctactcagccgatgactcgggtttcgagcgcctggtgggcgccctggcgtcggccctgtgccagctgccgctgcgcgtggccgtagacctgtggagccgtcgtgaactgagcgcgcaggggcccgtggcttggtttcacgcgcagcggcgccagaccctgcaggagggcggcgtggtggtcttgctcttctctcccggtgcggtggcgctgtgcagcgagtggctacaggatggggtgtccgggcccggggcgcacggcccgcacgacgccttccgcgcctcgctcagctgcgtgctgcccgacttcttgcagggccgggcgcccggcagctacgtgggggcctgcttcgacaggctgctccacccggacgccgtacccgcccttttccgcaccgtgcccgtcttcacactgccctcccaactgccagacttcctgggggccctgcagcagcctcgcgccccgcgttccgggcggctccaagagagagcggagcaagtgtcccgggcccttcagccagccctggatagctacttccatcccccggggactcccgcgccgggacgcggggtgggaccaggggcgggacctggggcgggggacgggacttaaataaaggcagacgctgtttttctacccaaaaaacca

SEQ ID NO: 49491 - DNA, 1223 bp, Homo sapiens
tagtagagacggggtttcaccgtgttagccaggatggtcttgatgtcctgacctcgtgatctgcccgcctcggcctcccgaagtgctgggattatataaaggcatgagccaccgcacccggcccaattcatttctgttaagtctcagtttttcttctctgtggagggtaagtttctaactcttcttctctgggtctcccagacatccacaagcgctgggccctcgtgtggctggcctgcctactctttgccgctgcgctttccctcatcctccttctcaaaaaggatcacgcgaaaggtgagcgcttcccggctccccattcccctgggggaggaccagagtggctgtgggagttctccgagggaaagcggcggccgagctcactggctgcctccgcccctctcccctaacagggtggctgaggctcttgaaacaggacgtccgctcggggggtgagtgggagcaagcgctgggcggagggccgcccccggggagccaggcctgtgccagctcacctcttccctccccatctgttttctccggcagcggccgccaggggccgcgcggctctgctcctctactcagccgatgactcgggtttcgagcgcctggtgggcgccctggcgtcggccctgtgccagctgccgctgcgcgtggccgtagacctgtggagccgtcgtgaactgagcgcgcaggggcccgtggcttggtttcacgcgcagcggcgccagaccctgcaggagggcggcgtggtggtcttgctcttctctcccggtgcggtggcgctgtgcagcgagtggctacaggatggggtgtccgggcccggggcgcacggcccgcacgacgccttccgcgcctcgctcagctgcgtgctgcccgacttcttgcagggccgggcgcccggcagctacgtgggggcctgcttcgacaggctgctccacccggacgccgtacccgcccttttccgcaccgtgcccgtcttcacactgccctcccaactgccagacttcctgggggccctgcagcagcctcgcgccccgcgttccgggcggctccaagagagagcggagcaagtgtcccgggcccttcagccagccctggatagctacttccatcccccggggactcccgcgccgggacgcggggtgggaccaggggcgggacctggggcgggggacgggacttaaataaaggcagacgctgtttttctacccaaaaaacca

SEQ ID NO: 49492 - DNA, 168 bp, Homo sapiens
aggacaacagatccctctgtgccttggaacccagtggctgtacttcactacccagcaaagcctccacggttaggactgggcgaccctcctccacagatctctccaaatgcatctcacatctggcctcaaattttcactccatccaccctgtgccggtctctgggaaca

SEQ ID NO: 49493 - DNA, 204 bp, Homo sapiens
aggaagaaataaaatactatttgtaactctgaaagttatggtttaatttttttaaatactgcaactagttttgatatgccagaaaactcagtaatgaggtatcatatatacccacagctaaaccattaactcaaactcaattgctatatattttaaatttaagattttactatacatatatttatcactgacaaatacataagt

SEQ ID NO: 49494 - DNA, 233 bp, Homo sapiens
ttgcactccatcctgggccatagagcgagactctgtctcaaaaagaaagtctttagacaaacgcaaacaagttacttttgattggttgaagaaaataatgtgaccagaggctggcaggaatctaaccctgtatttcctctaaccatggattccatatttacttatttagtgtttgccacaactttgtagagagcttaactactgtgaataatgagaaatgactgtattttaat

SEQ ID NO: 49495 - DNA, 2204 bp, Homo sapiens
gcaggcggagcctcattggccgctgagccccgggctgcgcggaggcgggacctgcggccagccctgggcggccatgtggacagagctgggagggccggaaccagaacccaagcgtgatcctgaaccggagcccgagcctgctgcagagtgtcagcatgctgcgcttcctggcaccccggctgcttagcctccagggcaggaccgcccgctactcctcggcagcagccctcccaagccccattctgaacccagacatcccctacaaccagctgttcatcaacaatgaatggcaagatgcagtcagcaagaagaccttcccgacggtcaaccctaccaccggggaggtcatcgggcacgtggctgaaggtgaccgggctgatgtggatcgggccgtgaaagcagcccgggaagccttccgcctggggtccccatggcgccggatggatgcctctgagcggggccggctgctgaacctcctggcagacctagtggagcgggatcgagtctacttggcctcactcgagaccttggacaatgggaagcctttccaagagtcttacgccttggacttggatgaggtcatcaaggtgtatcggtactttgctggctgggctgacaagtggcatggcaagaccatccccatggatggccagcatttctgcttcacccggcatgagcccgttggtgtctgtggccagatcatcccgtggaacttccccttggtcatgcagggttggaaacttgccccggcactcgccacaggcaacactgtggttatgaaggtggcagagcagacccccctctctgccctgtatttggcctccctcatcaaggaggcaggctttccccctggggtggtgaacatcatcacggggtatggcccaacagcaggtgcggccatcgcccagcacatggatgttgacaaagttgccttcaccggttccaccgaggtgggccacctgatccagaaagcagctggcgattccaacctcaagagagtcaccctggagctgggtggtaagagccccagcatcgtgctggccgatgctgacatggagcatgccgtggagcagtgccacgaagccctgttcttcaacatgggccagtgctgctgtgctggctcccggaccttcgtggaagaatccatctacaatgagtttctcgagagaaccgtggagaaagcaaagcagaggaaagtggggaacccctttgagctggacacccagcaggggcctcaggtggacaaggagcagtttgaacgagtcctaggctacatccagcttggccagaaggagggcgcaaaactcctctgtggcggagagcgtttcggggagcgtggtttcttcatcaagcctactgtctttggtggcgtgcaggatgacatgagaattgccaaagaggagatctttgggcctgtgcagcccctgttcaagttcaagaagattgaggaggtggttgagagggccaacaacaccaggtatggcctggctgcggctgtgttcacccgggatctggacaaggccatgtacttcacccaggcactccaggccgggaccgtgtgggtaaacacctacaacatcgtcacctgccacacgccatttggagggtttaaggaatctggaaacgggagggagctgggtgaggatgggcttaaggcctacacagaggtaaagacggtcaccatcaaggttcctcagaagaactcgtaagagcagctgtcagggaggcccagtcacagtccagcaattccacaaccaccttgaccaatgcttgccaagctgttttaaagccaagaacaccctttctttgttccaaattaactcttagaagaaaccccacaaataaagcaattcaatcaaggctgttctatttaaatcagagatggggaccaggctcagagttctacctatctaacccccaaccacagcccccttggtggcccatgagttgcttccatgaaatcttaggagtctctggaggacagattaaaaaccagtgatctgtaatttgtagctcttcctgctgatccaaggactttcccatgggtgcgcttgatggtttagtggatcgactcaactcagaacacaagcttggaaagtgttaggggttttgaactaggtggatatacaggtgggagccacaacacccggccatgaattaactccgttaaaaaataaacgtatacattctgtgagcaaatccat

SEQ ID NO: 49496 - DNA, 2881 bp, Homo sapiens
gcaggcggagcctcattggccgctgagccccgggctgcgcggaggcgggacctgcggccagccctgggcggccatgtggacagagctgggagggccggaaccagaacccaagcgtgatcctgaaccggagcccgagcctgctgcagagtgtcagcatgctgcgcttcctggcaccccggctgcttagcctccagggcaggaccgcccgctactcctcggcagcagccctcccaagccccattctgaacccagacatcccctacaaccagctgttcatcaacaatgaatggcaagatgcagtcagcaagaagaccttcccgacggtcaaccctaccaccggggaggtcatcgggcacgtggctgaaggtgaccgggctgatgtggatcgggccgtgaaagcagcccgggaagccttccgcctggggtccccatggcgccggatggatgcctctgagcggggccggctgctgaacctcctggcagacctagtggagcgggatcgagtctacttggcctcactcgagaccttggacaatgggaagcctttccaagagtcttacgccttggacttggatgaggtcatcaaggtgtatcggtactttgctggctgggctgacaagtggcatggcaagaccatccccatggatggccagcatttctgcttcacccggcatgagcccgttggtgtctgtggccagatcatcccgtggaacttccccttggtcatgcagggttggaaacttgccccggcactcgccacaggcaacactgtggttatgaaggtggcagagcagacccccctctctgccctgtatttggcctccctcatcaaggaggcaggctttccccctggggtggtgaacatcatcacggggtatggcccaacagcaggtgcggccatcgcccagcacatggatgttgacaaagttgccttcaccggttccaccgaggtgggccacctgatccagaaagcagctggcgattccaacctcaagagagtcaccctggagctgggtggtaagagccccagcatcgtgctggccgatgctgacatggagcatgccgtggagcagtgccacgaagccctgttcttcaacatgggccagtgctgctgtgctggctcccggaccttcgtggaagaatccatctacaatgagtttctcgagagaaccgtggagaaagcaaagcagaggaaagtggggaacccctttgagctggacacccagcaggggcctcaggtggacaaggagcagtttgaacgagtcctaggctacatccagcttggccagaaggagggcgcaaaactcctctgtggcggagagcgtttcggggagcgtggtttcttcatcaagcctactgtctttggtggcgtgcaggatgacatgagaattgccaaagaggagatctttgggcctgtgcagcccctgttcaagttcaagaagattgaggaggatgggcttaaggcctacacagaggtaaagacggtcaccatcaaggttcctcagaagaactcgtaagagcagctgtcagggaggcccagtcacagtccagcaattccacaaccaccttgaccaatgcttgccaagctgttttaaagccaagaacaccctttctttgttccaaattaactcttagaagaaaccccacaaataaagcaattcaatcaaggctgttctatttaaatcagagatggggaccaggctcagagttctacctatctaacccccaaccacagcccccttggtggcccatgagttgcttccatgaaatcttaggagtctctggaggacagattaaaaaccagtgatctgtaatttgtagctcttcctgctgatccaaggactttcccatgggtgcgcttgatggtttagtggatcgactcaactcagaacacaagcttggaaagtgttaggggttttgaactaggtggatactaaatctcggccccactcttcattggcttaacctaaaaaccagaggtgcttttccttgtctgtgtgccagttgctggctgttttagttgcttgcccttcattttgctactgattttccttaatttgtgggaaggagtaggcaaagaatatgcttacatgattacacctgtaaagtaagcccaaacatcccaaatgtccatcaactgatgagtggattaataaaatgtttccatggaatattccttggattactcagccataaaaaggaatgaagtactgacacatgctgtgacatcagtgaaccctgaaaacatccttctcagtgaaacaagccagagagatgtacaaggctacagactgtatgattccatttatatgaaatatacatactaggcaaatccatggagatggaacatagattagtggttgccaggggatagaggagtaattgttagtgggcatgggatttgtttttgggaggttttgaaaatgttctggagttgaacaatagtaatggttgcatgatttggtaaaaatactaaaaactatggaattgtttaattatggtatatgaattaatttctttctttttttcttttttttttttttttttgacacggagtctcactctgtcgcccaggctggagtgcagtggtgtgatctcgtctcactgcaacctccgcctcccagattcaagcgattctcctgtctcagcctcctgagtagctgggattataggtacatgccatcacacctggctaatttttgtatttttagtagagatgaggtttcaccattttggccaggctgatcttgaactcctgacctcaggtgatccacccgcctcagcctcccaaagtgctgggattacaggtgggagccacaacacccggccatgaattaactccgttaaaaaataaacgtatacattctgtgagcaaatccat

SEQ ID NO: 49497 - DNA, 1594 bp, Homo sapiens
gcaggcggagcctcattggccgctgagccccgggctgcgcggaggcgggacctgcggccagccctgggcggccatgtggacagagctgggagggccggaaccagaacccaagcgtgatcctgaaccggagcccgagcctgctgcagagtgtcagcatgctgcgcttcctggcaccccggctgcttagcctccagggcaggaccgcccgctactcctcggcagcagccctcccaagccccattctgaacccagacatcccctacaaccagctgttcatcaacaatgaatggcaagatgcagtcagcaagaagaccttcccgacggtcaaccctaccaccggggaggtcatcgggcacgtggctgaaggtgaccgggctgatgtggatcgggccgtgaaagcagcccgggaagccttccgcctggggtccccatggcgccggatggatgcctctgagcggggccggctgctgaacctcctggcagacctagtggagcgggatcgagtctacttggcctcactcgagaccttggacaatgggaagcctttccaagagtcttacgccttggacttggatgaggtcatcaaggtgtatcggtactttgctggctgggctgacaagtggcatggcaagaccatccccatggatggccagcatttctgcttcacccggcatgagcccgttggtgtctgtggccagatcatcccgtggaacttccccttggtcatgcagggttggaaacttgccccggcactcgccacaggcaacactgtggttatgaaggtggcagagcagacccccctctctgccctgtatttggcctccctcatcaaggaggcaggctttccccctggggtggtgaacatcatcacggggtatggcccaacagcaggtgcggccatcgcccagcacatggatgttgacaaagttgccttcaccggttccaccgaggtgggccacctgatccagaaagcagctggcgattccaacctcaagagagtcaccctggagctgggtggtaagagccccagcatcgtgctggccgatgctgacatggagcatgccgtggagcagtgccacgaagccctgttcttcaacatgggccagtgctgctgtgctggctcccggaccttcgtggaagaatccatctacaatgagtttctcgagagaaccgtggagaaagcaaagcagaggaaagtggggaacccctttgagctggacacccagcaggggcctcaggtggacaaggagcagtttgaacgagtcctaggctacatccagcttggccagaaggagggcgcaaaactcctctgtggcggagagcgtttcggggagcgtggtttcttcatcaagcctactgtctttggtggcgtgcaggatgacatgagaattgccaaagaggagatctttgggcctgtgcagcccctgttcaagttcaagaagattgaggaggtggttgagagggccaacaacaccagcaattccacaaccaccttgaccaatgcttgccaagctgttttaaagccaagaacaccctttctttgttccaaattaactcttagaagaaaccccacaaataaagcaattcaatcaag

SEQ ID NO: 49498 - DNA, 1584 bp, Homo sapiens
gcacgaggtcttgggctgtcagcctgtcaagtcagagatagagtggtgagaggcacacacagtatgctgctcgctggtcaccggattgacagccagtcttaccagcatcagcgggcgtgtgggtacctacacatgtactcccagcattgaggttagaattgacggagagtgggtagatgctaagctccaaggaagggtccacaggtctcaaaactcgtaagagcagctgtcagggaggcccagtcacagtccagcaattccacaaccaccttgaccaatgcttgccaagctgttttaaagccaagaacaccctttctttgttccaaattaactcttagaagaaaccccacaaataaagcaattcaatcaaggctgttctatttaaatcagagatggggaccaggctcagagttctacctatctaacccccaaccacagcccccttggtggcccatgagttgcttccatgaaatcttaggagtctctggaggacagattaaaaaccagtgatctgtaatttgtagctcttcctgctgatccaaggactttcccatgggtgcgcttgatggtttagtggatcgactcaactcagaacacaagcttggaaagtgttaggggttttgaactaggtggatactaaatctcggccccactcttcattggcttaacctaaaaaccagaggtgcttttccttgtctgtgtgccagttgctggctgttttagttgcttgcccttcattttgctactgattttccttaatttgtgggaaggagtaggcaaagaatatgcttacatgattacacctgtaaagtaagcccaaacatcccaaatgtccatcaactgatgagtggattaataaaatgtttccatggaatattccttggattactcagccataaaaaggaatgaagtactgacacatgctgtgacatcagtgaaccctgaaaacatccttctcagtgaaacaagccagagagatgtacaaggctacagactgtatgattccatttatatgaaatatacatactaggcaaatccatggagatggaacatagattagtggttgccaggggatagaggagtaattgttagtgggcatgggatttgtttttgggaggttttgaaaatgttctggagttgaacaatagtaatggttgcatgatttggtaaaaatactaaaaactatggaattgtttaattatggtatatgaattaatttctttctttttttcttttttttttttttttttgacacggagtctcactctgtcgcccaggctggagtgcagtggtgtgatctcgtctcactgcaacctccgcctcccagattcaagcgattctcctgtctcagcctcctgagtagctgggattataggtacatgccatcacacctggctaatttttgtatttttagtagagatgaggtttcaccattttggccaggctgatcttgaactcctgacctcaggtgatccacccgcctcagcctcccaaagtgctgggattacaggtgggagccacaacacccggccatgaattaactccgttaaaaaataaacgtatacattctgtgagcaaatccat

SEQ ID NO: 49499 - DNA, 3073 bp, Homo sapiens
gcaggcggagcctcattggccgctgagccccgggctgcgcggaggcgggacctgcggccagccctgggcggccatgtggacagagctgggagggccggaaccagaacccaagcgtgatcctgaaccggagcccgagcctgctgcagagtgtcagcatgctgcgcttcctggcaccccggctgcttagcctccagggcaggaccgcccgctactcctcggcagcagccctcccaagccccattctgaacccagacatcccctacaaccagctgttcatcaacaatgaatggcaagatgcagtcagcaagaagaccttcccgacggtcaaccctaccaccggggaggtcatcgggcacgtggctgaaggtgaccgggctgatgtggatcgggccgtgaaagcagcccgggaagccttccgcctggggtccccatggcgccggatggatgcctctgagcggggccggctgctgaacctcctggcagacctagtggagcgggatcgagtctacttggcctcactcgagaccttggacaatgggaagcctttccaagagtcttacgccttggacttggatgaggtcatcaaggtgtatcggtactttgctggctgggctgacaagtggcatggcaagaccatccccatggatggccagcatttctgcttcacccggcatgagcccgttggtgtctgtggccagatcatcccgtggaacttccccttggtcatgcagggttggaaacttgccccggcactcgccacaggcaacactgtggttatgaaggtggcagagcagacccccctctctgccctgtatttggcctccctcatcaaggaggcaggctttccccctggggtggtgaacatcatcacggggtatggcccaacagcaggtgcggccatcgcccagcacatggatgttgacaaagttgccttcaccggttccaccgaggtgggccacctgatccagaaagcagctggcgattccaacctcaagagagtcaccctggagctgggtggtaagagccccagcatcgtgctggccgatgctgacatggagcatgccgtggagcagtgccacgaagccctgttcttcaacatgggccagtgctgctgtgctggctcccggaccttcgtggaagaatccatctacaatgagtttctcgagagaaccgtggagaaagcaaagcagaggaaagtggggaacccctttgagctggacacccagcaggggcctcaggtggacaaggagcagtttgaacgagtcctaggctacatccagcttggccagaaggagggcgcaaaactcctctgtggcggagagcgtttcggggagcgtggtttcttcatcaagcctactgtctttggtggcgtgcaggatgacatgagaattgccaaagaggagatctttgggcctgtgcagcccctgttcaagttcaagaagattgaggaggtggttgagagggccaacaacaccaggtatggcctggctgcggctgtgttcacccgggatctggacaaggccatgtacttcacccaggcactccaggccgggaccgtgtgggtaaacacctacaacatcgtcacctgccacacgccatttggagggtttaaggaatctggaaacgggagggagctgggtgaggatgggcttaaggcctacacagaggtaaagacggtcaccatcaaggttcctcagaagaactcgtaagagcagctgtcagggaggcccagtcacagtccagcaattccacaaccaccttgaccaatgcttgccaagctgttttaaagccaagaacaccctttctttgttccaaattaactcttagaagaaaccccacaaataaagcaattcaatcaaggctgttctatttaaatcagagatggggaccaggctcagagttctacctatctaacccccaaccacagcccccttggtggcccatgagttgcttccatgaaatcttaggagtctctggaggacagattaaaaaccagtgatctgtaatttgtagctcttcctgctgatccaaggactttcccatgggtgcgcttgatggtttagtggatcgactcaactcagaacacaagcttggaaagtgttaggggttttgaactaggtggatactaaatctcggccccactcttcattggcttaacctaaaaaccagaggtgcttttccttgtctgtgtgccagttgctggctgttttagttgcttgcccttcattttgctactgattttccttaatttgtgggaaggagtaggcaaagaatatgcttacatgattacacctgtaaagtaagcccaaacatcccaaatgtccatcaactgatgagtggattaataaaatgtttccatggaatattccttggattactcagccataaaaaggaatgaagtactgacacatgctgtgacatcagtgaaccctgaaaacatccttctcagtgaaacaagccagagagatgtacaaggctacagactgtatgattccatttatatgaaatatacatactaggcaaatccatggagatggaacatagattagtggttgccaggggatagaggagtaattgttagtgggcatgggatttgtttttgggaggttttgaaaatgttctggagttgaacaatagtaatggttgcatgatttggtaaaaatactaaaaactatggaattgtttaattatggtatatgaattaatttctttctttttttcttttttttttttttttttgacacggagtctcactctgtcgcccaggctggagtgcagtggtgtgatctcgtctcactgcaacctccgcctcccagattcaagcgattctcctgtctcagcctcctgagtagctgggattataggtacatgccatcacacctggctaatttttgtatttttagtagagatgaggtttcaccattttggccaggctgatcttgaactcctgacctcaggtgatccacccgcctcagcctcccaaagtgctgggattacaggtgggagccacaacacccggccatgaattaactccgttaaaaaataaacgtatacattctgtgagcaaatccat

SEQ ID NO: 49500 - DNA, 1860 bp, Homo sapiens
gcaggcggagcctcattggccgctgagccccgggctgcgcggaggcgggacctgcggccagccctgggcggccatgtggacagagctgggagggccggaaccagaacccaagcgtgatcctgaaccggagcccgagcctgctgcagagtgtcagcatgctgcgcttcctggcaccccggctgcttagcctccagggcaggaccgcccgctactcctcggcagcagccctcccaagccccattctgaacccagacatcccctacaaccagctgttcatcaacaatgaatggcaagatgcagtcagcaagaagaccttcccgacggtcaaccctaccaccggggaggtcatcgggcacgtggctgaaggtgaccgggctgatgtggatcgggccgtgaaagcagcccgggaagccttccgcctggggtccccatggcgccggatggatgcctctgagcggggccggctgctgaacctcctggcagacctagtggagcgggatcgagtctacttggcctcactcgagaccttggacaatgggaagcctttccaagagtcttacgccttggacttggatgaggtcatcaaggtgtatcggtactttgctggctgggctgacaagtggcatggcaagaccatccccatggatggccagcatttctgcttcacccggcatgagcccgttggtgtctgtggccagatcatcccgtggaacttccccttggtcatgcagggttggaaacttgccccggcactcgccacaggcaacactgtggttatgaaggtggcagagcagacccccctctctgccctgtatttggcctccctcatcaaggaggcaggctttccccctggggtggtgaacatcatcacggggtatggcccaacagcaggtgcggccatcgcccagcacatggatgttgacaaagttgccttcaccggttccaccgaggtgggccacctgatccagaaagcagctggcgattccaacctcaagagagtcaccctggagctgggtggtaagagccccagcatcgtgctggccgatgctgacatggagcatgccgtggagcagtgccacgaagccctgttcttcaacatgggccagtgctgctgtgctggctcccggaccttcgtggaagaatccatctacaatgagtttctcgagagaaccgtggagaaagcaaagcagaggaaagtggggaacccctttgagctggacacccagcaggggcctcaggtggacaaggagcagtttgaacgagtcctaggctacatccagcttggccagaaggagggcgcaaaactcctctgtggcggagagcgtttcggggagcgtggtttcttcatcaagcctactgtctttggtggcgtgcaggatgacatgagaattgccaaagaggagatctttgggcctgtgcagcccctgttcaagttcaagaagattgaggaggtggttgagagggccaacaacaccaggtatggcctggctgcggctgtgttcacccgggatctggacaaggccatgtacttcacccaggcactccaggccgggaccgtgtgggtaaacacctacaacatcgtcacctgccacacgccatttggagggtttaaggaatctggaaacgggagggagctgggtgaggatgggcttaaggcctacacagaggtaaagacggtcaccatcaaggttcctcagaagaactcgtaagagcagctgtcagggaggcccagtcacagtccagcaattccacaaccaccttgaccaatgcttgccaagctgttttaaagccaagaacaccctttctttgttccaaattaactcttagaagaaaccccacaaataaagcaattcaatcaag

SEQ ID NO: 49501 - DNA, 2807 bp, Homo sapiens
gcaggcggagcctcattggccgctgagccccgggctgcgcggaggcgggacctgcggccagccctgggcggccatgtggacagagctgggagggccggaaccagaacccaagcgtgatcctgaaccggagcccgagcctgctgcagagtgtcagcatgctgcgcttcctggcaccccggctgcttagcctccagggcaggaccgcccgctactcctcggcagcagccctcccaagccccattctgaacccagacatcccctacaaccagctgttcatcaacaatgaatggcaagatgcagtcagcaagaagaccttcccgacggtcaaccctaccaccggggaggtcatcgggcacgtggctgaaggtgaccgggctgatgtggatcgggccgtgaaagcagcccgggaagccttccgcctggggtccccatggcgccggatggatgcctctgagcggggccggctgctgaacctcctggcagacctagtggagcgggatcgagtctacttggcctcactcgagaccttggacaatgggaagcctttccaagagtcttacgccttggacttggatgaggtcatcaaggtgtatcggtactttgctggctgggctgacaagtggcatggcaagaccatccccatggatggccagcatttctgcttcacccggcatgagcccgttggtgtctgtggccagatcatcccgtggaacttccccttggtcatgcagggttggaaacttgccccggcactcgccacaggcaacactgtggttatgaaggtggcagagcagacccccctctctgccctgtatttggcctccctcatcaaggaggcaggctttccccctggggtggtgaacatcatcacggggtatggcccaacagcaggtgcggccatcgcccagcacatggatgttgacaaagttgccttcaccggttccaccgaggtgggccacctgatccagaaagcagctggcgattccaacctcaagagagtcaccctggagctgggtggtaagagccccagcatcgtgctggccgatgctgacatggagcatgccgtggagcagtgccacgaagccctgttcttcaacatgggccagtgctgctgtgctggctcccggaccttcgtggaagaatccatctacaatgagtttctcgagagaaccgtggagaaagcaaagcagaggaaagtggggaacccctttgagctggacacccagcaggggcctcaggtggacaaggagcagtttgaacgagtcctaggctacatccagcttggccagaaggagggcgcaaaactcctctgtggcggagagcgtttcggggagcgtggtttcttcatcaagcctactgtctttggtggcgtgcaggatgacatgagaattgccaaagaggagatctttgggcctgtgcagcccctgttcaagttcaagaagattgaggaggtggttgagagggccaacaacaccagcaattccacaaccaccttgaccaatgcttgccaagctgttttaaagccaagaacaccctttctttgttccaaattaactcttagaagaaaccccacaaataaagcaattcaatcaaggctgttctatttaaatcagagatggggaccaggctcagagttctacctatctaacccccaaccacagcccccttggtggcccatgagttgcttccatgaaatcttaggagtctctggaggacagattaaaaaccagtgatctgtaatttgtagctcttcctgctgatccaaggactttcccatgggtgcgcttgatggtttagtggatcgactcaactcagaacacaagcttggaaagtgttaggggttttgaactaggtggatactaaatctcggccccactcttcattggcttaacctaaaaaccagaggtgcttttccttgtctgtgtgccagttgctggctgttttagttgcttgcccttcattttgctactgattttccttaatttgtgggaaggagtaggcaaagaatatgcttacatgattacacctgtaaagtaagcccaaacatcccaaatgtccatcaactgatgagtggattaataaaatgtttccatggaatattccttggattactcagccataaaaaggaatgaagtactgacacatgctgtgacatcagtgaaccctgaaaacatccttctcagtgaaacaagccagagagatgtacaaggctacagactgtatgattccatttatatgaaatatacatactaggcaaatccatggagatggaacatagattagtggttgccaggggatagaggagtaattgttagtgggcatgggatttgtttttgggaggttttgaaaatgttctggagttgaacaatagtaatggttgcatgatttggtaaaaatactaaaaactatggaattgtttaattatggtatatgaattaatttctttctttttttcttttttttttttttttttgacacggagtctcactctgtcgcccaggctggagtgcagtggtgtgatctcgtctcactgcaacctccgcctcccagattcaagcgattctcctgtctcagcctcctgagtagctgggattataggtacatgccatcacacctggctaatttttgtatttttagtagagatgaggtttcaccattttggccaggctgatcttgaactcctgacctcaggtgatccacccgcctcagcctcccaaagtgctgggattacaggtgggagccacaacacccggccatgaattaactccgttaaaaaataaacgtatacattctgtgagcaaatccat

SEQ ID NO: 49502 - DNA, 1832 bp, Homo sapiens
catagctgttcctgatgtacacttgtatccgcactaccgtagcgaccgtagtagggcgcaaaactcctctgtggcggagagcgtttcggggagcgtggtttcttcatcaagcctactgtctttggtggcgtgcaggatgacatgagaattgccaaagaggagatctttgggcctgtgcagcccctgttcaagttcaagaagattgaggaggtggttgagagggccaacaacaccaggtatggcctggctgcggctgtgttcacccgggatctggacaaggccatgtacttcacccaggcactccaggccgggaccgtgtgggtaaacacctacaacatcgtcacctgccacacgccatttggagggtttaaggaatctggaaacgggagggagctgggtgaggatgggcttaaggcctacacagaggtaaagacggtcaccatcaaggttcctcagaagaactcgtaagagcagctgtcagggaggcccagtcacagtccagcaattccacaaccaccttgaccaatgcttgccaagctgttttaaagccaagaacaccctttctttgttccaaattaactcttagaagaaaccccacaaataaagcaattcaatcaaggctgttctatttaaatcagagatggggaccaggctcagagttctacctatctaacccccaaccacagcccccttggtggcccatgagttgcttccatgaaatcttaggagtctctggaggacagattaaaaaccagtgatctgtaatttgtagctcttcctgctgatccaaggactttcccatgggtgcgcttgatggtttagtggatcgactcaactcagaacacaagcttggaaagtgttaggggttttgaactaggtggatactaaatctcggccccactcttcattggcttaacctaaaaaccagaggtgcttttccttgtctgtgtgccagttgctggctgttttagttgcttgcccttcattttgctactgattttccttaatttgtgggaaggagtaggcaaagaatatgcttacatgattacacctgtaaagtaagcccaaacatcccaaatgtccatcaactgatgagtggattaataaaatgtttccatggaatattccttggattactcagccataaaaaggaatgaagtactgacacatgctgtgacatcagtgaaccctgaaaacatccttctcagtgaaacaagccagagagatgtacaaggctacagactgtatgattccatttatatgaaatatacatactaggcaaatccatggagatggaacatagattagtggttgccaggggatagaggagtaattgttagtgggcatgggatttgtttttgggaggttttgaaaatgttctggagttgaacaatagtaatggttgcatgatttggtaaaaatactaaaaactatggaattgtttaattatggtatatgaattaatttctttctttttttcttttttttttttttttttgacacggagtctcactctgtcgcccaggctggagtgcagtggtgtgatctcgtctcactgcaacctccgcctcccagattcaagcgattctcctgtctcagcctcctgagtagctgggattataggtacatgccatcacacctggctaatttttgtatttttagtagagatgaggtttcaccattttggccaggctgatcttgaactcctgacctcaggtgatccacccgcctcagcctcccaaagtgctgggattacaggtgggagccacaacacccggccatgaattaactccgttaaaaaataaacgtatacattctgtgagcaaatccat

SEQ ID NO: 49503 - DNA, 395 bp, Homo sapiens
atcatgagaacagcagtatgggggtaaccatcttcatgattcagttacttcccatggggtctcttcacaacatgtggggattatggaaactgcaattcaagatggcattagcaaaccagattgctaagtaatcaccgtttttcaccaggtgacaatttctaccaaaaacctataataaaacattaagctaaaaagaaaagtgaactcatcatttcacaagctatgccttaaaagtcttacaaaatgtttacttgcttgtgtattagagtcagagactatttatggcagagattttgtatattagcaaaagaaaaataaaattattaacatgctttttagagtaagaaatgtatgacttgcagtttaatgcaatgttaataaatatgacactgctc

SEQ ID NO: 49504 - DNA, 514 bp, Homo sapiens
ttatgagaccactgttgtatatgatgtctgtcattgtctgaacgtcacatggcacataacagtagtttataatttccctgaataaactgcctttggaccaatttttgatcacttgtctcttgattagtcacaggcatgatcacagtcctattactcttgcatatctaggcacatggctctcatgcatactctagatccagaacacattaattgggggtaatactataaacatgttggagaaattatgggtatgatgcgtttggttatacttatacccataatctcactcatgcatgctctacctctatccaaatacaatagaatatcccaaatgagatattatctctcttattttgataactgagtcatatatgaaggtttttaactcagttataaatctataaatcaaattactttgtctatttatagaaactagtatgtttgcacattgacaggtgggttgaacccaaggaatgatgaatcctgaatttgtattcagtatgctaaaaaaaaa

SEQ ID NO: 49505 - DNA, 418 bp, Homo sapiens
tggggtatttgtattttaacttaattttgtaaggtttttatgttatggaaatatattgatctttatatgttttaggctttaatgtgtgtatgagcttcctaggttgccagagcaaattaccacaggcatgcctaaaacaacagaaatttatttcctcacagttatggaggccaaaagtctgaaatcaaggtgttagcagggtgattctccctcctaaggctcttagaggagaatccttcctggttctcccggcttctgctggctcctggtgttccttggcttgtagcagcagcactcacatctctctctgtgtgttcacgtggccttgtcctctgtgtctttgtctaaaattttcttctcttgtctgtgatacagacattggtcattgtgattagggtccctaaatccaggatggtct

SEQ ID NO: 49506 - DNA, 383 bp, Homo sapiens
  misc_feature (378)..(378): n is a, c, g, or t
ctcattgtccaaatgagtcactgaggctgagggattcaggctcagtgtatgcccacagttctttggcaaaccccaccactgggccagccaactacacggggattctgatcgggtcctgatgggtgcccatgatgggctgtgcaaaagtggtggtgagatttctccaccttcacggaggtggtacccaggggaggtggacttcagcagcgagaatgggctgggtgcagtggctcacagctgtaatcccagtgctttgggagttcgaggcaggagaattgcatgagctcagttgttcgagaccatgggagaccctgtctcgaattccaccacactggcggccgcaaggagaggacagcgattctcgtacgaacggttacngatcg

SEQ ID NO: 49507 - DNA, 607 bp, Homo sapiens
tctctcttgcaataaaaccgtccctccttttattcttatgggaggatcaaaggagtgaagagaaggctgaacctttttactgtctctatactcattcttatactttttgttttcattttcaaaacctttatttctattatccaaaattactttatcacttctgatctagaattaatttttatcttcttcccttgtaactaactcctctattttctcttattctcctctaacattttcattgtttttttcccccctatggttcttttcttacggctttgaaatgtacaggtaccagaataggtcttgggagagggatgggatagaacaagtgagtttgaagttgcaggtaggggcaacagtggttgggctcaggttcaatgatccttgctctcaagagaggcaaaaagcactatgccagagtctccgtggtggtctaaagggtgcctgagttttgtacttgttagagaaattaagtttactataaccaaaaaggtttaatgtttagaagttaaaagcaagtgaagaatgtctcattctgaaatagaccaaactcaaaagcctaagaatgcagggtgggaatgagcagaagttaggattccaaacaggt

SEQ ID NO: 49508 - DNA, 801 bp, Homo sapiens
taatcttttcgtatttttagtagagatggggttttgccatcttagccaggatggtctcgatctcctgacctcgtgatccgcctgtctcggcctcccaaagtgctgggattacaggttgtgagccactgcgcctggcctccagattgtatttgtcacagacattagaacgttggtcctttgcttaagtgcttccactatgcagcagtaaatatacagagtacaaatagctgagtaaagaagtcggtaataagtaattttcgttaccacataattgaaaaaagaacatactccattgatgatgaatgaacaatttgcctctgggtcactatccatagggaagttacctgttacttagtgtggtagattaagacccataaaggggaccgagttgcttttcacatgggtaagtgtggcaggtgccctattagatgatggcctcagaagcatgcttgttaaaattctaattgatattaactgggtcagtagattgggaatgtttggcacatactctctgcttttttaacttgatgtcatgaaggactacagttattttgcacagaatgttttccattgtcacagctatttagtatttattgagcagccaatatgttattgggtactatatatatgtatgtatacacacacacacacatatgtatatacacacacacagacataggacatttatatgtgtgtgtgtgtgtgtgtgtatatatatatataaaggatatgtgtatatatctcatttaatccttaccataaccctgtgagcagatgacactgctcctattttatatctga

SEQ ID NO: 49509 - DNA, 546 bp, Homo sapiens
tgtatgtttccagagagattttatgtgttattgatttctatttgggtaaaaagcgggtcattgcattccgttgttctctagaaagtccatactcagtcctatatccatagcaattgggctggtgtgttttttttcttcttcttcttttacatttacatttttatagtctctcataaaatggcttttttttttttttgagacaatctctctgttatctaggctggagtgcagtggcatgatcatagctcactgcagcctccaattcctggcctcaagcaatccttctacctcagcctcatgagtagttgggataacaggcatgagccagcttggctgcatgtttttgaaaataggtacccactcttaaatctgtttttcaggctcagtagtagtggtttaacttttaagatttccagtaattagataaattacttgaagcactcctagtattttttcgtatttcagacattaactctcccagctgtttatttttttactttcgtgttttaataaccctctatgactttaatttcaagaactgaagca

SEQ ID NO: 49510 - DNA, 708 bp, Homo sapiens
ctcagcacgtgctggtttcctcatcctagaacaatctgcctggttcttcgtcccaagctctcattacctcactatttttagcacatcagataagtacaccagctgggtttagggaggacccacagaagtgccggctcaagttccttgtcacgttctactcttgtgtacttggtgcattttttttttaatcatgagcttatacttgataataaattgtttttaaatgtatgagtttagaatgctcacatgagttgccttgtcatcccacttcagagactttgtcttaaaccagttctttgtcagaagttcagtggtgaagcttgatatcctgcccacgccctccccagtctggccttggcccccacatcctgtttttagcttccaaggggactggtcttctgtgtggcactagttgaaagttacagtgggggctgggcacggtggctcacgcctgtaatcccagcactttgggaggctgaggcgggcggatcacgaggtcaggagatcgagaccatcctggctaacacggtgagaccccgtctctactaaaaatacaaaaaattagccgggtgtagtggtgggtgcctgtagtcccagctactcgggagactaaggcaggagaatggcatgaacctgggaggcggagcttgcagggggcgagatcgtgccactgcactccagcctgggcaacagagcgagactctgtct

SEQ ID NO: 49511 - DNA, 303 bp, Homo sapiens
ccaagattagtgcttctactcttaccccttaccctcatagtctattctcaacacaacagctagaatgatccctttagagatataaatctgatcaagtagctcttgtgttcagaactctccagggctttcagtggtgaccggcaaaattgttgccataattgagaaggccctgcatggtaaggccccagctaccttttttatctggtctcttagcactctccccatcactcactctgaatcaacatagtgatctccttgctattcccatagcacctcaagcaggctcctgcctcagggcatttg

SEQ ID NO: 49512 - DNA, 480 bp, Homo sapiens
ggcgcatgcggctatttttaaccatctgcactgcagaatcatcatcaaagctgtagccaaggatttataaaatgggcaaggcaaccctccctctgagctgggaggtgtggggctaagggttatgaggaaaatccagtggaccaaatattgtattcatccagcctccctcaaccctctttcaggtggacagttccaagctccagagcatcctagaaggtagcccagaaagctgcatttagggctgatgaccccactactacccgtgttggcctatctggtcattgaaccaagggctttggcaaatctggttgaagaagtggcctcttgtgcctttaaagaggcttatctagctacatcctaccaccctggttatgttctcttggctcttgctggctgacacaaaaagaagttatggccaaaagtgggggttcacttaaagttccctctttaatattgttatattctataggaattttgtta

SEQ ID NO: 49513 - DNA, 475 bp, Homo sapiens
tatcattttaacatcatagaagaacatttaagacatgtttgtaagttgtaaataatgactccagttatagcatatatatctaagacgttagagaccagttattttctagagtgaaactgtctattgatgattgagaaaattgaattctttggtttttacatgtgggcaaatgttacataggggtataatctgtttaaataagctttatttatgccaaggattttttttttaatatcaagacttggttagaccaaagtttgctcttgcaggaatgccatttatcagcttctgaatgcccttctaactccattaccctcaagagtgtctgggtataggatgaagcattacaaaaagaaagcaccactgcagtcatgcctagtgtctgggagaaacaaaatggactagacctgcagtttaaaataatttaacccgagaaactcttcaaatgaattgtttcctaaagatgctcaaattt

SEQ ID NO: 49514 - DNA, 199 bp, Homo sapiens
  misc_feature (140)..(140): n is a, c, g, or t
  misc_feature (142)..(142): n is a, c, g, or t
cacatgtattacatcacccagttttcatggcaacctgtaacacaggtattagtttcattttatagataaactgtggctcacagaagttgaggacgttttataattcactgaacaagtacctcttggcctttggccatgtnanactctttagataatgagattcagaaaagagaattcacttaaaaaatgttaagaaaac

SEQ ID NO: 49515 - DNA, 808 bp, Homo sapiens
cattctgtgtgtaacttctgtacctcatctgcagagcctggctagccatctcccctcccttaccgtcttctgtatactgactgcctttcagagttattattcattatctctgtacctgggaaataacttttaaggaaaaaaataaaataaaaacgctattttgaaaaaaaaaagccgccttctttctgatggattgtaggtccatgcaggtttttggttacagctccctgagatagatgtaaatcctaagcattgtgggtgttttggtttgatgggactggattgaaagatttacagacttaaattgtaaaggaaggtaatttagagagaggaaggaaataaacattatgttggtttggttataaccactggcttgtctccactgacatggcctgggggtgagtggtgtatttgcaaagctcctttcaggtctgcattaatctctggcattagttggctgtgaccgattagcctcccagttaaagtatgtagtcagttcttagtgatggtaaatgggttactgaggccttcttattacatccaattatgaggtgactatataatttatcttgcaaactgttgagtgtgttctaaacagtatgctgtgggggcgctatcactaattatgctggacctgttagagtatgatccccctatccaagcagaaaaatgtgaatccccaaactctttccctgcttacgcaaagcaatgaatggtcatttcttagggtcaccagccctttgagaatctgataatagttgtggattgccagccatgcgtggattgcgagccatgcgtggattgccag

SEQ ID NO: 49516 - DNA, 540 bp, Homo sapiens
aaaagcaattcatgtacccttgaagattagattaagttctataaaatagcccaaaatgacagtggctgaaacaagtttatttctctcccatttaaagcaagtctagatgtggaagtctgggaagcccagaaaatccaggtcttgtttgtgtatggaaactccagaaaatcacagattccttccagccacccctcaattacccctgggatccaagagagccactaaagttccagccatcatactcacaacccaagttgtaggatggaaaaaaggacacaaaagtagggtgaagagcatgtgtgcaacagctctcttttactctagtgtcctaaaacctatcataaaacctttggcttgccttgcattagccagaatttagtacatggccacacttaagaagtcagaaagattagctttttttccagggtagttggctgaaaatcaggagttctcatattaaaaaacagagaagggacatcgaatagatgaccaacaatctccttcacactcatactatttaaactgtcctagtcaatgacc

SEQ ID NO: 49517 - DNA, 318 bp, Homo sapiens
tcagcctcccgaactgggattacaggtgtgtaccaccatgcctggctaattttttatatttttagtagagagagggtttcaccatgttggccaggctggtctcgagctcctgaccttaggtgatctgcctgcctcagcctctcaaagtgctgggactacaggcataagccactgcgcctggccaaaaatatgaatacatttggctatttccaccctttctgttaatcccaaggatcttcaacttttattcttctctttaagatagtgagtcctggaaataaaagtgaaaatgaacagttctaaaaggttagtatttta

SEQ ID NO: 49518 - DNA, 282 bp, Homo sapiens
caggctccagaacaccgactactcaggttcaaatcccagctcagccactcactctgtgtgatactgagtgaagtgctttaccacttgtccctcagttttcttaccttacccacaaaatgaaataataactgtatctaccataaagtgttattttttaaataaaaaattaacagacacataataaactgtcaataaatgttatctatgattattgtcttgagagtaagtgggagagttattgaaagatttcaagaagcaaagtaacaggtttggagctgaact

SEQ ID NO: 49519 - DNA, 562 bp, Homo sapiens
aattatgataactagagattgaagtggaataactgtaatgttctttgagaactttaaacttacttcttttcatgtctttcaaatacttccctagtggtagatattttggacctagatcaattgggagtagagaaaaggagatggaaggaaggaaaggaaataacttttattgaatgtctgttctgcagcaggcactgagtaaggtttgtcatagtcatatattgtagcttgctgtcgctttcatagcagtattatgaattagtaatgcactctctatttgaacggatgaggatagactcttcagagtggccaggttacatgtccagagcaagattcaaacccaggtcttctgatttcaaatcttatgctcttaaacaattcaaattcattttgtatccttctttatatcttattgtttagggttggatgtcgttttcatggtatcacacacctgccttgaatcaaagggaaagtaaaaagtcaaaatccaaacccctcccattggagatatttcactgtcaaattcagatgttagccacagaatgaggccacacttgataaa

SEQ ID NO: 49520 - DNA, 3589 bp, Homo sapiens
aaaagggcagctccgggggaaagagggtggcgtcccggggaagcccgcagccgccgccgatgtcgctgggactcggaagtgccgaaagaggggtgttgggaactcgcggcgcgcgtgaacgttgccgtcgccgccgcccgggacagcccggagaaactctcagcgtaggcatcgggaaccttcgtgccaaggagccatgccgccccgatgggaactggcactttacctacttgcctcactaggcttccacttctattccttctatgaagtttacaaagtctccagagaacacgaagaggagctggaccaggaatttgagctggagactgacactttatttggaggattaaagaaggatgcgaccgactttgagtggagcttctggatggaatgggggaagcagtggctggtgtggcttctccttggccacatggtagtgtctcaaatggccacactgctggcaagaaagcacagaccctggattctcatgctctatgggatgtgggcctgctggtgtgtgctggggacccctggtgtggctatggttttgctccataccaccatctctttctgcgtggcccagttccggtctcagctcctgacgtggctctgttctctcctcctcctctccacactgaggctgcagggtgtggaagaagttaagagaaggtggtacaagacagaaaacgagtactacctgctgcagttcacgctgaccgttcgctgcctctactacaccagcttcagcctggagctctgctggcagcagctgcctgctgcatcgacctcctactcctttccctggatgctggcctatgtcttttattatccagtcttacacaatgggcccatcctcagcttctcggagttcatcaaacagatgcagcagcaggagcatgactccctgaaggccagcctgtgtgtcctggccctggggctgggccgccttctttgctggtggtggctggccgagctgatggctcacctgatgtacatgcatgccatctacagcagcatccccctcctggagactgtctcttgttggaccttaggaggactggcgttagcccaggtgctctttttctacgtgaagtacttggtgctctttggcgtgcctgctctgctcatgcgcctggatggactcactccacccgccctcccccgctgcgtgagcaccatgttcagtttcaccgggatgtggaggtattttgatgttggactgcataatttcttaatcaggtatgtgtacattccagtgggcgggtcccagcatggcctgctggggacactgttttccacggcgatgacatttgcatttgtgagctactggcatggcggctacgactacctctggtgctgggcagcgctcaactggctgggagtcactgtggagaatggagtccggaggctggtggagactccctgcatccaggacagtctggcccgatacttctccccacaagctcgccgtcgattccacgctgcccttgcttcttgttccacctcgatgctgatcctgtccaacctggtatttcttgggggcgatgaggttgggaaaacctactggaataggatcttcatacaaggctggccttgggtgaccctctctgtcctgggattcctgtactgctactcccacgtgggcattgcctgggcccagacctacgccacggactaatgctgttgggcccaggccagtcattgttgctggcctccaaggcaaatagtgcttcaccctgacctctcactccaggacagcctctaagggatttgatctgctcatcttcagttgaatgccctcactccaagactggatgctggatctcatagaaaattcacagccagacaatcttctaatctggagtctttgagatcttctaccccaactcatcattttcctattgaggaaacgggtccagggcagtcgtgtgtcttacccagctacacagggtgacattttggtctagaacctagtctcatgagccctttgcattctttccccttaagcaagaatagaatgtagtggaaatttattgattgagacacagaaatcctgattagtgataggcctgtcttctgggcaatatttctaaaatatttgagtgacattgatgtttaagtgacctccttcatcacatcctgcagtatctccagaagcagcactagggtttgagtttcatgcttcagcccctctgtaggaatgagaccaagccacagctgtcttttgaattacgtagtcgaagaagacggtagcagccctgtagcattctaaggcatctatacccaaggagtcctgtgatttgagcttcagcagggtgatctacatttgggtgcttgtttctgagatttgcagagaagtataacatggtagttcctctaacttacagttaatcgttgcttaataaagaagcagaatttagaaaccacaggatagtgtacccacagatgggtgttatcaaggccagtcatgaggatggtgtcctggagtcttgtccaccctctccatacaagtctcaaaagtcatcctcctactcagtgattcacgtttagtggtttatattattaaggtttgattcaaacagagccttttctgtcctgtagataatctacatgtttgtagaattattttgaatatgtttgaggaaaatgtttaaaatctaaatatactcacataacttgattattcactcctctgaaaagatgctggataggctaccaaagttcccaagtggtagataattcagaagacttgtttgaatttggatttttttttttttgggagtggggaagggtataaaggaggcttaaaatttgaatccataatatatctaattacgggagaatttacaacatctcaagtacgtaaattaagttgtcattgagtgaaaggttcacttggacctagtgctgcctcctgtttattacatagcatggcccttatgtcttgagttgaggttatcatctcaatgaggcttaagctcctagagtacaggaccattttgttgattgtctttcttcatagcttctctgcttggcaaagagatgggagggggccagatactgactacctggggtaggcacattatgtgttaaagcaagacagaggccagagaggggcaggtagacctgcatagcagcagcctcagcagctgtcttggtaaaggagagagagagacatggggccagtaattccggggtgctcagaagttttaggagggaatgagcctcagggaggagtgagcacctaaatgaacgcagtaaaccttcatggaccaacagtgattgaggatttgtgggcagccagagggagtctgactgaagtttacttggaaagaaagggcttgctaagaaaaaagggagtaaaaatgatgatagggaagtgtctaatgtatgtgcacatataagtaatacaaaagttttgagctcttccaagtataccatttatatacaaacaaataggtttattcattcattaaactactttggaagcgtcagtggatatatttgaaagtggtaatcctgaatctcttttaaactattatatgattcataatggttctcaggaattaataaatgattactgtgttta

SEQ ID NO: 49521 - DNA, 3394 bp, Homo sapiens
aaaagggcagctccgggggaaagagggtggcgtcccggggaagcccgcagccgccgccgatgtcgctgggactcggaagtgccgaaagaggggtgttgggaactcgcggcgcgcgtgaacgttgccgtcgccgccgcccgggacagcccggagaaactctcagcgtaggcatcgggaaccttcgtgccaaggagccatgccgccccgatgggaactggcactttacctacttgcctcactaggcttccacttctattccttctatgaagtttacaaagtctccagagaacacgaagaggagctggaccaggaatttgagctggagactgacactttatttggaggattaaagaaggatgcgaccgactttgagtggagcttctggatggaatgggggaagcagtggctggtgtggcttctccttggccacatggtagtgtctcaaatggccacactgctggcaagaaagagaaggtggtacaagacagaaaacgagtactacctgctgcagttcacgctgaccgttcgctgcctctactacaccagcttcagcctggagctctgctggcagcagctgcctgctgcatcgacctcctactcctttccctggatgctggcctatgtcttttattatccagtcttacacaatgggcccatcctcagcttctcggagttcatcaaacagatgcagcagcaggagcatgactccctgaaggccagcctgtgtgtcctggccctggggctgggccgccttctttgctggtggtggctggccgagctgatggctcacctgatgtacatgcatgccatctacagcagcatccccctcctggagactgtctcttgttggaccttaggaggactggcgttagcccaggtgctctttttctacgtgaagtacttggtgctctttggcgtgcctgctctgctcatgcgcctggatggactcactccacccgccctcccccgctgcgtgagcaccatgttcagtttcaccgggatgtggaggtattttgatgttggactgcataatttcttaatcaggtatgtgtacattccagtgggcgggtcccagcatggcctgctggggacactgttttccacggcgatgacatttgcatttgtgagctactggcatggcggctacgactacctctggtgctgggcagcgctcaactggctgggagtcactgtggagaatggagtccggaggctggtggagactccctgcatccaggacagtctggcccgatacttctccccacaagctcgccgtcgattccacgctgcccttgcttcttgttccacctcgatgctgatcctgtccaacctggtatttcttgggggcgatgaggttgggaaaacctactggaataggatcttcatacaaggctggccttgggtgaccctctctgtcctgggattcctgtactgctactcccacgtgggcattgcctgggcccagacctacgccacggactaatgctgttgggcccaggccagtcattgttgctggcctccaaggcaaatagtgcttcaccctgacctctcactccaggacagcctctaagggatttgatctgctcatcttcagttgaatgccctcactccaagactggatgctggatctcatagaaaattcacagccagacaatcttctaatctggagtctttgagatcttctaccccaactcatcattttcctattgaggaaacgggtccagggcagtcgtgtgtcttacccagctacacagggtgacattttggtctagaacctagtctcatgagccctttgcattctttccccttaagcaagaatagaatgtagtggaaatttattgattgagacacagaaatcctgattagtgataggcctgtcttctgggcaatatttctaaaatatttgagtgacattgatgtttaagtgacctccttcatcacatcctgcagtatctccagaagcagcactagggtttgagtttcatgcttcagcccctctgtaggaatgagaccaagccacagctgtcttttgaattacgtagtcgaagaagacggtagcagccctgtagcattctaaggcatctatacccaaggagtcctgtgatttgagcttcagcagggtgatctacatttgggtgcttgtttctgagatttgcagagaagtataacatggtagttcctctaacttacagttaatcgttgcttaataaagaagcagaatttagaaaccacaggatagtgtacccacagatgggtgttatcaaggccagtcatgaggatggtgtcctggagtcttgtccaccctctccatacaagtctcaaaagtcatcctcctactcagtgattcacgtttagtggtttatattattaaggtttgattcaaacagagccttttctgtcctgtagataatctacatgtttgtagaattattttgaatatgtttgaggaaaatgtttaaaatctaaatatactcacataacttgattattcactcctctgaaaagatgctggataggctaccaaagttcccaagtggtagataattcagaagacttgtttgaatttggatttttttttttttgggagtggggaagggtataaaggaggcttaaaatttgaatccataatatatctaattacgggagaatttacaacatctcaagtacgtaaattaagttgtcattgagtgaaaggttcacttggacctagtgctgcctcctgtttattacatagcatggcccttatgtcttgagttgaggttatcatctcaatgaggcttaagctcctagagtacaggaccattttgttgattgtctttcttcatagcttctctgcttggcaaagagatgggagggggccagatactgactacctggggtaggcacattatgtgttaaagcaagacagaggccagagaggggcaggtagacctgcatagcagcagcctcagcagctgtcttggtaaaggagagagagagacatggggccagtaattccggggtgctcagaagttttaggagggaatgagcctcagggaggagtgagcacctaaatgaacgcagtaaaccttcatggaccaacagtgattgaggatttgtgggcagccagagggagtctgactgaagtttacttggaaagaaagggcttgctaagaaaaaagggagtaaaaatgatgatagggaagtgtctaatgtatgtgcacatataagtaatacaaaagttttgagctcttccaagtataccatttatatacaaacaaataggtttattcattcattaaactactttggaagcgtcagtggatatatttgaaagtggtaatcctgaatctcttttaaactattatatgattcataatggttctcaggaattaataaatgattactgtgttta

SEQ ID NO: 49522 - DNA, 3787 bp, Homo sapiens
  misc_feature (3407)..(3407): n is a, c, g, or t
  misc_feature (3461)..(3462): n is a, c, g, or t
  misc_feature (3492)..(3493): n is a, c, g, or t
aaaagggcagctccgggggaaagagggtggcgtcccggggaagcccgcagccgccgccgatgtcgctgggactcggaagtgccgaaagaggggtgttgggaactcgcggcgcgcgtgaacgttgccgtcgccgccgcccgggacagcccggagaaactctcagcgtaggcatcgggaaccttcgtgccaaggagccatgccgccccgatgggaactggcactttacctacttgcctcactaggcttccacttctattccttctatgaagtttacaaagtctccagagaacacgaagaggagctggaccaggaatttgagctggagactgacactttatttggaggattaaagaaggatgcgaccgactttgagtggagcttctggatggaatgggggaagcagtggctggtgtggcttctccttggccacatggtagtgtctcaaatggccacactgctggcaagaaagagaaggtggtacaagacagaaaacgagtactacctgctgcagttcacgctgaccgttcgctgcctctactacaccagcttcagcctggagctctgctggcagcagctgcctgctgcatcgacctcctactcctttccctggatgctggcctatgtcttttattatccagtcttacacaatgggcccatcctcagcttctcggagttcatcaaacagatgcagcagcaggagcatgactccctgaaggccagcctgtgtgtcctggccctggggctgggccgccttctttgctggtggtggctggccgagctgatggctcacctgatgtacatgcatgccatctacagcagcatccccctcctggagactgtctcttgttggaccttaggaggactggcgttagcccaggtgctctttttctacgtgaagtacttggtgctctttggcgtgcctgctctgctcatgcgcctggatggactcactccacccgccctcccccgctgcgtgagcaccatgttcagtttcaccgggatgtggaggtattttgatgttggactgcataatttcttaatcaggtatgtgtacattccagtgggcgggtcccagcatggcctgctggggacactgttttccacggcgatgacatttgcatttgtgagctactggcatggcggctacgactacctctggtgctgggcagcgctcaactggctgggagtcactgtggagaatggagtccggaggctggtggagactccctgcatccaggacagtctggcccgatacttctccccacaagctcgccgtcgattccacgctgcccttgcttcttgttccacctcgatgctgatcctgtccaacctggtatttcttgggggcgatgaggttgggaaaacctactggaataggatcttcatacaaggctggccttgggtgaccctctctgtcctgggattcctgtactgctactcccacgtgggcattgcctgggcccagacctacgccacggactaatgctgttgggcccaggccagtcattgttgctggcctccaaggcaaatagtgcttcaccctgacctctcactccaggacagcctctaagggatttgatctgctcatcttcagttgaatgccctcactccaagactggatgctggatctcatagaaaattcacagccagacaatcttctaatctggagtctttgagatcttctaccccaactcatcattttcctattgaggaaacgggtccagggcagtcgtgtgtcttacccagctacacagggtgacattttggtctagaacctagtctcatgagccctttgcattctttccccttaagcaagaatagaatgtagtggaaatttattgattgagacacagaaatcctgattagtgataggcctgtcttctgggcaatatttctaaaatatttgagtgacattgatgtttaagtgacctccttcatcacatcctgcagtatctccagaagcagcactagggtttgagtttcatgcttcagcccctctgtaggaatgagaccaagccacagctgtcttttgaattacgtagtcgaagaagacggtagcagccctgtagcattctaaggcatctatacccaaggagtcctgtgatttgagcttcagcagggtgatctacatttgggtgcttgtttctgagatttgcagagaagtataacatggtagttcctctaacttacagttaatcgttgcttaataaagaagcagaatttagaaaccacaggatagtgtacccacagatgggtgttatcaaggccagtcatgaggatggtgtcctggagtcttgtccaccctctccatacaagtctcaaaagtcatcctcctactcagtgattcacgtttagtggtttatattattaaggtttgattcaaacagagccttttctgtcctgtagataatctacatgtttgtagaattattttgaatatgtttgaggaaaatgtttaaaatctaaatatactcacataacttgattattcactcctctgaaaagatgctggataggctaccaaagttcccaagtggtagataattcagaagacttgtttgaatttggatttttttttttttgggagtggggaagggtataaaggaggcttaaaatttgaatccataatatatctaattacgggagaatttacaacatctcaagtacgtaaattaagttgtcattgagtgaaaggttcacttggacctagtgctgcctcctgtttattacatagcatggcccttatgtcttgagttgaggttatcatctcaatgaggcttaagctcctagagtacaggaccattttgttgattgtctttcttcatagcttctctgcttggcaaagagatgggagggggccagatactgactacctggggtaggcacattatgtgttaaagcaagacagaggccagagaggggcaggtagacctgcatagcagcagcctcagcagctgtcttggtaaaggagagagagagacatggggccagtaattccggggtgctcagaagttttaggagggaatgagcctcagggaggagtgagcacctaaatgaacgcagtaaaccttcatggaccaacagtgattgaggatttgtgggcagccagagggagtctgactgaagtttacttggaaagaaagggcttgctaagaaaaaagggagtaaaaatgatgatagggaagtgtctaatgtatgtgcacatataagtaatacaaaagttttgagctcttccaagtataccatttatatacaaacaaataggtttattcattcattaaactactttggaagcgtcagtggatatatttgaaagtggtaatcctgaatctcttttaaactattatatgattcataatggttctcaggaattaataaatgattactgtgtttaaaaaaaaaaaaanaaaaaaaaaaaaaaaaaaaaaaaaaaaaaaaaaaaaaaaaaaaaaaaaaaaaannttttaaaaaaaaaaaaaaaaaaaaaaaaanncctttgttggcccctttggcccaattaatttttaacttgaaaaagttttttttttgggcccaaatttgggtttatttggccaattcccccttatgggaggggtttaaaattacagggccgggttttaaaaaatgtaaattggaaaaccctggggtccccatttaatagcctttggaaatatcccttttgcaggtgggaatataaaaaaagccccccacatacccttccaaaattgtgcaccctgatgggaaaggaaattgaaccttaaattttggaaaacccgtaaatttttaa

SEQ ID NO: 49523 - DNA, 3625 bp, Homo sapiens
cgcgcagtgcgcccgggcaaaggcggggatctaggcgccgggacaagtccgcgcacggccctgcccacgtcctctctccttggcttcgtccccagcttccggaactgctgcggggagttgcgaactctggtcctcttggcagtatcggcggtgcgcctgcctgcctgctgtgactccagggactctaaaaaactctcagcgtaggcatcgggaaccttcgtgccaaggagccatgccgccccgatgggaactggcactttacctacttgcctcactaggcttccacttctattccttctatgaagtttacaaagtctccagagaacacgaagaggagctggaccaggaatttgagctggagactgacactttatttggaggattaaagaaggatgcgaccgactttgagtggagcttctggatggaatgggggaagcagtggctggtgtggcttctccttggccacatggtagtgtctcaaatggccacactgctggcaagaaagcacagaccctggattctcatgctctatgggatgtgggcctgctggtgtgtgctggggacccctggtgtggctatggttttgctccataccaccatctctttctgcgtggcccagttccggtctcagctcctgacgtggctctgttctctcctcctcctctccacactgaggctgcagggtgtggaagaagttaagagaaggtggtacaagacagaaaacgagtactacctgctgcagttcacgctgaccgttcgctgcctctactacaccagcttcagcctggagctctgctggcagcagctgcctgctgcatcgacctcctactcctttccctggatgctggcctatgtcttttattatccagtcttacacaatgggcccatcctcagcttctcggagttcatcaaacagatgcagcagcaggagcatgactccctgaaggccagcctgtgtgtcctggccctggggctgggccgccttctttgctggtggtggctggccgagctgatggctcacctgatgtacatgcatgccatctacagcagcatccccctcctggagactgtctcttgttggaccttaggaggactggcgttagcccaggtgctctttttctacgtgaagtacttggtgctctttggcgtgcctgctctgctcatgcgcctggatggactcactccacccgccctcccccgctgcgtgagcaccatgttcagtttcaccgggatgtggaggtattttgatgttggactgcataatttcttaatcaggtatgtgtacattccagtgggcgggtcccagcatggcctgctggggacactgttttccacggcgatgacatttgcatttgtgagctactggcatggcggctacgactacctctggtgctgggcagcgctcaactggctgggagtcactgtggagaatggagtccggaggctggtggagactccctgcatccaggacagtctggcccgatacttctccccacaagctcgccgtcgattccacgctgcccttgcttcttgttccacctcgatgctgatcctgtccaacctggtatttcttgggggcgatgaggttgggaaaacctactggaataggatcttcatacaaggctggccttgggtgaccctctctgtcctgggattcctgtactgctactcccacgtgggcattgcctgggcccagacctacgccacggactaatgctgttgggcccaggccagtcattgttgctggcctccaaggcaaatagtgcttcaccctgacctctcactccaggacagcctctaagggatttgatctgctcatcttcagttgaatgccctcactccaagactggatgctggatctcatagaaaattcacagccagacaatcttctaatctggagtctttgagatcttctaccccaactcatcattttcctattgaggaaacgggtccagggcagtcgtgtgtcttacccagctacacagggtgacattttggtctagaacctagtctcatgagccctttgcattctttccccttaagcaagaatagaatgtagtggaaatttattgattgagacacagaaatcctgattagtgataggcctgtcttctgggcaatatttctaaaatatttgagtgacattgatgtttaagtgacctccttcatcacatcctgcagtatctccagaagcagcactagggtttgagtttcatgcttcagcccctctgtaggaatgagaccaagccacagctgtcttttgaattacgtagtcgaagaagacggtagcagccctgtagcattctaaggcatctatacccaaggagtcctgtgatttgagcttcagcagggtgatctacatttgggtgcttgtttctgagatttgcagagaagtataacatggtagttcctctaacttacagttaatcgttgcttaataaagaagcagaatttagaaaccacaggatagtgtacccacagatgggtgttatcaaggccagtcatgaggatggtgtcctggagtcttgtccaccctctccatacaagtctcaaaagtcatcctcctactcagtgattcacgtttagtggtttatattattaaggtttgattcaaacagagccttttctgtcctgtagataatctacatgtttgtagaattattttgaatatgtttgaggaaaatgtttaaaatctaaatatactcacataacttgattattcactcctctgaaaagatgctggataggctaccaaagttcccaagtggtagataattcagaagacttgtttgaatttggatttttttttttttgggagtggggaagggtataaaggaggcttaaaatttgaatccataatatatctaattacgggagaatttacaacatctcaagtacgtaaattaagttgtcattgagtgaaaggttcacttggacctagtgctgcctcctgtttattacatagcatggcccttatgtcttgagttgaggttatcatctcaatgaggcttaagctcctagagtacaggaccattttgttgattgtctttcttcatagcttctctgcttggcaaagagatgggagggggccagatactgactacctggggtaggcacattatgtgttaaagcaagacagaggccagagaggggcaggtagacctgcatagcagcagcctcagcagctgtcttggtaaaggagagagagagacatggggccagtaattccggggtgctcagaagttttaggagggaatgagcctcagggaggagtgagcacctaaatgaacgcagtaaaccttcatggaccaacagtgattgaggatttgtgggcagccagagggagtctgactgaagtttacttggaaagaaagggcttgctaagaaaaaagggagtaaaaatgatgatagggaagtgtctaatgtatgtgcacatataagtaatacaaaagttttgagctcttccaagtataccatttatatacaaacaaataggtttattcattcattaaactactttggaagcgtcagtggatatatttgaaagtggtaatcctgaatctcttttaaactattatatgattcataatggttctcaggaattaataaatgattactgtgttta

SEQ ID NO: 49524 - DNA, 279 bp, Homo sapiens
ctgctaaggaactattattcctgtgtggggaaagagagagattgcttgattgattgaggggaatcttagcaacaacagattgattgtcctcttcacagataacttcctaatacacattccataaattacagttttactaggaaagacatagggcattatattcctctttgcaaatacttttttatagaaataagccttagtataactttctttattagataattgaactcactttcttgagggaatgaaagaaaaagcatttatttcatgatgaggggc

SEQ ID NO: 49525 - DNA, 323 bp, Homo sapiens
cttccttgtgtacatcttgtttccaaaagaagtagccagctcttcgtggacaggaactgtgtcttacttttttgccatccctcacctcaggcagcactgccaagagcattcacagtgactgtggaactccgttgattgaatgttggcttgagtaagttcctgatgtaggggctgtagcggttggaatcaagcttctgcaatactcaagtagtcctactgaattacagtactgtcagaccccctctgcacaaccctgaagtgggtcagaactccacactgtgccataaagaggaaagctgtcaacagggaggtctaaggaaaca

SEQ ID NO: 49526 - DNA, 548 bp, Homo sapiens
ccattatttccaatcaacagagaaaaagatggaggcctagacaggttgaataagttgtctaaggtaagtgctaagtggtttggctagtaggtaacaattgaatgttacactgaaatgtacaatccatatgtgctgtagaaattctgagaaacagaaaacgatttggatttggattaagtggtcagagctgtcatagaaaagttatggcttgaactgagtatcattaaggtaaaggatttaaggtttgataaaataaatcagaactgtaggatggaagagccattatgagcccagcaatgaaactggagtgatcatggcctctatgtggccagtatcccagggtgcttggcagaatagtgggagagaaggctggagaggaggcttagccaaagaaaagaagtttgatgaaactgctttttctcacaagaccttatgggatttacttcacctagctttttgtctccagctacttctgcctccttccacatgacgcatacattagctacgctcaattgatatttattgaatgcctactgtgtacaaagtac

SEQ ID NO: 49527 - DNA, 369 bp, Homo sapiens
agagtcatatggtaagtgttttttaatttttcaagaaacttccaaactgctttccaaggtaatcgtaacattttacatgcccaccagtaatttatgagcatttcagctgttctacatcctcactgtcttagtttgttttgtgttgctataatagaaatctaagactgggtgattaataaagaaaagaagtttatttcttacagttctggaggctgggaagtccagggtggagggaacatatctggtagggacttcttgctggtagagactctctgcaaaatcctaggtggcacagggcatcacatggcaagggaggctcctgagagagccaaacaggctttcataacagatccactctcatgataaata

SEQ ID NO: 49528 - DNA, 861 bp, Homo sapiens
tatctctcaatcatgaaggtcaggaatttgggcaagtcttggcaattcttctcttaaatgtagcatcatcagctaatggtattcagctaataggtgggcaggactggaggattctaagcagctttatttacacgtccggtgatttggctaggaaggctggaaggctaagctcagttgggcctatgtctgcgccatggtctttccagcatgacggttttagggtagttggaatctgagcagaagctataaagctttttatgacgttctaagatccaagccttgttctgtagtcaaacaagtcttactaaggtcacctgaatttaatgtagaggaatttggaggaataaccaagaataactaataccacacaaggttattagagtttttttttctgttcctgattgttgcttttaggagaatgtcattagttcttggcttcttagggaatcttttccttatccctcccatctgaaggggattccctgtagtagagggatatcatgtacttctttttcagttcacttttataataatatttttccccatgacagtggttcccaactgggggaatcactctccaggggcatttggcagtgtctggagacatttttggttgtcacaacaggtggaaaggggtactgttcgtgtctagtggatagaggccaaggatgctgctaaatatcccacaatgcacaggacagtgcctgcaagaaagtactatctgggctgggtgcagtggctcattcctgtaattccagtaatcccagcactttgggaagccaaagcaagaggagcacttgagtccaggagttcgagactagcctgggaaacatatagaccctgcctttacaaaaaaaaaaa

SEQ ID NO: 49529 - DNA, 380 bp, Homo sapiens
agtttcttatatgctattagggtcagatgcatgcatgcacaggttgggggtgagcccaggagtccataaacaactttatagggttactttcccaaactccttttctgtgctctccatgatacttcctggttccctaggactcacctttccaaaccttcgaacagaaaccacccaattctgcggctgtgccatgaatgacaaggtggcaagaggacagagaaaaaaaatgtgacaggttttggttttgtgctcctagagtcctggcttcctcaaataaagaatggttctctgctctcactgttttggctcctgcatgttcctgttacctgctgctcctgttacctccagaactgtcggcgtgctggtgcaagagaaggggg

SEQ ID NO: 49530 - DNA, 512 bp, Homo sapiens
gataattttgatgtttcatggacatttctaataagagcataaggagcctgcatcttcctgttacccacagtggggaactaatgcttcagcctggtggagttctcgctggatcgtgtaggagccacagacttagccagactgcctaacttcatatcttggctttgcgagggcaagttgctccacttctttgagtcactttttatctctttcaaaatggagacgataataatggtttctttaaagggttgttaaatgattaaatgattaatatatgtaaagtgctcagaacagtgtacataataagcactatagaagtgtaggctgttgttactgcacagtacttgaataagctacaaatgtcacttttaaattatctagttcttcaggaatataacatcatgaagaatatatggacttcgaagcagaagttgtgaatttcttattttaacctaagttgtatttctttttccaaccttatttctttcccccttttaaatcagtttcaattgttt

SEQ ID NO: 49531 - DNA, 1739 bp, Homo sapiens
ggccgagcctcggcggcggcggtagcggcggcggcgacgctgacacctcccaccatggacagcttcgacttagccctgctccaggaatgggacctcgagtcactgtgtgtctatgaaccagatagaaatgcattacggaggaaagaacgagaaagaagaaatcaagaaactcaacaggatgatggcacgtttaattctagttactctctcttcagtgagccctacaagactaacaagggggatgaactctccaaccggatccagaacactttaggcaattatgatgaaatgaaagactttttaactgatagaaccaatcagagtcatctcgttggagttcccaaacctggggttcctcagactcctgtgaacaagatcgatgaacattttgttgcagattcaagagcccagaaccagccctcgtctatctgtagcactacaacttccacaccagcagctgtccccgtgcagcagagtaaaagaggcactatgggctggcagaaggctgggcacccaccctctgacggccaacagagagcaacacaacagggctctctcaggaccttgcttggagatggtgttggcagacagcagcctcgggccaaacaagtgtgcaatgtggaggtgggccttcagacccaggagaggccacctgccatggcggccaagcacagcagcagcggacactgtgttcagaactttcctccatccctagcttcaaaacccagcctggtccagcagaaaccgaccgcgtatgtgaggccaatggacggccaagatcaggcccctgatgagtctcctaagctgaagtcgtcttcggaaaccagcgtgcactgcacatcatacaggggagtccctgccagcaagccggagcctgccagagccaaggccaagctctccaagttcagcatccccaagcagggggaggagagtagatctggagaaaccaacagctgtgttgaagaaataatccgggtaagattattctttaaacagtcttatcaatctgtgggacatagactctaaatagaaaggaaacctgcggctccatgataaaggagcccatagtctgtggtttgacatttaccttttctgagagtagtcacataagtttttgaaacaacacttctgttaacaatctaggagctgcaccccctctgggcacctctgcacaggctgaggtgacaccctattaaagtgatcagctggaagacagaagaacagaatttagatgaaaaatatgctggtgctcacatgtggatgccccatttatcaccctgctatttaaaagcatcctttaatagtctgtacatttttttgagtcaggcaggggttgcctggttatttttcctgtaaacttaattggaatcagaagcacttgacaaagaggtaatgttcaggatctggaactgttatttctctattgtttcacatgttattttccctgtcaccctctgtgagcccgtccttttcatcaccgttgtgtctagtgtgggttccctccctgaaccagtttcgtgcccagattgacttaggttgggctgttccaccacatcagtgttttcccaaatattcagacatataatcaggatgtcgtcatcaacccatattttttcttcactcatattttttcaggggagttacctaataatttatagttctcaaaaagctgatactacactgggcaaaacaccaagacaaattaggccagatggtatgaattttactgtaaaaaaaaa

SEQ ID NO: 49532 - DNA, 1417 bp, Homo sapiens
ggccgagcctcggcggcggcggtagcggcggcggcgacgctgacacctcccaccatggacagcttcgacttagccctgctccaggaatgggacctcgagtcactgtgtgtctatgaaccagatagaaatgcattacggaggaaagaacgagaaagaagaaatcaagaaactcaacaggatgatggcacgtttaattctagttactctctcttcagtgagccctacaagactaacaagggggatgaactctccaaccggatccagaacactttaggcaattatgatgaaatgaaagactttttaactgatagaaccaatcagagtcatctcgttggagttcccaaacctggggttcctcagactcctgtgaacaagatcgatgaacattttgttgcagattcaagagcccagaaccagccctcgtctatctgtagcactacaacttccacaccagcagctgtccccgtgcagcagagtaaaagaggcactatgggctggcagaaggctgggcacccaccctctgacggccaacagagagcaacacaacagggctctctcaggaccttgcttggagatggtgttggcagacagcagcctcgggccaaacaagtgtgcaatgtggaggtgggccttcagacccaggagaggccacctgccatggcggccaagcacagcagcagcggacactgtgttcagaactttcctccatccctagcttcaaaacccagcctggtccagcagaaaccgaccgcgtatgtgaggccaatggacggccaagatcaggcccctgatgagtctcctaagctgaagtcgtcttcggaaaccagcgtgcactgcacatcatacaggggagtccctgccagcaagccggagcctgccagagccaaggccaagctctccaagttcagcatccccaagcagggggaggagagtagatctggagaaaccaacagctgtgttgaagaaataatccggtcctgaagcaaatggttcaaggtaccatcccctaaaacatgagctctccaaggactgccaagactgttgtgctacctggaagcattagaacacattgtacaattggcacaaatgcaagagagaagaaaattcacatgctaacccctgagggctagaaacaggagggagtgcagcagctcctgctaaagtgtgtgtcagaaaactcagactttttgtgtctgccacttttatcctgagtatctttcatgagactaagcctttcattttgataggtaatgaatttttacaagttgaagaaatcaagctaatacatttgcagggataatttggttaattaccatgttgctgctggtagaatcaagggctggaagtcaaaactgtttccactgctaatatgctctgtgtaaagcagttcttggaacaattaaaacacatctatcca

SEQ ID NO: 49533 - DNA, 693 bp, Homo sapiens
agcgtagagattacgtgtgttattaaaaggattataggactcagtgcatggtgactaacacctgtaatcccagtaactcaggaggctgaggcgggaggatcacttgaggccagaagttcaagaccattctgggcaacacagcaagactccatctcaaaaaattaaaaaaaaattttttaagtgaataaatggatgaagaataatgaatgaatgattttgacctcttgctcttcacccttttgtccttctagtcctgaagcaaatggttcaaggtaccatcccctaaaacatgagctctccaaggactgccaagactgttgtgctacctggaagcattagaacacattgtacaattggcacaaatgcaagagagaagaaaattcacatgctaacccctgagggctagaaacaggagggagtgcagcagctcctgctaaagtgtgtgtcagaaaactcagactttttgtgtctgccacttttatcctgagtatctttcatgagactaagcctttcattttgataggtaatgaatttttacaagttgaagaaatcaagctaatacatttgcagggataatttggttaattaccatgttgctgctggtagaatcaagggctggaagtcaaaactgtttccactgctaatatgctctgtgtaaagcagttcttggaacaattaaaacacatctatcca

SEQ ID NO: 49534 - DNA, 4044 bp, Homo sapiens
ggccgagcctcggcggcggcggtagcggcggcggcgacgctgacacctcccaccatggacagcttcgacttagccctgctccaggaatgggacctcgagtcactgtgtgtctatgaaccagatagaaatgcattacggaggaaagaacgagaaagaagaaatcaagaaactcaacaggatgatggcacgtttaattctagttactctctcttcagtgagccctacaagactaacaagggggatgaactctccaaccggatccagaacactttaggcaattatgatgaaatgaaagactttttaactgatagaaccaatcagagtcatctcgttggagttcccaaacctggggttcctcagactcctgtgaacaagatcgatgaacattttgttgcagattcaagagcccagaaccagccctcgtctatctgtagcactacaacttccacaccagcagctgtccccgtgcagcagagtaaaagaggcactatgggctggcagaaggctgggcacccaccctctgacggccaacagagagcaacacaacagggctctctcaggaccttgcttggagatggtgttggcagacagcagcctcgggccaaacaagtgtgcaatgtggaggtgggccttcagacccaggagaggccacctgccatggcggccaagcacagcagcagcggacactgtgttcagaactttcctccatccctagcttcaaaacccagcctggtccagcagaaaccgaccgcgtatgtgaggccaatggacggccaagatcaggcccctgatgagtctcctaagctgaagtcgtcttcggaaaccagcgtgcactgcacatcatacaggggagtccctgccagcaagccggagcctgccagagccaaggccaagctctccaagttcagcatccccaagcagggggaggagagtagatctggagaaaccaacagctgtgttgaagaaataatccgggagatgacctggcttccaccactttctgctattcaagcacctggcaaagtggaaccaaccaaatttccatttccaaataaggactctcagcttgtatcctctggacacaataatccaaagaaaggtgatgcagagccagagagtccagacaatggcacatcgaatacatcaatgctggaagatgaccttaagctaagcagtgatgaagaggagaatgaacagcaggcagctcagagaacggctctccgcgctctctctgacagcgccgtggtccagcagcccaactgcagaacctcggtgccttccagcaagggcagcagcagcagcagcagcagcggcagcagcagctcctccagcgactcagagagcagctccggatctgactcggagaccgagagcagctccagcgagagtgagggcagcaagcccccccacttctccagccccgaggctgaaccggcatcctctaacaagtggcagctggataaatggctaaacaaagttaatccccacaagcctcctattctgatccaaaatgaaagccacgggtcagagagcaatcagtactacaacccggtgaaagaggacgtccaggactgtgggaaagtccccgacgtttgccagcccagcctgagagagaaggagatcaagagcacttgcaaggaggagcaaaggccaaggacagccaacaaggcccctgggagtaaaggcgtgaagcagaagtccccgcccgcggccgtggccgtggcggtgagcgcagccgccccgccacccgcagtgccctgtgcgcccgcggagaacgcgcccgcgcctgcccggaggtccgcgggcaagaagcccaccaggcgcaccgagaggacctcagccggggacggcgccaactgccaccggcccgaggagcccgcggccgcggacgcgctggggacgagcgtggtggtccccccggagcccaccaaaaccaggccctgtggcaacaacagagcgagccaccgcaaggagctgcgctcctccgtgacctgcgagaagcgccgcacgcgggggctaagcaggatcgtccccaaatccaaggagttcattgagacagagtcgtcatcttcatcctcctcctcggactccgacctggagtccgagcaggaggagtaccctctgtccaaagcacagaccgtggctgcctctgcctcctccgggaatgatcagaggctgaaggaggccgctgccaacgggggcagtggtcctagggcccctgtaggctccatcaacgccaggaccaccagtgacatcgccaaggagctggaggagcagttctacacactggtcccctttggccggaacgaacttctctcccctctaaaggacagtgatgagatcaggtctctctgggtcaaaatcgacctgaccctcctgtccaggatcccagaacacctgccccaggagccaggggtattgagcgcccctgccaccaaggactctgagagcgcaccgcccagccacacctcggacacacctgcagaaaaggctttgccaaaatccaagaggaaacgcaagtgtgacaacgaagacgactacagggagatcaagaagtcccagggagagaaagacagctcttcaagactggccacctccaccagtaatactttgtctgcaaaccactgcaacatgaacatcaacagtgtggcaataccaataaataaaaatgaaaaaatgcttcggtcgcccatctcacccctctctgatgcatctaaacacaaatacaccagcgaggacttaacttcttccagccgacctaatggcaacagtttgtttacttcagcctcttccagcaaaaagcctaaggccgacagccagctgcagcctcacggcggagacctcacgaaagcagctcacaacaattctgaaaacattcccctccacaagtcacggccgcagacgaagccgtggtctccaggctccaacggccacagggactgcaagaggcagaaacttgtcttcgatgatatgcctcgcagtgccgattattttatgcaagaagctaaacgaatgaagcataaagcagatgcaatggtggaaaagtttggaaaggctttgaactatgctgaagcagcattgtcgtttatcgagtgtggaaatgcaatggaacaaggccccatggaatccaaatctccttatacgatgtattcagaaacagtagagctcatcaggtatgctatgagactaaaaacccactcaggccccaatgccacaccagaagacaaacaactggctgcattatgttaccgatgcctggccctcctgtactggcggatgtttcgactcaaaagggaccacgctgtaaagtattcaaaagcactaatcgactatttcaagaactcatctaaagccgcccaagccccatctccgtggggggccagtggaaactccgtggggtctcagggcagcctctccaacgccagcgccctgtccccgtcgaccatcgtcagcatcccacagcgcatccaccagatggcggccaaccacgtcagcatcaccaacagcatcctgcacagctacgactactgggagatggccgacaacctggccaaggaaaaccgagaattcttcaacgacctggatctgctcatggggccggtcaccctgcacagcagcatggagcacctggtccagtactcccaacagggcctgcactggctgcggaacagcgcccacctgtcatagggacctcaccctggggccagagtgggctctggtctccacagatggctcaacgtttttggacactgtgctactgaaactcccagccacagcatttatcagactgcggtgaacatttcctcagcattgaacaatgatcttttgcagggcatgtgtgtttgtatgtgtgggtatataagaagccgcctgtgtatgtgtgtaagatacacagctcttcagaacacaccttctttgtctagtttccataatcccaggctagacaaagtgatcagaggtttctgactagaggaagtacacacacacacacacacacacacacacaccgtacactcacacacaatcacagacacacactttcta

SEQ ID NO: 49535 - DNA, 2564 bp, Homo sapiens
ggccgagcctcggcggcggcggtagcggcggcggcgacgctgacacctcccaccatggacagcttcgacttagccctgctccaggaatgggacctcgagtcactgtgtgtctatgaaccagatagaaatgcattacggaggaaagaacgagaaagaagaaatcaagaaactcaacaggatgatggcacgtttaattctagttactctctcttcagtgagccctacaagactaacaagggggatgaactctccaaccggatccagaacactttaggcaattatgatgaaatgaaagactttttaactgatagaaccaatcagagtcatctcgttggagttcccaaacctggggttcctcagactcctgtgaacaagatcgatgaacattttgttgcagattcaagagcccagaaccagccctcgtctatctgtagcactacaacttccacaccagcagctgtccccgtgcagcagagtaaaagaggcactatgggctggcagaaggctgggcacccaccctctgacggccaacagagagcaacacaacagggctctctcaggaccttgcttggagatggtgttggcagacagcagcctcgggccaaacaagtgtgcaatgtggaggtgggccttcagacccaggagaggccacctgccatggcggccaagcacagcagcagcggacactgtgttcagaactttcctccatccctagcttcaaaacccagcctggtccagcagaaaccgaccgcgtatgtgaggccaatggacggccaagatcaggcccctgatgagtctcctaagctgaagtcgtcttcggaaaccagcgtgcactgcacatcatacaggggagtccctgccagcaagccggagcctgccagagccaaggccaagctctccaagttcagcatccccaagcagggggaggagagtagatctggagaaaccaacagctgtgttgaagaaataatccgggagatgacctggcttccaccactttctgctattcaagcacctggcaaagtggaaccaaccaaatttccatttccaaataaggactctcagcttgtatcctctggacacaataatccaaagaaaggtgatgcagagccagagagtccagacaatggcacatcgaatacatcaatgctggaagatgaccttaagctaagcagtgatgaagaggagaatgaacagcaggcagctcagagaacggctctccgcgctctctctgacagcgccgtggtccagcagcccaactgcagaacctcggtgccttccagcaagggcagcagcagcagcagcagcagcggcagcagcagctcctccagcgactcagagagcagctccggatctgactcggagaccgagagcagctccagcgagagtgagggcagcaagcccccccacttctccagccccgaggctgaaccggcatcctctaacaagtggcagctggataaatggctaaacaaagttaatccccacaagcctcctattctgatccaaaatgaaagccacgggtcagagagcaatcagtactacaacccggtgaaagaggacgtccaggactgtgggaaagtccccgacgtttgccagcccagcctgagagagaaggagatcaagagcacttgcaaggaggagcaaaggccaaggacagccaacaaggcccctgggagtaaaggcgtgaagcagaagtccccgcccgcggccgtggccgtggcggtgagcgcagccgccccgccacccgcagtgccctgtgcgcccgcggagaacgcgcccgcgcctgcccggaggtccgcgggcaagaagcccaccaggcgcaccgagaggacctcagccggggacggcgccaactgccaccggcccgaggagcccgcggccgcggacgcgctggggacgagcgtggtggtccccccggagcccaccaaaaccaggccctgtggcaacaacagagcgagccaccgcaaggagctgcgctcctccgtgacctgcgagaagcgccgcacgcgggggctaagcaggatcgtccccaaatccaaggagttcattgagacagagtcgtcatcttcatcctcctcctcggactccgacctggagtccgagcaggaggagtaccctctgtccaaagcacagaccgtggctgcctctgcctcctccgggaatgatcagaggctgaaggaggccgctgccaacgggggcagtggtcctagggcccctgtaggctccatcaacgccaggaccaccagtgacatcgccaaggagctggaggagcagttctacacactggtcccctttggccggaacgaacttctctcccctctaaaggacagtgatgagatcaggtctctctgggtcaaaatcgacctgaccctcctgtccaggatcccagaacacctgccccaggagccaggggtattgagcgcccctgccaccaaggactctgagagcgcaccgcccagccacacctcggacacacctgcagaaaaggctttgccaaaatccaagaggaaacgcaagtgtgacaacgaagacgactacaggattttggcaaagccctcgtg

SEQ ID NO: 49536 - DNA, 788 bp, Homo sapiens
ttatatgcacgtatagaaagatttcctatgtagaaacaaggtattgttattgagtaccttagaacaacaacaaaaatgtttaagtcttgtttgcgcacgacgcactcagccgcttctgggcctgtttctcttttcgcctgcagttaccgatgcctggccctcctgtactggcggatgtttcgactcaaaagggaccacgctgtaaagtattcaaaagcactaatcgactatttcaaggtactgtctagtgaatgagcagaattgttccttaatttcacttgtctccctgtcaaatttgtgaagcacctggtagactccattgctttggggttaatgcaggtcacctctggtccccaaggtaaccccatttatgccacacttgtggctttcaggcctcagaatggacctttgagagcccatctaatgtatctccctgccttcttgtccaagtatttttatttttttatttttatttttttatgtatttttggagacagagtttcactctttgttgcccaggctgcagtgcaatggtgcgatctcggctcactgcaacctccgcctcctgggttcaagcaattctcctgcctcagcctcccaagtagctcagattacaggcgcacaccaccacgcctggctaattttgtatttttagtagagatggggtttcaccatgttggtcatgctggtctcgaactcctgacctcaggtgatctccccgcctccacctcccagagtgctaggaatacaggtgtgagccaccacgcccagccttgtccaggtatttt

SEQ ID NO: 49537 - DNA, 4092 bp, Homo sapiens
ggccgagcctcggcggcggcggtagcggcggcggcgacgctgacacctcccaccatggacagcttcgacttagccctgctccaggaatgggacctcgagtcactgtgtgtctatgaaccagatagaaatgcattacggaggaaagaacgagaaagaagaaatcaagaaactcaacaggatgatggcacgtttaattctagttactctctcttcagtgagccctacaagactaacaagggggatgaactctccaaccggatccagaacactttaggcaattatgatgaaatgaaagactttttaactgatagaaccaatcagagtcatctcgttggagttcccaaacctggggttcctcagactcctgtgaacaagatcgatgaacattttgttgcagattcaagagcccagaaccagccctcgtctatctgtagcactacaacttccacaccagcagctgtccccgtgcagcagagtaaaagaggcactatgggctggcagaaggctgggcacccaccctctgacggccaacagagagcaacacaacagggctctctcaggaccttgcttggagatggtgttggcagacagcagcctcgggccaaacaagtgtgcaatgtggaggtgggccttcagacccaggagaggccacctgccatggcggccaagcacagcagcagcggacactgtgttcagaactttcctccatccctagcttcaaaacccagcctggtccagcagaaaccgaccgcgtatgtgaggccaatggacggccaagatcaggcccctgatgagtctcctaagctgaagtcgtcttcggaaaccagcgtgcactgcacatcatacaggggagtccctgccagcaagccggagcctgccagagccaaggccaagctctccaagttcagcatccccaagcagggggaggagagtagatctggagaaaccaacagctgtgttgaagaaataatccgggagatgacctggcttccaccactttctgctattcaagcacctggcaaagtggaaccaaccaaatttccatttccaaataaggactctcagcttgtatcctctggacacaataatccaaagaaaggtgatgcagagccagagagtccagacaatggcacatcgaatacatcaatgctggaagatgaccttaagctaagcagtgatgaagaggagaatgaacagcaggcagctcagagaacggctctccgcgctctctctgacagcgccgtggtccagcagcccaactgcagaacctcggtgccttccagcaagggcagcagcagcagcagcagcagcggcagcagcagctcctccagcgactcagagagcagctccggatctgactcggagaccgagagcagctccagcgagagtgagggcagcaagcccccccacttctccagccccgaggctgaaccggcatcctctaacaagtggcagctggataaatggctaaacaaagttaatccccacaagcctcctattctgatccaaaatgaaagccacgggtcagagagcaatcagtactacaacccggtgaaagaggacgtccaggactgtgggaaagtccccgacgtttgccagcccagcctgagagagaaggagatcaagagcacttgcaaggaggagcaaaggccaaggacagccaacaaggcccctgggagtaaaggcgtgaagcagaagtccccgcccgcggccgtggccgtggcggtgagcgcagccgccccgccacccgcagtgccctgtgcgcccgcggagaacgcgcccgcgcctgcccggaggtccgcgggcaagaagcccaccaggcgcaccgagaggacctcagccggggacggcgccaactgccaccggcccgaggagcccgcggccgcggacgcgctggggacgagcgtggtggtccccccggagcccaccaaaaccaggccctgtggcaacaacagagcgagccaccgcaaggagctgcgctcctccgtgacctgcgagaagcgccgcacgcgggggctaagcaggatcgtccccaaatccaaggagttcattgagacagagtcgtcatcttcatcctcctcctcggactccgacctggagtccgagcaggaggagtaccctctgtccaaagcacagaccgtggctgcctctgcctcctccgggaatgatcagaggctgaaggaggccgctgccaacgggggcagtggtcctagggcccctgtaggctccatcaacgccaggaccaccagtgacatcgccaaggagctggaggagcagttctacacactggtcccctttggccggaacgaacttctctcccctctaaaggacagtgatgagatcaggtctctctgggtcaaaatcgacctgaccctcctgtccaggatcccagaacacctgccccaggagccaggggtattgagcgcccctgccaccaaggactctgagagcgcaccgcccagccacacctcggacacacctgcagaaaaggctttgccaaaatccaagaggaaacgcaagtgtgacaacgaagacgactacagggagatcaagaagtcccagggagagaaagacagctcttcaagactggccacctccaccagtaatactttgtctgcaaaccactgcaacatgaacatcaacagtgtggcaataccaataaataaaaatgaaaaaatgcttcggtcgcccatctcacccctctctgatgcatctaaacacaaatacaccagcgaggacttaacttcttccagccgacctaatggcaacagtttgtttacttcagcctcttccagcaaaaagcctaaggccgacagccagctgcagcctcacggcggagacctcacgaaagcagctcacaacaattctgaaaacattcccctccacaagtcacggccgcagacgaagccgtggtctccaggctccaacggccacagggactgcaagaggcagaaacttgtcttcgatgatatgcctcgcagtgccgattattttatgcaagaagctaaacgaatgaagcataaagcagatgcaatggtggaaaagtttggaaaggctttgaactatgctgaagcagcattgtcgtttatcgagtgtggaaatgcaatggaacaaggccccatggaatccaaatctccttatacgatgtattcagaaacagtagagctcatcaggtatgctatgagactaaaaacccactcaggccccaatgccacaccagaagacaaacaactggctgcattatgttaccgatgcctggccctcctgtactggcggatgtttcgactcaaaagggaccacgctgtaaagtattcaaaagcactaatcgactatttcaagaactcatctaaagccgcccaagccccatctccgtggggggccagtggaaagagcactggaaccccatcccccatttctcccaacccctttcccggcagctccgtggggtctcagggcagcctctccaacgccagcgccctgtccccgtcgaccatcgtcagcatcccacagcgcatccaccagatggcggccaaccacgtcagcatcaccaacagcatcctgcacagctacgactactgggagatggccgacaacctggccaaggaaaaccgagaattcttcaacgacctggatctgctcatggggccggtcaccctgcacagcagcatggagcacctggtccagtactcccaacagggcctgcactggctgcggaacagcgcccacctgtcatagggacctcaccctggggccagagtgggctctggtctccacagatggctcaacgtttttggacactgtgctactgaaactcccagccacagcatttatcagactgcggtgaacatttcctcagcattgaacaatgatcttttgcagggcatgtgtgtttgtatgtgtgggtatataagaagccgcctgtgtatgtgtgtaagatacacagctcttcagaacacaccttctttgtctagtttccataatcccaggctagacaaagtgatcagaggtttctgactagaggaagtacacacacacacacacacacacacacacaccgtacactcacacacaatcacagacacacactttcta

SEQ ID NO: 49538 - DNA, 1445 bp, Homo sapiens
ggccgagcctcggcggcggcggtagcggcggcggcgacgctgacacctcccaccatggacagcttcgacttagccctgctccaggaatgggacctcgagtcactgtgtgtctatgaaccagatagaaatgcattacggaggaaagaacgagaaagaagaaatcaagaaactcaacaggatgatggcacgtttaattctagttactctctcttcagtgagccctacaagactaacaagggggatgaactctccaaccggatccagaacactttaggcaattatgatgaaatgaaagactttttaactgatagaaccaatcagagtcatctcgttggagttcccaaacctggggttcctcagactcctgtgaacaagatcgatgaacattttgttgcagattcaagagcccagaaccagccctcgtctatctgtagcactacaacttccacaccagcagctgtccccgtgcagcagagtaaaagaggcactatgggctggcagaaggctgggcacccaccctctgacggccaacagagagcaacacaacagggctctctcaggaccttgcttggagatggtgttggcagacagcagcctcgggccaaacaagtgtgcaatgtggaggtgggccttcagacccaggagaggccacctgccatggcggccaagcacagcagcagcggacactgtgttcagaactttcctccatccctagcttcaaaacccagcctggtccagcagaaaccgaccgcgtatgtgaggccaatggacggccaagatcaggcccctgatgagtctcctaagctgaagtcgtcttcggaaaccagcgtgcactgcacatcatacaggggagtccctgccagcaagccggagcctgccagagccaaggccaagctctccaagttcagcatccccaagcagggggaggagagtagatctggagaaaccaacagctgtgttgaagaaataatccgggagatgacctggcttccaccactttctgctattcaagcacctggcaaagtggaaccaaccaaatttccatttccaaataaggactctcagcttgtatcctctggacacaataatccaaagaaaggtgatgcagagccagagagtccagacaatggcacatcgaatacatcaatgctggaagatgaccttaagctaagcagtgatgaagaggagaatgaacagcaggcagctcagagaacggctctccgcgctctctctgacagccttagctggtagctgcttccttctgaaatgccctcctctgtctcagctccactgaccattgaaaccctgtgttctctgctacgtcacttcttctacaagacgtgccttgcttccccttcaccttccgccatgattgtaagtgtcctgaggcctccccagccatgtggaactgtgagtcaattaaatttgtttctttataaattact

SEQ ID NO: 49539 - DNA, 2678 bp, Homo sapiens
  misc_feature (2658)..(2658): n is a, c, g, or t
ggccgagcctcggcggcggcggtagcggcggcggcgacgctgacacctcccaccatggacagcttcgacttagccctgctccaggaatgggacctcgagtcactgtgtgtctatgaaccagatagaaatgcattacggaggaaagaacgagaaagaagaaatcaagaaactcaacaggatgatggcacgtttaattctagttactctctcttcagtgagccctacaagactaacaagggggatgaactctccaaccggatccagaacactttaggcaattatgatgaaatgaaagactttttaactgatagaaccaatcagagtcatctcgttggagttcccaaacctggggttcctcagactcctgtgaacaagatcgatgaacattttgttgcagattcaagagcccagaaccagccctcgtctatctgtagcactacaacttccacaccagcagctgtccccgtgcagcagagtaaaagaggcactatgggctggcagaaggctgggcacccaccctctgacggccaacagagagcaacacaacagggctctctcaggaccttgcttggagatggtgttggcagacagcagcctcgggccaaacaagtgtgcaatgtggaggtgggccttcagacccaggagaggccacctgccatggcggccaagcacagcagcagcggacactgtgttcagaactttcctccatccctagcttcaaaacccagcctggtccagcagaaaccgaccgcgtatgtgaggccaatggacggccaagatcaggcccctgatgagtctcctaagctgaagtcgtcttcggaaaccagcgtgcactgcacatcatacaggggagtccctgccagcaagccggagcctgccagagccaaggccaagctctccaagttcagcatccccaagcagggggaggagagtagatctggagaaaccaacagctgtgttgaagaaataatccgggagatgacctggcttccaccactttctgctattcaagcacctggcaaagtggaaccaaccaaatttccatttccaaataaggactctcagcttgtatcctctggacacaataatccaaagaaaggtgatgcagagccagagagtccagacaatggcacatcgaatacatcaatgctggaagatgaccttaagctaagcagtgatgaagaggagaatgaacagcaggcagctcagagaacggctctccgcgctctctctgacagcgccgtggtccagcagcccaactgcagaacctcggtgccttccagcaagggcagcagcagcagcagcagcagcggcagcagcagctcctccagcgactcagagagcagctccggatctgactcggagaccgagagcagctccagcgagagtgagggcagcaagcccccccacttctccagccccgaggctgaaccggcatcctctaacaagtggcagctggataaatggctaaacaaagttaatccccacaagcctcctattctgatccaaaatgaaagccacgggtcagagagcaatcagtactacaacccggtgaaagaggacgtccaggactgtgggaaagtccccgacgtttgccagcccagcctgagagagaaggagatcaagagcacttgcaaggaggagcaaaggccaaggacagccaacaaggcccctgggagtaaaggcgtgaagcagaagtccccgcccgcggccgtggccgtggcggtgagcgcagccgccccgccacccgcagtgccctgtgcgcccgcggagaacgcgcccgcgcctgcccggaggtccgcgggcaagaagcccaccaggcgcaccgagaggacctcagccggggacggcgccaactgccaccggcccgaggagcccgcggccgcggacgcgctggggacgagcgtggtggtccccccggagcccaccaaaaccaggccctgtggcaacaacagagcgagccaccgcaaggagctgcgctcctccgtgacctgcgagaagcgccgcacgcgggggctaagcaggatcgtccccaaatccaaggagttcattgagacagagtcgtcatcttcatcctcctcctcggactccgacctggagtccgagcaggaggagtaccctctgtccaaagcacagaccgtggctgcctctgcctcctccgggaatgatcagaggctgaaggaggccgctgccaacgggggcagtggtcctagggcccctgtaggctccatcaacgccaggaccaccagtgacatcgccaaggagctggaggagcagttctacacactggtcccctttggccggaacgaacttctctcccctctaaaggacagtgatgagatcaggtctctctgggtcaaaatcgacctgaccctcctgtccaggatcccagaacacctgccccaggagccaggggtattgagcgcccctgccaccaaggactctgagagcgcaccgcccagccacacctcggacacacctgcagaaaaggctttgccaaaatccaagaggaaacgcaagtgtgacaacgaagacgactacagggagatcaagaagtcccagggagagaaagacagctcttcaagactggccacctccaccagtaatactttgtctgcaaaccactgcaacatgaacatcaacagtgtggcatcgatnacccggggatccttagatca

SEQ ID NO: 49540 - DNA, 518 bp, Homo sapiens
ttttaagtgagcctgtaatgaaagatgttttgtttgtcaccggttttctgctttcaggctgaaccggcatcctctaacaagtggcagctggataaatggctaaacaaagttaatccccacaagcctcctattctgatccaaaatgaaagccacgggtcagagagcaatcagtactacaacccggtgaaagaggacgtccaggactgtgggaaagtccccgacgtttgccagcccagcctgagagagaaggagatcaagagcacttgcaaggaggagcaaaggccaaggacagccaacaaggcccctgggagtaaaggcgtgaagcagaagtccccgcccgcggccgtggccgtggcggtgagcgcagccgccccgccacccgcagtgccctgtgcgcccgcggagaacgcgcccgcgcctgcccggaggtccgcgggcaagaagcccaccaggcgcaccgagaggacctcagccggggacggcgccaactgccaccggcccgaggagcccgcggccgc

SEQ ID NO: 49541 - DNA, 679 bp, Homo sapiens
ccaggagctaccagttactgtctgcacaatcaaacagaaatagacctgtccttgatggttaacggaaataaaaggcgcttgtcccagaagctcaggtgaggcaccaccctgattatgggaatcacctgggaacatatacccagacctaaaactcagatccacttcccaggctgtggttatatagtcaggggggtgcagtatgggtattaggattttttattttttagttataaagatttttttttggtttgtttttgagacagggtcttgctctgccgcttaggctggagtgcagtggtgcaatcatagctcactgaagcctcagactcctgggttcaagcagtcctcccacctcagcctcctaaggagctggggacccacaggcatgcagcaccacacctggctaatttttaaaaattttggtggagtgttgcccaggctggtctcacactccctggcctcaggcgatcctcccaccccagcctcccaatgtgttgggattacaggcatgagccattgtacccagccactaagatgattcttatttggaaacacggtcaagaacaactgcgttcggtagtttaaccttttttgattgtggtggttttagtatgccttaccactctaccatagtaagaaatttgcagaccatgtacaccaacctttggtgctcctgggg

SEQ ID NO: 49542 - DNA, 274 bp, Homo sapiens
ggctaagagtgagggaggcaagtctccttacttttgggggaagcgggagatgctcaatgggaatagaacccacaaatggaataggtatacttttctcaggatagaggcaacgatctgtgcttgagaaagccaggggcagagctgtgtgatctgtgtctctcagctgcctgtagaaggtgatgggggagagagtgggcgcattggcaggggggggtcccctggagataggcctccctcactcttagcccgagggacaactgggaatatgattgcc

SEQ ID NO: 49543 - DNA, 500 bp, Homo sapiens
ttttttccaaataaggatggccacatccacaggttctgggatgtttacatattttttgtggtgggagccaccattcaactcactacaaaggccttggaaatacatcctaagagcttaacttctaggcgtcatagcatgttaagtccacgtaccaggtgaacacatcacctcatttgtctgtctgaccaaggttcacgggaatgactcattcgaggcatttcaggacaactaaagggatagaggacctggccgggtgagtggcagaggtggggaacctgttgtagtacacccctgctgtggggggtggagggagagatggccaggctggcatcatcatgtagttcccacgggcttaggagtctcagctgggttcaaatcctggctcttgggtgaccttgggcaagtacccaaccctttttggcctcagtctcctcatttgtgtaatgggcatgaggataatggcatctgccttatagtgttgctgtgagaatgaaatgata

SEQ ID NO: 49544 - DNA, 704 bp, Homo sapiens
acttgagtccaggagttcaaaggtgcagtgagctcggatcacaccactgcactccagcctgggtgacagagcgagaccgtgtatgataaaacaaaaacagaaaacatccagaggtttgtatagaagtagttatcttgcaggtgttcagaaggacctgactgccaaaataaggcaggccctcattatttcaggtgcagtcatttaagtttcttattggctatggttttttgaagaaataatttttatagatttataggatggtgttcacaaagactactgtatttgaatttttctatatattttcaattctcatacatccgtattagaaattatgtattgtatttatggtcagatttattggagactgctgcaaaaaacaaattactggtatggtgcactcaaccaatctcaaaacgaatccaagggcaccagaatataagttgcacaaaggcagaaatctttgtcttttttttttttctcatgtgtgctaaacacctggaagggtacctgcatttaatgggtgcaccataaataatgaatgaaggcaggcaggtaggcagacaggtggtacaatcaggatccccttaatatgaattgggggtagtttatgtaaaatttttcctttttacctactttctgatcattatatgaagtagattgggatcagacttaccaatattagctgtggccgggcgcagtggctc

SEQ ID NO: 49545 - DNA, 782 bp, Homo sapiens
ttaaaatgtgtgacactttcttagttcctactttgtgcttccttctgttaaaaatcacaagtagaaagcaagagagagaagagacaaaaaagaaagaggtagaaagatatcaagggaattttcctgctagtgttatactttattttcactgagaatagtgagtcattaaaatgtatagtaagagagatactgtttctgatatactttgttaaaacctgtctctcttgatctgtgtaaaaatgtgttttccatatgtatgttaaagtgtatatacatacataagttcacacagtttagctgtttttgttttcaaatgaaagctgaaatatgaagatcagaactttattaaattcccttaattttattgtaatattgttttgtagatgagagatttttatttttgaaaagttttaaaaataaatagcaaaaatgtatacacccacatacccacatataaaatgttaacatatttcatttttgcttcagatatatatttaatttaaaataactatttatatcatagttatcacattgaattctaaaagagcaatgtagaactttatacttttcttgaatattacagatcatgttaaagtcccttttgttctccccagttttatcctcctcaccttcatctcccctcccagaggaaattgttgtaatgaatttgatttgtatccttctagtttatcttttaataaactatatatatgagcaatgacatggcattgctttgggtgcttttgtagaacatgcacattgtagtacatttcaaatcatac

SEQ ID NO: 49546 - DNA, 497 bp, Homo sapiens
ccgggacccagggcacctgcagcggggctggtgcgagtgttgtcccgggaaatgccggaatgagacgagacgatgaaaaccttaagtgtggaactgcgtctcaggccagtgttctggctgaaagagtcacccctagtcacccctcgtgccctaggtcggccccgctgtccccaggggcaggggctgccgtatgctgggtcagcttaaagcgatgctccacaaacttggacaactttctagtcgttctcacatcagtactttgggaaaatacaataagggtgaaatactagaaaaatgttcacgtgcttcgatgccatgtaatggtaaactgctataaaagttttcaaaatcttggcaatttctgctgcagacagcacgcgtttcccagaacgagggccacacgttaatattaccttagtgcagcgcttctcagagtgcccccacctgccgcagcagcagcagcatcaccacctgggtgggcgttcccccattactga

SEQ ID NO: 49547 - DNA, 707 bp, Homo sapiens
taagcagcagcacatcttcaaatcatagcggccacactccagagcccccactcccaccggttggaggtgacctcgccagccgactgtccagtgatgaaggggagatggacggagccgacgaatccgagaagctagactgtcagttctccacgcaccaccccagacctctggcgttttgctcatttgggagtcgcctcatgggacgagggtactatgtgtttgatagaagatggggatcgttttcgattcgcactaaactccatggtagaaaaacacctgaattcacagatgtggaagcacagaaacccgagccacagggcatcaggtccctcccccctgttcaggacttgcctaaccaatctgctgtcactgagcaacattggggctgcctgggtgtcaactctggagagcgtagcaccccgctaccctctcaacctcgctgcccaaaccccaggccccggcgggcccgaacctggagggatggcagccgatgggggcgtggaagacattaggaagaaaaggaacggccaagactcttttttctttaacaagcatttaactctgcatcagggagccgccaacacagtattctctttcagccagggaagatccctcctgcggcagatagccccctgcctcgccaggagccacatcaacaccccggtccagcatccgtttgcagccttagcaaccagggtgtgttttcc

SEQ ID NO: 49548 - DNA, 370 bp, Homo sapiens
tgtgtttctattttgttttaatgaaatttttttccttttgttgatgctgttggtgtttccatggatatttcaaaagcagtttctggttttgctgaaaggctagaaatgacaactattttcagagtttctaggtcttgaaacatcagtcaacctttcaaagccagcattgatcaagaaggaaagaggtttttctaatgaggaaaataaaatagtaaatgatactttgacattccattagttgtaggaatgtgtgccccaactgactaccttgctttgctctctctctttccctctcttttctaagttttgctaataataaaacttaggaagtacacatttaggaaactgtctgtccttgtgactgatggca

SEQ ID NO: 49549 - DNA, 550 bp, Homo sapiens
taagcccagaatgaagctgctgggtcatcgtagggcacttgcatgctttatgatttaatgactgcctagttgtgcacagaggcctgcccagtctgtttccaccagtatatccagtaaagggtgctgtacacccacctctgcccacacttggcctttcccactctctggtggttgccagtccacaggcgtagagctgccttgctgttctcaggcacatccctctgggcacccacatacagaggtgtctctgtgtgctctgcctgctgtcatcccagctactcgggaggccgaggcaggaaaatcgcttaaacccgggaggcagaggttgcaagtgagccgagatggcaccactgcgcttcagcttgggcaacagagctagactccgtctcaaaaaaaagaaaaagaaaaattttgtttaaggagccatgccgtaagtcacaaaggtattcgcgttcattttcttctggtcatgttatggttttacctcacatttgtatggggtgcctgctgtgcggtagaccctgtggaaagcaatggagaaagagtggtg

SEQ ID NO: 49550 - DNA, 950 bp, Homo sapiens
aaaagaagataaggattcactggtatcagatagttccaggaggggaaacccaggattgaactttttcagccttctatggtaaaatttcctgctctgtcggtgcgccaaagcttttttcagtttcctaaactcccatattcaagaagataagctattttctcttctttctcatccttccttgacaaagcaaagcatattttcattgtctactctgtgtcatccatgcttggttcctgtcctcaaagagcttatagttcaaataaaggagagggagcattttacaagggaattaaaggtaaaagattctgaaagccagtttaaaaagtcgtgagggaggggtctgggagaagctgagcaggggtgaaagggtacgaaacattatggaaggagaacaggggagcaccctgactactgggtggaaacaccaatcagtgggtagaaaccacacagtggtaacactgatcagtgggtagaaaacaatgacagcaggtatatgaggcatggaacacttggcttattgtaaagttttcaaaatatgcagtcctttctatccaccaggggttgggagttgtctttgtatatcaaccgtggaagggctgttttggttcatcattctgtggtctacctgggtagacctgatgcagccgtgtttctgaggaaaggaagaacagcttttgttttgtgatatgtaatggtagatgtagtgccatggaatgatgcagatttcattcagatattcttggatcttggccccaggactcactcattcttccctatatgagcattggtagttacaggttttatccttcctttaattgtaagtcttttgaagccaaaaactgtatccaatttgtcactgtctcctaacagtacttagcagtgtctgatgcatcatagggagtttgtaaatgtttggataaataaagggaaaacaaaaacaaccacaaaaa

SEQ ID NO: 49551 - DNA, 420 bp, Homo sapiens
ggacaaatgaattagacaacagtcatgacatcactgagctactgaaccaatgttaccagctgcttcagatttttactatgtaataaaaagaattctccatttgcttaaacctttgctaatgagttttactcttatggatgaaaacatcccaatataccttccagacaagacaattctattctgcgcttccacatcatgcctagtagcactctgattccaagcgagataagacttattttgcttcaggcgtcttatcctgctttccatgaacaaatacagtctcttcccagggcatcttagcaaatggacacatgtgcttgccaaggtgactctgccatcctgtgtgacgggaggaggaggggtaaagtttggtttcagaaatataagttctctgccctgagcagagatagacagagtcat

SEQ ID NO: 49552 - DNA, 241 bp, Homo sapiens
aaaaccaaaaaaaaaaaaacacccgtcttggtgactgccctacagagcaaagtcctgaagaatattcattctgttgaaaaataaaatggggattaacaactaccaaaaccccttgtaacaagccaactaaaggtggaccctagtacagaccccgcagccttgtgaccaagctacaacccctctctattacaaatccatagggcatctcagcaccctggggacccaacaaaagaggcttacc

SEQ ID NO: 49553 - DNA, 886 bp, Homo sapiens
tgtggtatgaggagcagaggatggggctgcgctctcttcggggaattgtcccaaacttagccaagaaggtcaagctggaaaactgtgagaacttcacctttgtctcgttcactcaggtctcccggaggcttggctcccacagctgctgccagtgagcccccactggggcccggccactgccctgtcacctgctcgggccagccagggttggagcagctggagctccttggaggcaggggctgaccaggtgtgacctcccggtctggcggctctcccctggtgtggcctgccctccctttgacttggggtttgctttttaaaatgaaactagatgagtctaaatcattcggatggtttatccaaatgtgcgtcaacttcgttagcttttagaatctaacacaatgtataattgttacatacaagagtgaggaaattcattttctctagtgcctttctagcacaggttttctcaaaacaaacaaacaaaaaaggaaactgttaagtagtcgtttaaaaaaaaaatcccagtagcgcagtagctttagaacgttaggaagactgtacactttgttgaattacactcacaattagaaactagagagaggcagacacgttccctatttccaggagacagattgcgcttgatgcgccttttttttctgttggtggataaggtggttctggagggcaggcagccttgtgtcggggagtatcctcaagcgacacttggtcatctgacaaggacttgggctgctcccacggctcccagcagcggtaggaaccccatctcggctgtcaatggagagaattttatgataaaagattcacgcaccagaagggtgtctgtgagaacaaggcttctagtgaactagacagtttgtaccat

SEQ ID NO: 49554 - DNA, 753 bp, Homo sapiens
ttaccttcaaacagtttaatttacccagttaatcacaaaagattaaaaaattgctaaatcagaaattctctacctgtaactgatgttttcattgatgatgaatattagaaacattaactatatcacatactccctgaggacatagagtggtgacttgcaaatgttttggtttggaattgtggcaccttattgttgtccctaaatggtttacatattgcacacatttttaatttaaaaacaagaaacaaaacaaccactttaatttcacgcaagcccttttgtgataactgcagacatgagtgtcataggagccagaccccctgactggctgcccagtaaaatggaatgtgtctttaaaatttttggccaaacaaatttagtccttaacctcttcctctgggccttacctaaattgtgggatgcctccgtacttcagtttgcggtacttgagctttagaagcgtgcctgaatggtgctcaagacactgctgtgggcctctgctgacaatgcaagctctcacaaaactgaacgtttggcccatttaccataaagaagcaaacagtccccatcctaaggacaggcctagcctaaggttaacagtaagagcaacattttgttgcttcattttcctattaagctctgggttgctgattgaagcagaattccaatgttttgacacaccaccacattgttagcacgatagggaggatttgattatgggagaacaagtccaaaaacggtaaattgacaaaa

SEQ ID NO: 49555 - DNA, 4538 bp, Homo sapiens
attctcgggagaggaatcggttaggagaagggggattcctcactcagctgtgcgctctgatttcgtgcgcttcctcgtccttcatgttggatggccagtttttcgtttgtgcgtcatcctctacctgagaaatggtcgcttgcccctagtctagacacgcattaaagggcagtatttaaagtcagttggcaagcagtggaataagatttttgtaaagaaaccttgtgcagcatggattctctaccagatgaattttttgtgaggcatcctgctgtggaggatcagaggaaggaagaaactgagaataagctagaaaaatcatctggtcaactgaacaaacaggaaaatgacatacctactgatcttgtccctgttaacctactattagaagtgaagaagttattaaatgcaattaatactctaccaaaaggtgtggttcctcacattaagaagttcttacaagaagatttttccttccaaactatgcagagagaagttgcagctaacagccagaatggtgaggaaattgttcctgctttgactttacgtttcttgattacacagctagaagcagcacttaggaacattcaagctggcaattataccgcacaccagattaatattggttattatttgacattactgtttttatatggagtagcactcactgaaagaggaaagaaagaggattatacagaagctgagaataaatttctggtgatgaagatgatgatccaagaaaatgaaatttgtgaaaactttatgtctttagtttattttggacgtggtttactgcgatgtgctcaaaagagatataatggaggactgctagaatttcataaaagcttacaagaaattggagacaaaaatgaccattggtttgacatagatcctacagaagatgaagatttacctacaacttttaaagatcttcttaataattttatcaagacaactgaaagcaatataatgaagcagacgatttgtagttacctagattgtgaacgatcttgtgaagctgacattttgaagaacaccagttataagggattttttcagttaatgtgcagtaaaagttgctgtgtttatttccataaaatttgctggaaaaagttcaagaatttaaagtatccaggtgaaaatgatcagagttttagtgggaaaaaatgtttgaaggaaggatgtacaggtgacatggtaaggatgctgcaatgtgatgtacctggaattgttaaaattttgtttgaagttgtgagaaaggatgaatatatcaccattgaaaatttaggagcaagttatagaaagttgatatctctgaaaataactgatactgatataagaccgaagatcagtttaaaatttaatacaaaagatgaaatgcctatcttcaagcttgattataattatttctatcatctgcttcatataattattatttctggtactgacattgttcgacaaatatttgatgaggctatgccacctcctcttttgaaaaaagagcttcttatacacaagaatgtgctggaatcctactacaaccatctttggaccaatcatcctttgggtggatcatggcatctgctttatcctcctaacaaggagttaccgcaatccaaacagtttgacttatgcctcctgttagctcttataaaacatttaaatgtgttccctgcacccaaaaaaggatggaatatggaaccgccatcttctgacatctctaaatctgcagacatcctgagactgtgcaaatacagggatatcctccttagtgagattttgatgaatggtctcactgagtcacagttcaattcaatttggaaaaaagtttcagatattcttctgcgccttgggatgatgcaagaggatattgacaaagtgaaggagaatcccattgagaatatctcccttgattaccatcagctatctgtctacctaggcataccagtaccagaaatcatacagaggatgttatcctgctatcaacaaggaattgctctacagtcaataacaggcagtcagcgtattgaaatagaagagttacagaatgaggaagaagaactaagtccacctctcatggagtacaatataaatgtgaaatcacaccctgagatacagtttgcagaaattaataaagatgggacctcaatacccagtgaatcttcaacagaatctcttaaagatctccaggaagttaagagtaaacaaaggaaaaagaagaagactaagaataaaaagaataaagactcaaaagaagaccaagtcccatatgtggtagaaaaggaagagcagttgaggaaagaacaagcaaatccacactcagtcagtagacttataaaagatgatgcaagtgatgttcaagaggattctgcaatggaagacaagttctatagcctggatgaattgcatattctggacatgatagagcagggctcagctggcaaagtaactacagactatggagaaactgaaaaggaaaggcttgctcgtcaaaggcagctttataaattgcactatcagtgtgaagatttcaaaagacagttgagaacagtgacttttcggtggcaagaaaaccaaatgcagattaaaaagaaagacaaaattatcgcatctcttaatcaacaagttgcttttggaatcaataaggtttccaaattacagcgtcaaatccatgctaaagataatgaaatcaagaaccttaaagagcaactttctatgaaaagatctcagtgggaaatggaaaaacataatctggaaagcacaatgaaaacatacgtaagcaaactgaacgcagaaactagcagagctttaacagccgaggtgtatttcttacagtgtcgtagggattttggtttgcttcatctagagcagactgaaaaggaatgtctcaatcagcttgccagggtgactcacatggcagcaagcaacctagaatcacttcaattaaaggctgcggtagacagttggaatgccattgtggcagatgttagaaacaagattgcattcctcaggacacagtacaatgaacaaataaacaaagtcaagcaaggatttgccttgagtaccttgcctccagtccagcttcctcctccaccacccagtcctgagatactgatgcagcagttcttaggaagaccccttgtgaaagaatctttctttagacccatacttactgttcctcaaatgcctgcagtttgcccgggagtcgtctctgcaactggccaacctagagcccccctgatgactggcatagcctgggctctgccagcgcctgtgggagacgctgtgcctcccagtgcaggtctgcggagtgatccctccatcatgaattgggagagaattacagacaggctgaaaactgcctttccacagcaaaccagaaaggaacttacagatttcttacggaaattgaaggatgcttatggaaaatccttgtctgaactgacatttgatgaaattgtttgcaagatttcccagtttattgaccccaaaaagtctcagagtcaaggaaaatcagtgtcaaatgttaattgtgtttcacctagtcattctccatcacagcctgatgctgcccagcccccaaaaccagcctggaggccactcacttcacagggtcctgccacatgggaaggagccagtaatccagatgaggaagaggaagaagaagagccttgtgtgatctgtcatgagaatctgtctccagaaaatctttcagttttgccttgcgctcacaaattccatgctcagtgcattagaccatggttgatgcaacaggggacatgtccaacgtgcagactccacgttttgctaccagaagaattccctggtcaccccagccggcagttgcccaagatctgatacaaggtacccatgaagagattatgaactacttgaaggtggagactgtacggtggtgtgttggagctggcttgtaatgtcttatgagtgacaatcgttagtttgaggaattttgtgagacagttgtcaaattgttgctagcttgaaatctgcggcaattggagtatttacaccatagaaatgctataagtgaagacctacctttcccttaagagctagttgttaaacctttaccagcataccactggaccttgtctaaaatttctttgtgttcccagtgtcttgcccagtagatacaagataaatattgccagaatcagatatcaggaagtagtaagaaaaggagttaatatgcaaactaaatcactcgctcaattgaataattgagatcttctgttcatttgttccttggaccttaatcatttgcattttggagaaaattttttctgctttaaaagtctgtaatttcagtttttgtgtcggggagagggaaaaactatttgtctgtagttgctttttgtgacaaagtgaatacccactgggctaagtttcatatctaaagcttgtcactaagaattttcatttttaggggtcaaaaacctattttgaaaatagtgttgtgtgaatgctgtaagtgttgtacatgtctctggtttcagaattaaaagaattcagagtta

SEQ ID NO: 49556 - DNA, 333 bp, Homo sapiens
attctcgggagaggaatcggttaggagaagggggattcctcactcagctgtgcgctctgatttcgtgcgcttcctcgtccttcatgttggatggccagtttttcgtttgtgcgtcatcctctacctgagaaatggtcgcttgcccctagtctagacacggtgaggagctctgaggagaagaatcttgggccctagattttgaggcggcctgggaggggcctcgtttttaaatctctcctacacccgccccttctgcccggggatggtagtttctcagagtcaacctattggcattatgtggcaaattagtcatgccctgaccaaagtatttgt

SEQ ID NO: 49557 - DNA, 5368 bp, Homo sapiens
attctcgggagaggaatcggttaggagaagggggattcctcactcagctgtgcgctctgatttcgtgcgcttcctcgtccttcatgttggatggccagtttttcgtttgtgcgtcatcctctacctgagaaatggtcgcttgcccctagtctagacacgcattaaagggcagtatttaaagtcagttggcaagcagtggaataagatttttgtaaagaaaccttgtgcagcatggattctctaccagatgaattttttgtgaggcatcctgctgtggaggatcagaggaaggaagaaactgagaataagctagaaaaatcatctggtcaactgaacaaacaggaaaatgacatacctactgatcttgtccctgttaacctactattagaagtgaagaagttattaaatgcaattaatactctaccaaaaggtgtggttcctcacattaagaagttcttacaagaagatttttccttccaaactatgcagagagaagttgcagctaacagccagaatggtgaggaaattgttcctgctttgactttacgtttcttgattacacagctagaagcagcacttaggaacattcaagctggcaattataccgcacaccagattaatattggttattatttgacattactgtttttatatggagtagcactcactgaaagaggaaagaaagaggattatacagaagctgagaataaatttctggtgatgaagatgatgatccaagaaaatgaaatttgtgaaaactttatgtctttagtttattttggacgtggtttactgcgatgtgctcaaaagagatataatggaggactgctagaatttcataaaagcttacaagaaattggagacaaaaatgaccattggtttgacatagatcctacagaagatgaagatttacctacaacttttaaagatcttcttaataattttatcaagacaactgaaagcaatataatgaagcagacgatttgtagttacctagattgtgaacgatcttgtgaagctgacattttgaagaacaccagttataagggattttttcagttaatgtgcagtaaaagttgctgtgtttatttccataaaatttgctggaaaaagttcaagaatttaaagtatccaggtgaaaatgatcagagttttagtgggaaaaaatgtttgaaggaaggatgtacaggtgacatggtaaggatgctgcaatgtgatgtacctggaattgttaaaattttgtttgaagttgtgagaaaggatgaatatatcaccattgaaaatttaggagcaagttatagaaagttgatatctctgaaaataactgatactgatataagaccgaagatcagtttaaaatttaatacaaaagatgaaatgcctatcttcaagcttgattataattatttctatcatctgcttcatataattattatttctggtactgacattgttcgacaaatatttgatgaggctatgccacctcctcttttgaaaaaagagcttcttatacacaagaatgtgctggaatcctactacaaccatctttggaccaatcatcctttgggtggatcatggcatctgctttatcctcctaacaaggagttaccgcaatccaaacagtttgacttatgcctcctgttagctcttataaaacatttaaatgtgttccctgcacccaaaaaaggatggaatatggaaccgccatcttctgacatctctaaatctgcagacatcctgagactgtgcaaatacagggatatcctccttagtgagattttgatgaatggtctcactgagtcacagttcaattcaatttggaaaaaagtttcagatattcttctgcgccttgggatgatgcaagaggatattgacaaagtgaaggagaatcccattgagaatatctcccttgattaccatcagctatctgtctacctaggcataccagtaccagaaatcatacagaggatgttatcctgctatcaacaaggaattgctctacagtcaataacaggcagtcagcgtattgaaatagaagagttacagaatgaggaagaagaactaagtccacctctcatggagtacaatataaatgtgaaatcacaccctgagatacagtttgcagaaattaataaagatgggacctcaatacccagtgaatcttcaacagaatctcttaaagatctccaggaagttaagagtaaacaaaggaaaaagaagaagactaagaataaaaagaataaagactcaaaagaagaccaagtcccatatgtggtagaaaaggaagagcagttgaggaaagaacaagcaaatccacactcagtcagtagacttataaaagatgatgcaagtgatgttcaagaggattctgcaatggaagacaagttctatagcctggatgaattgcatattctggacatgatagagcagggctcagctggcaaagtaactacagactatggagaaactgaaaaggaaaggcttgctcgtcaaaggcagctttataaattgcactatcagtgtgaagatttcaaaagacagttgagaacagtgacttttcggtggcaagaaaaccaaatgcagattaaaaagaaagacaaaattatcgcatctcttaatcaacaagttgcttttggaatcaataaggtttccaaattacagcgtcaaatccatgctaaagataatgaaatcaagaaccttaaagagcaactttctatgaaaagatctcagtgggaaatggaaaaacataatctggaaagcacaatgaaaacatacgtaagcaaactgaacgcagaaactagcagagctttaacagccgaggtgtatttcttacagtgtcgtagggattttggtttgcttcatctagagcagactgaaaaggaatgtctcaatcagcttgccagggtgactcacatggcagcaagcaacctagaatcacttcaattaaaggctgcggtagacagttggaatgccattgtggcagatgttagaaacaagattgcattcctcaggacacagtacaatgaacaaataaacaaagtcaagcaaggatttgccttgagtaccttgcctccagtccagcttcctcctccaccacccagtcctgagatactgatgcagcagttcttaggaagaccccttgtgaaagaatctttctttagacccatacttactgttcctcaaatgcctgcagtttgcccgggagtcgtctctgcaactggccaacctagagcccccctgatgactggcatagcctgggctctgccagcgcctgtgggagacgctgtgcctcccagtgcaggtctgcggagtgatccctccatcatgaattgggagagaattacagacaggctgaaaactgcctttccacagcaaaccagaaaggaacttacagatttcttacggaaattgaaggatgcttatggaaaatccttgtctgaactgacatttgatgaaattgtttgcaagatttcccagtttattgaccccaaaaagtctcagagtcaaggaaaatcagtgtcaaatgttaattgtgtttcacctagtcattctccatcacagcctgatgctgcccagcccccaaaaccagcctggaggccactcacttcacagggtcctgccacatgggaaggagccagtaatccagatgaggaagaggaagaagaagagccttgtgtgatctgtcatgagaatctgtctccagaaaatctttcagttttgccttgcgctcacaaattccatgctcagtgcattagaccatggttgatgcaacaggggacatgtccaacgtgcagactccacgttttgctaccagaagaattccctggtcaccccagccggcagttgcccaagatctgatacaaggtacccatgaagagattatgaactacttgaaggtggagactgtacggtggtgtgttggagctggcttgtaatgtcttatgagtgacaatcgttagtttgaggaattttgtgagacagttgtcaaattgttgctagcttgaaatctgcggcaattggagtatttacaccatagaaatgctataagtgaagacctacctttcccttaagagctagttgttaaacctttaccagcataccactggaccttgtctaaaatttctttgtgttcccagtgtcttgcccagtagatacaagataaatattgccagaatcagatatcaggaagtagtaagaaaaggagttaatatgcaaactaaatcactcgctcaattgaataattgagatcttctgttcatttgttccttggaccttaatcatttgcattttggagaaaattttttctgctttaaaagtctgtaatttcagtttttgtgtcggggagagggaaaaactatttgtctgtagttgctttttgtgacaaagtgaatacccactgggctaagtttcatatctaaagcttgtcactaagaattttcatttttaggggtcaaaaacctattttgaaaatagtgttgtgtgaatgctgtaagtgttgtacatgtctctggtttcagaattaaaagaattcagagttaccttgtgagataaatgttctttgcttcatattcacagtttcacctccatttaaatttatggggaagaataaatgtttcctgactcagaaacaattttgcctccatatttcagtgcaaatatattttgaagttacttttaaatatttatttaaaacctctgtttctgtaactgtatgttaaacgtattcttctgtaatgagaatagactggaacatgtgagggaaaaatattaaaaaaaagatggcagtcatctagacatgtaaaatgccaagaatgtcttagaattgcacaatttagaatttatagagcctttaatcaccttgtctagcaccttgtattagtccattttcatgctgctgataaagacatacctgagattgggcaatttacaaaagaaagaggtttaatggacttacagttccacatgactaaggaggcctcacaatcatggtggaaggcaaagaggagcaagtcacatcttacatggatggcagcagacaaggagagagagcttgtgcagggaaactcccatttttaaaaccatcagatctcatgaggcttactatcacgagaacagcatgggaaagacctgcccccgtgattaaattatttcccaccaggcccctcccacaacatggaataatgggagatacaagatatttgggtggagacacagagccaaaccatatcacaccttaaggtcatggtcatatagctagttatcttgtaaaaccaatgtttcttagttcatacttacaactgcaatttcactttcatttagaaaagaataaatgtttcttaattgaacaactattttatctgtgtatttc

SEQ ID NO: 49558 - DNA, 5255 bp, Homo sapiens
ggggaggtattgctccggagggtgttactcgttagcgtcagtttttcattaaagggcagtatttaaagtcagttggcaagcagtggaataagatttttgtaaagaaaccttgtgcagcatggattctctaccagatgaattttttgtgaggcatcctgctgtggaggatcagaggaaggaagaaactgagaataagctagaaaaatcatctggtcaactgaacaaacaggaaaatgacatacctactgatcttgtccctgttaacctactattagaagtgaagaagttattaaatgcaattaatactctaccaaaaggtgtggttcctcacattaagaagttcttacaagaagatttttccttccaaactatgcagagagaagttgcagctaacagccagaatggtgaggaaattgttcctgctttgactttacgtttcttgattacacagctagaagcagcacttaggaacattcaagctggcaattataccgcacaccagattaatattggttattatttgacattactgtttttatatggagtagcactcactgaaagaggaaagaaagaggattatacagaagctgagaataaatttctggtgatgaagatgatgatccaagaaaatgaaatttgtgaaaactttatgtctttagtttattttggacgtggtttactgcgatgtgctcaaaagagatataatggaggactgctagaatttcataaaagcttacaagaaattggagacaaaaatgaccattggtttgacatagatcctacagaagatgaagatttacctacaacttttaaagatcttcttaataattttatcaagacaactgaaagcaatataatgaagcagacgatttgtagttacctagattgtgaacgatcttgtgaagctgacattttgaagaacaccagttataagggattttttcagttaatgtgcagtaaaagttgctgtgtttatttccataaaatttgctggaaaaagttcaagaatttaaagtatccaggtgaaaatgatcagagttttagtgggaaaaaatgtttgaaggaaggatgtacaggtgacatggtaaggatgctgcaatgtgatgtacctggaattgttaaaattttgtttgaagttgtgagaaaggatgaatatatcaccattgaaaatttaggagcaagttatagaaagttgatatctctgaaaataactgatactgatataagaccgaagatcagtttaaaatttaatacaaaagatgaaatgcctatcttcaagcttgattataattatttctatcatctgcttcatataattattatttctggtactgacattgttcgacaaatatttgatgaggctatgccacctcctcttttgaaaaaagagcttcttatacacaagaatgtgctggaatcctactacaaccatctttggaccaatcatcctttgggtggatcatggcatctgctttatcctcctaacaaggagttaccgcaatccaaacagtttgacttatgcctcctgttagctcttataaaacatttaaatgtgttccctgcacccaaaaaaggatggaatatggaaccgccatcttctgacatctctaaatctgcagacatcctgagactgtgcaaatacagggatatcctccttagtgagattttgatgaatggtctcactgagtcacagttcaattcaatttggaaaaaagtttcagatattcttctgcgccttgggatgatgcaagaggatattgacaaagtgaaggagaatcccattgagaatatctcccttgattaccatcagctatctgtctacctaggcataccagtaccagaaatcatacagaggatgttatcctgctatcaacaaggaattgctctacagtcaataacaggcagtcagcgtattgaaatagaagagttacagaatgaggaagaagaactaagtccacctctcatggagtacaatataaatgtgaaatcacaccctgagatacagtttgcagaaattaataaagatgggacctcaatacccagtgaatcttcaacagaatctcttaaagatctccaggaagttaagagtaaacaaaggaaaaagaagaagactaagaataaaaagaataaagactcaaaagaagaccaagtcccatatgtggtagaaaaggaagagcagttgaggaaagaacaagcaaatccacactcagtcagtagacttataaaagatgatgcaagtgatgttcaagaggattctgcaatggaagacaagttctatagcctggatgaattgcatattctggacatgatagagcagggctcagctggcaaagtaactacagactatggagaaactgaaaaggaaaggcttgctcgtcaaaggcagctttataaattgcactatcagtgtgaagatttcaaaagacagttgagaacagtgacttttcggtggcaagaaaaccaaatgcagattaaaaagaaagacaaaattatcgcatctcttaatcaacaagttgcttttggaatcaataaggtttccaaattacagcgtcaaatccatgctaaagataatgaaatcaagaaccttaaagagcaactttctatgaaaagatctcagtgggaaatggaaaaacataatctggaaagcacaatgaaaacatacgtaagcaaactgaacgcagaaactagcagagctttaacagccgaggtgtatttcttacagtgtcgtagggattttggtttgcttcatctagagcagactgaaaaggaatgtctcaatcagcttgccagggtgactcacatggcagcaagcaacctagaatcacttcaattaaaggctgcggtagacagttggaatgccattgtggcagatgttagaaacaagattgcattcctcaggacacagtacaatgaacaaataaacaaagtcaagcaaggatttgccttgagtaccttgcctccagtccagcttcctcctccaccacccagtcctgagatactgatgcagcagttcttaggaagaccccttgtgaaagaatctttctttagacccatacttactgttcctcaaatgcctgcagtttgcccgggagtcgtctctgcaactggccaacctagagcccccctgatgactggcatagcctgggctctgccagcgcctgtgggagacgctgtgcctcccagtgcaggtctgcggagtgatccctccatcatgaattgggagagaattacagacaggctgaaaactgcctttccacagcaaaccagaaaggaacttacagatttcttacggaaattgaaggatgcttatggaaaatccttgtctgaactgacatttgatgaaattgtttgcaagatttcccagtttattgaccccaaaaagtctcagagtcaaggaaaatcagtgtcaaatgttaattgtgtttcacctagtcattctccatcacagcctgatgctgcccagcccccaaaaccagcctggaggccactcacttcacagggtcctgccacatgggaaggagccagtaatccagatgaggaagaggaagaagaagagccttgtgtgatctgtcatgagaatctgtctccagaaaatctttcagttttgccttgcgctcacaaattccatgctcagtgcattagaccatggttgatgcaacaggggacatgtccaacgtgcagactccacgttttgctaccagaagaattccctggtcaccccagccggcagttgcccaagatctgatacaaggtacccatgaagagattatgaactacttgaaggtggagactgtacggtggtgtgttggagctggcttgtaatgtcttatgagtgacaatcgttagtttgaggaattttgtgagacagttgtcaaattgttgctagcttgaaatctgcggcaattggagtatttacaccatagaaatgctataagtgaagacctacctttcccttaagagctagttgttaaacctttaccagcataccactggaccttgtctaaaatttctttgtgttcccagtgtcttgcccagtagatacaagataaatattgccagaatcagatatcaggaagtagtaagaaaaggagttaatatgcaaactaaatcactcgctcaattgaataattgagatcttctgttcatttgttccttggaccttaatcatttgcattttggagaaaattttttctgctttaaaagtctgtaatttcagtttttgtgtcggggagagggaaaaactatttgtctgtagttgctttttgtgacaaagtgaatacccactgggctaagtttcatatctaaagcttgtcactaagaattttcatttttaggggtcaaaaacctattttgaaaatagtgttgtgtgaatgctgtaagtgttgtacatgtctctggtttcagaattaaaagaattcagagttaccttgtgagataaatgttctttgcttcatattcacagtttcacctccatttaaatttatggggaagaataaatgtttcctgactcagaaacaattttgcctccatatttcagtgcaaatatattttgaagttacttttaaatatttatttaaaacctctgtttctgtaactgtatgttaaacgtattcttctgtaatgagaatagactggaacatgtgagggaaaaatattaaaaaaaagatggcagtcatctagacatgtaaaatgccaagaatgtcttagaattgcacaatttagaatttatagagcctttaatcaccttgtctagcaccttgtattagtccattttcatgctgctgataaagacatacctgagattgggcaatttacaaaagaaagaggtttaatggacttacagttccacatgactaaggaggcctcacaatcatggtggaaggcaaagaggagcaagtcacatcttacatggatggcagcagacaaggagagagagcttgtgcagggaaactcccatttttaaaaccatcagatctcatgaggcttactatcacgagaacagcatgggaaagacctgcccccgtgattaaattatttcccaccaggcccctcccacaacatggaataatgggagatacaagatatttgggtggagacacagagccaaaccatatcacaccttaaggtcatggtcatatagctagttatcttgtaaaaccaatgtttcttagttcatacttacaactgcaatttcactttcatttagaaaagaataaatgtttcttaattgaacaactattttatctgtgtatttc

SEQ ID NO: 49559 - DNA, 5336 bp, Homo sapiens
attctcgggagaggaatcggttaggagaagggggattcctcactcagctgtgcgctctgatttcgtgcgcttcctcgtccttcatgttggatggccagtttttcgtttgtgcgtcatcctctacctgagaaatggtcgcttgcccctagtctagacacgcattaaagggcagtatttaaagtcagttggcaagcagtggaataagatttttgtaaagaaaccttgtgcagcatggattctctaccagatgaattttttgtgaggcatcctgctgtggaggatcagaggaaggaagaaactgagaataagctagaaaaatcatctggtcaactgaacaaacaggaaaatgacatacctactgatcttgtccctgttaacctactattagaagtgaagaagttattaaatgcaattaatactctaccaaaaggtgtggttcctcacattaagaagttcttacaagaagatttttccttccaaactatgcagagagaagttgcagctaacagccagaatggtgaggaaattgttcctgctttgactttacgtttcttgattacacagctagaagcagcacttaggaacattcaagctggcaattataccgcacaccagattaatattggttattatttgacattactgtttttatatggagtagcactcactgaaagaggaaagaaagaggattatacagaagctgagaataaatttctggtgatgaagatgatgatccaagaaaatgaaatttgtgaaaactttatgtctttagtttattttggacgtggtttactgcgatgtgctcaaaagagatataatggaggactgctagaatttcataaaagcttacaagaaattggagacaaaaatgaccattggtttgacatagatcctacagaagatgaagatttacctacaacttttaaagatcttcttaataattttatcaagacaactgaaagcaatataatgaagcagacgatttgtagttacctagattgtgaacgatcttgtgaagctgacattttgaagaacaccagttataagggattttttcagttaatgtgcagtaaaagttgctgtgtttatttccataaaatttgctggaaaaagttcaagaatttaaagtatccaggtgaaaatgatcagagttttagtgggaaaaaatgtttgaaggaaggatgtacaggtgacatggtaaggatgctgcaatgtgatgtacctggaattgttaaaattttgtttgaagttgtgagaaaggatgaatatatcaccattgaaaatttaggagcaagttatagaaagttgatatctctgaaaataactgatactgatataagaccgaagatcagtttaaaatttaatacaaaagatgaaatgcctatcttcaagcttgattataattatttctatcatctgcttcatataattattatttctggtactgacattgttcgacaaatatttgatgaggctatgccacctcctcttttgaaaaaagagcttcttatacacaagaatgtgctggaatcctactacaaccatctttggaccaatcatcctttgggtggatcatggcatctgctttatcctcctaacaaggagttaccgcaatccaaacagtttgacttatgcctcctgttagctcttataaaacatttaaatgtgttccctgcacccaaaaaaggatggaatatggaaccgccatcttctgacatctctaaatctgcagacatcctgagactgtgcaaatacagggatatcctccttagtgagattttgatgaatggtctcactgagtcacagttcaattcaatttggaaaaaagtttcagatattcttctgcgccttgggatgatgcaagaggatattgacaaagtgaaggagaatcccattgagaatatctcccttgattaccatcagctatctgtctacctaggcataccagtaccagaaatcatacagaggatgttatcctgctatcaacaagggtattgaaatagaagagttacagaatgaggaagaagaactaagtccacctctcatggagtacaatataaatgtgaaatcacaccctgagatacagtttgcagaaattaataaagatgggacctcaatacccagtgaatcttcaacagaatctcttaaagatctccaggaagttaagagtaaacaaaggaaaaagaagaagactaagaataaaaagaataaagactcaaaagaagaccaagtcccatatgtggtagaaaaggaagagcagttgaggaaagaacaagcaaatccacactcagtcagtagacttataaaagatgatgcaagtgatgttcaagaggattctgcaatggaagacaagttctatagcctggatgaattgcatattctggacatgatagagcagggctcagctggcaaagtaactacagactatggagaaactgaaaaggaaaggcttgctcgtcaaaggcagctttataaattgcactatcagtgtgaagatttcaaaagacagttgagaacagtgacttttcggtggcaagaaaaccaaatgcagattaaaaagaaagacaaaattatcgcatctcttaatcaacaagttgcttttggaatcaataaggtttccaaattacagcgtcaaatccatgctaaagataatgaaatcaagaaccttaaagagcaactttctatgaaaagatctcagtgggaaatggaaaaacataatctggaaagcacaatgaaaacatacgtaagcaaactgaacgcagaaactagcagagctttaacagccgaggtgtatttcttacagtgtcgtagggattttggtttgcttcatctagagcagactgaaaaggaatgtctcaatcagcttgccagggtgactcacatggcagcaagcaacctagaatcacttcaattaaaggctgcggtagacagttggaatgccattgtggcagatgttagaaacaagattgcattcctcaggacacagtacaatgaacaaataaacaaagtcaagcaaggatttgccttgagtaccttgcctccagtccagcttcctcctccaccacccagtcctgagatactgatgcagcagttcttaggaagaccccttgtgaaagaatctttctttagacccatacttactgttcctcaaatgcctgcagtttgcccgggagtcgtctctgcaactggccaacctagagcccccctgatgactggcatagcctgggctctgccagcgcctgtgggagacgctgtgcctcccagtgcaggtctgcggagtgatccctccatcatgaattgggagagaattacagacaggctgaaaactgcctttccacagcaaaccagaaaggaacttacagatttcttacggaaattgaaggatgcttatggaaaatccttgtctgaactgacatttgatgaaattgtttgcaagatttcccagtttattgaccccaaaaagtctcagagtcaaggaaaatcagtgtcaaatgttaattgtgtttcacctagtcattctccatcacagcctgatgctgcccagcccccaaaaccagcctggaggccactcacttcacagggtcctgccacatgggaaggagccagtaatccagatgaggaagaggaagaagaagagccttgtgtgatctgtcatgagaatctgtctccagaaaatctttcagttttgccttgcgctcacaaattccatgctcagtgcattagaccatggttgatgcaacaggggacatgtccaacgtgcagactccacgttttgctaccagaagaattccctggtcaccccagccggcagttgcccaagatctgatacaaggtacccatgaagagattatgaactacttgaaggtggagactgtacggtggtgtgttggagctggcttgtaatgtcttatgagtgacaatcgttagtttgaggaattttgtgagacagttgtcaaattgttgctagcttgaaatctgcggcaattggagtatttacaccatagaaatgctataagtgaagacctacctttcccttaagagctagttgttaaacctttaccagcataccactggaccttgtctaaaatttctttgtgttcccagtgtcttgcccagtagatacaagataaatattgccagaatcagatatcaggaagtagtaagaaaaggagttaatatgcaaactaaatcactcgctcaattgaataattgagatcttctgttcatttgttccttggaccttaatcatttgcattttggagaaaattttttctgctttaaaagtctgtaatttcagtttttgtgtcggggagagggaaaaactatttgtctgtagttgctttttgtgacaaagtgaatacccactgggctaagtttcatatctaaagcttgtcactaagaattttcatttttaggggtcaaaaacctattttgaaaatagtgttgtgtgaatgctgtaagtgttgtacatgtctctggtttcagaattaaaagaattcagagttaccttgtgagataaatgttctttgcttcatattcacagtttcacctccatttaaatttatggggaagaataaatgtttcctgactcagaaacaattttgcctccatatttcagtgcaaatatattttgaagttacttttaaatatttatttaaaacctctgtttctgtaactgtatgttaaacgtattcttctgtaatgagaatagactggaacatgtgagggaaaaatattaaaaaaaagatggcagtcatctagacatgtaaaatgccaagaatgtcttagaattgcacaatttagaatttatagagcctttaatcaccttgtctagcaccttgtattagtccattttcatgctgctgataaagacatacctgagattgggcaatttacaaaagaaagaggtttaatggacttacagttccacatgactaaggaggcctcacaatcatggtggaaggcaaagaggagcaagtcacatcttacatggatggcagcagacaaggagagagagcttgtgcagggaaactcccatttttaaaaccatcagatctcatgaggcttactatcacgagaacagcatgggaaagacctgcccccgtgattaaattatttcccaccaggcccctcccacaacatggaataatgggagatacaagatatttgggtggagacacagagccaaaccatatcacaccttaaggtcatggtcatatagctagttatcttgtaaaaccaatgtttcttagttcatacttacaactgcaatttcactttcatttagaaaagaataaatgtttcttaattgaacaactattttatctgtgtatttc

SEQ ID NO: 49560 - DNA, 4561 bp, Homo sapiens
attctcgggagaggaatcggttaggagaagggggattcctcactcagctgtgcgctctgatttcgtgcgcttcctcgtccttcatgttggatggccagtttttcgtttgtgcgtcatcctctacctgagaaatggtcgcttgcccctagtctagacacgcattaaagggcagtatttaaagtcagttggcaagcagtggaataagatttttgtaaagaaaccttgtgcagcatggattctctaccagatgaattttttgtgaggcatcctgctgtggaggatcagaggaaggaagaaactgagaataagctagaaaaatcatctggtcaactgaacaaacaggaaaatgacatacctactgatcttgtccctgttaacctactattagaagtgaagaagttattaaatgcaattaatactctaccaaaaggtgtggttcctcacattaagaagttcttacaagaagatttttccttccaaactatgcagagagaagttgcagctaacagccagaatggtgaggaaattgttcctgctttgactttacgtttcttgattacacagctagaagcagcacttaggaacattcaagctggcaattataccgcacaccagattaatattggttattatttgacattactgtttttatatggagtagcactcactgaaagaggaaagaaagaggattatacagaagctgagaataaatttctggtgatgaagatgatgatccaagaaaatgaaatttgtgaaaactttatgtctttagtttattttggacgtggtttactgcgatgtgctcaaaagagatataatggaggactgctagaatttcataaaagcttacaagaaattggagacaaaaatgaccattggtttgacatagatcctacagaagatgaagatttacctacaacttttaaagatcttcttaataattttatcaagacaactgaaagcaatataatgaagcagacgatttgtagttacctagattgtgaacgatcttgtgaagctgacattttgaagaacaccagttataagggattttttcagttaatgtgcagtaaaagttgctgtgtttatttccataaaatttgctggaaaaagttcaagaatttaaagtatccaggtgaaaatgatcagagttttagtgggaaaaaatgtttgaaggaaggatgtacaggtgacatggtaaggatgctgcaatgtgatgtacctggaattgttaaaattttgtttgaagttgtgagaaaggatgaatatatcaccattgaaaatttaggagcaagttatagaaagttgatatctctgaaaataactgatactgatataagaccgaagatcagtttaaaatttaatacaaaagatgaaatgcctatcttcaagcttgattataattatttctatcatctgcttcatataattattatttctggtactgacattgttcgacaaatatttgatgaggctatgccacctcctcttttgaaaaaagagcttcttatacacaagaatgtgctggaatcctactacaaccatctttggaccaatcatcctttgggtggatcatggcatctgctttatcctcctaacaaggagttaccgcaatccaaacagtttgacttatgcctcctgttagctcttataaaacatttaaatgtgttccctgcacccaaaaaaggatggaatatggaaccgccatcttctgacatctctaaatctgcagacatcctgagactgtgcaaatacagggatatcctccttagtgagattttgatgaatggtctcactgagtcacagttcaattcaatttggaaaaaagtttcagatattcttctgcgccttgggatgatgcaagaggatattgacaaagtgaaggagaatcccattgagaatatctcccttgattaccatcagctatctgtctacctaggcataccagtaccagaaatcatacagaggatgttatcctgctatcaacaaggaattgctctacagtcaataacaggcagtcagcgtattgaaatagaagagttacagaatgaggaagaagaactaagtccacctctcatggagtacaatataaatgtgaaatcacaccctgagatacagtttgcagaaattaataaagatgggacctcaatacccagtgaatcttcaacagaatctcttaaagatctccaggaagttaagagtaaacaaaggaaaaagaagaagactaagaataaaaagaataaagactcaaaagaagaccaagtcccatatgtggtagaaaaggaagagcagttgaggaaagaacaagcaaatccacactcagtcagtagacttataaaagatgatgcaagtgatgttcaagaggattctgcaatggaagacaagttctatagcctggatgaattgcatattctggacatgatagagcagggctcagctggcaaagtaactacagactatggagaaactgaaaaggaaaggcttgctcgtcaaaggcagctttataaattgcactatcagtgtgaagatttcaaaagacagttgagaacagtgacttttcggtggcaagaaaaccaaatgcagattaaaaagaaagacaaaattatcgcatctcttaatcaacaagttgcttttggaatcaataaggtttccaaattacagcgtcaaatccatgctaaagataatgaaatcaagaaccttaaagagcaactttctatgaaaagatctcagtgggaaatggaaaaacataatctggaaagcacaatgaaaacatacgtaagcaaactgaacgcagaaactagcagagctttaacagccgaggtgtatttcttacagtgtcgtagggattttggtttgcttcatctagagcagactgaaaaggaatgtctcaatcagcttgccagggtgactcacatggcagcaagcaacctagaatcacttcaattaaaggctgcggtagacagttggaatgccattgtggcagatgttagaaacaagattgcattcctcaggtatttttagtcttcttctaccagacacagtacaatgaacaaataaacaaagtcaagcaaggatttgccttgagtaccttgcctccagtccagcttcctcctccaccacccagtcctgagatactgatgcagcagttcttaggaagaccccttgtgaaagaatctttctttagacccatacttactgttcctcaaatgcctgcagtttgcccgggagtcgtctctgcaactggccaacctagagcccccctgatgactggcatagcctgggctctgccagcgcctgtgggagacgctgtgcctcccagtgcaggtctgcggagtgatccctccatcatgaattgggagagaattacagacaggctgaaaactgcctttccacagcaaaccagaaaggaacttacagatttcttacggaaattgaaggatgcttatggaaaatccttgtctgaactgacatttgatgaaattgtttgcaagatttcccagtttattgaccccaaaaagtctcagagtcaaggaaaatcagtgtcaaatgttaattgtgtttcacctagtcattctccatcacagcctgatgctgcccagcccccaaaaccagcctggaggccactcacttcacagggtcctgccacatgggaaggagccagtaatccagatgaggaagaggaagaagaagagccttgtgtgatctgtcatgagaatctgtctccagaaaatctttcagttttgccttgcgctcacaaattccatgctcagtgcattagaccatggttgatgcaacaggggacatgtccaacgtgcagactccacgttttgctaccagaagaattccctggtcaccccagccggcagttgcccaagatctgatacaaggtacccatgaagagattatgaactacttgaaggtggagactgtacggtggtgtgttggagctggcttgtaatgtcttatgagtgacaatcgttagtttgaggaattttgtgagacagttgtcaaattgttgctagcttgaaatctgcggcaattggagtatttacaccatagaaatgctataagtgaagacctacctttcccttaagagctagttgttaaacctttaccagcataccactggaccttgtctaaaatttctttgtgttcccagtgtcttgcccagtagatacaagataaatattgccagaatcagatatcaggaagtagtaagaaaaggagttaatatgcaaactaaatcactcgctcaattgaataattgagatcttctgttcatttgttccttggaccttaatcatttgcattttggagaaaattttttctgctttaaaagtctgtaatttcagtttttgtgtcggggagagggaaaaactatttgtctgtagttgctttttgtgacaaagtgaatacccactgggctaagtttcatatctaaagcttgtcactaagaattttcatttttaggggtcaaaaacctattttgaaaatagtgttgtgtgaatgctgtaagtgttgtacatgtctctggtttcagaattaaaagaattcagagtta

SEQ ID NO: 49561 - DNA, 5273 bp, Homo sapiens
attctcgggagaggaatcggttaggagaagggggattcctcactcagctgtgcgctctgatttcgtgcgcttcctcgtccttcatgttggatggccagtttttcgtttgtgcgtcatcctctacctgagaaatggtcgcttgcccctagtctagacacggcatcctgctgtggaggatcagaggaaggaagaaactgagaataagctagaaaaatcatctggtcaactggtactgtgcagacagggggtgagactatccaactaaaagatgcacatgtttagacaggtattgtgagacacgcctaaaatcaattattatggaggtctaccaaaaggtgtggttcctcacattaagaagttcttacaagaagatttttccttccaaactatgcagagagaagttgcagctaacagccagaatggtgaggaaattgttcctgctttgactttacgtttcttgattacacagctagaagcagcacttaggaacattcaagctggcaattataccgcacaccagattaatattggttattatttgacattactgtttttatatggagtagcactcactgaaagaggaaagaaagaggattatacagaagctgagaataaatttctggtgatgaagatgatgatccaagaaaatgaaatttgtgaaaactttatgtctttagtttattttggacgtggtttactgcgatgtgctcaaaagagatataatggaggactgctagaatttcataaaagcttacaagaaattggagacaaaaatgaccattggtttgacatagatcctacagaagatgaagatttacctacaacttttaaagatcttcttaataattttatcaagacaactgaaagcaatataatgaagcagacgatttgtagttacctagattgtgaacgatcttgtgaagctgacattttgaagaacaccagttataagggattttttcagttaatgtgcagtaaaagttgctgtgtttatttccataaaatttgctggaaaaagttcaagaatttaaagtatccaggtgaaaatgatcagagttttagtgggaaaaaatgtttgaaggaaggatgtacaggtgacatggtaaggatgctgcaatgtgatgtacctggaattgttaaaattttgtttgaagttgtgagaaaggatgaatatatcaccattgaaaatttaggagcaagttatagaaagttgatatctctgaaaataactgatactgatataagaccgaagatcagtttaaaatttaatacaaaagatgaaatgcctatcttcaagcttgattataattatttctatcatctgcttcatataattattatttctggtactgacattgttcgacaaatatttgatgaggctatgccacctcctcttttgaaaaaagagcttcttatacacaagaatgtgctggaatcctactacaaccatctttggaccaatcatcctttgggtggatcatggcatctgctttatcctcctaacaaggagttaccgcaatccaaacagtttgacttatgcctcctgttagctcttataaaacatttaaatgtgttccctgcacccaaaaaaggatggaatatggaaccgccatcttctgacatctctaaatctgcagacatcctgagactgtgcaaatacagggatatcctccttagtgagattttgatgaatggtctcactgagtcacagttcaattcaatttggaaaaaagtttcagatattcttctgcgccttgggatgatgcaagaggatattgacaaagtgaaggagaatcccattgagaatatctcccttgattaccatcagctatctgtctacctaggcataccagtaccagaaatcatacagaggatgttatcctgctatcaacaaggaattgctctacagtcaataacaggcagtcagcgtattgaaatagaagagttacagaatgaggaagaagaactaagtccacctctcatggagtacaatataaatgtgaaatcacaccctgagatacagtttgcagaaattaataaagatgggacctcaatacccagtgaatcttcaacagaatctcttaaagatctccaggaagttaagagtaaacaaaggaaaaagaagaagactaagaataaaaagaataaagactcaaaagaagaccaagtcccatatgtggtagaaaaggaagagcagttgaggaaagaacaagcaaatccacactcagtcagtagacttataaaagatgatgcaagtgatgttcaagaggattctgcaatggaagacaagttctatagcctggatgaattgcatattctggacatgatagagcagggctcagctggcaaagtaactacagactatggagaaactgaaaaggaaaggcttgctcgtcaaaggcagctttataaattgcactatcagtgtgaagatttcaaaagacagttgagaacagtgacttttcggtggcaagaaaaccaaatgcagattaaaaagaaagacaaaattatcgcatctcttaatcaacaagttgcttttggaatcaataaggtttccaaattacagcgtcaaatccatgctaaagataatgaaatcaagaaccttaaagagcaactttctatgaaaagatctcagtgggaaatggaaaaacataatctggaaagcacaatgaaaacatacgtaagcaaactgaacgcagaaactagcagagctttaacagccgaggtgtatttcttacagtgtcgtagggattttggtttgcttcatctagagcagactgaaaaggaatgtctcaatcagcttgccagggtgactcacatggcagcaagcaacctagaatcacttcaattaaaggctgcggtagacagttggaatgccattgtggcagatgttagaaacaagattgcattcctcaggacacagtacaatgaacaaataaacaaagtcaagcaaggatttgccttgagtaccttgcctccagtccagcttcctcctccaccacccagtcctgagatactgatgcagcagttcttaggaagaccccttgtgaaagaatctttctttagacccatacttactgttcctcaaatgcctgcagtttgcccgggagtcgtctctgcaactggccaacctagagcccccctgatgactggcatagcctgggctctgccagcgcctgtgggagacgctgtgcctcccagtgcaggtctgcggagtgatccctccatcatgaattgggagagaattacagacaggctgaaaactgcctttccacagcaaaccagaaaggaacttacagatttcttacggaaattgaaggatgcttatggaaaatccttgtctgaactgacatttgatgaaattgtttgcaagatttcccagtttattgaccccaaaaagtctcagagtcaaggaaaatcagtgtcaaatgttaattgtgtttcacctagtcattctccatcacagcctgatgctgcccagcccccaaaaccagcctggaggccactcacttcacagggtcctgccacatgggaaggagccagtaatccagatgaggaagaggaagaagaagagccttgtgtgatctgtcatgagaatctgtctccagaaaatctttcagttttgccttgcgctcacaaattccatgctcagtgcattagaccatggttgatgcaacaggggacatgtccaacgtgcagactccacgttttgctaccagaagaattccctggtcaccccagccggcagttgcccaagatctgatacaaggtacccatgaagagattatgaactacttgaaggtggagactgtacggtggtgtgttggagctggcttgtaatgtcttatgagtgacaatcgttagtttgaggaattttgtgagacagttgtcaaattgttgctagcttgaaatctgcggcaattggagtatttacaccatagaaatgctataagtgaagacctacctttcccttaagagctagttgttaaacctttaccagcataccactggaccttgtctaaaatttctttgtgttcccagtgtcttgcccagtagatacaagataaatattgccagaatcagatatcaggaagtagtaagaaaaggagttaatatgcaaactaaatcactcgctcaattgaataattgagatcttctgttcatttgttccttggaccttaatcatttgcattttggagaaaattttttctgctttaaaagtctgtaatttcagtttttgtgtcggggagagggaaaaactatttgtctgtagttgctttttgtgacaaagtgaatacccactgggctaagtttcatatctaaagcttgtcactaagaattttcatttttaggggtcaaaaacctattttgaaaatagtgttgtgtgaatgctgtaagtgttgtacatgtctctggtttcagaattaaaagaattcagagttaccttgtgagataaatgttctttgcttcatattcacagtttcacctccatttaaatttatggggaagaataaatgtttcctgactcagaaacaattttgcctccatatttcagtgcaaatatattttgaagttacttttaaatatttatttaaaacctctgtttctgtaactgtatgttaaacgtattcttctgtaatgagaatagactggaacatgtgagggaaaaatattaaaaaaaagatggcagtcatctagacatgtaaaatgccaagaatgtcttagaattgcacaatttagaatttatagagcctttaatcaccttgtctagcaccttgtattagtccattttcatgctgctgataaagacatacctgagattgggcaatttacaaaagaaagaggtttaatggacttacagttccacatgactaaggaggcctcacaatcatggtggaaggcaaagaggagcaagtcacatcttacatggatggcagcagacaaggagagagagcttgtgcagggaaactcccatttttaaaaccatcagatctcatgaggcttactatcacgagaacagcatgggaaagacctgcccccgtgattaaattatttcccaccaggcccctcccacaacatggaataatgggagatacaagatatttgggtggagacacagagccaaaccatatcacaccttaaggtcatggtcatatagctagttatcttgtaaaaccaatgtttcttagttcatacttacaactgcaatttcactttcatttagaaaagaataaatgtttcttaattgaacaactattttatctgtgtatttc

SEQ ID NO: 49562 - DNA, 4753 bp, Homo sapiens
gcgtggtcgcggccgaggtacgcgggactgtttttatatggagtagcactcactgaaagaggaaagaaagaggattatacagaagctgagaataaatttctggtgatgaagatgatgatccaagaaaatgaaatttgtgaaaactttatgtctttagtttattttggacgtggtttactgcgatgtgctcaaaagagatataatggaggactgctagaatttcataaaagcttacaagaaattggagacaaaaatgaccattggtttgacatagatcctacagaagatgaagatttacctacaacttttaaagatcttcttaataattttatcaagacaactgaaagcaatataatgaagcagacgatttgtagttacctagattgtgaacgatcttgtgaagctgacattttgaagaacaccagttataagggattttttcagttaatgtgcagtaaaagttgctgtgtttatttccataaaatttgctggaaaaagttcaagaatttaaagtatccaggtgaaaatgatcagagttttagtgggaaaaaatgtttgaaggaaggatgtacaggtgacatggtaaggatgctgcaatgtgatgtacctggaattgttaaaattttgtttgaagttgtgagaaaggatgaatatatcaccattgaaaatttaggagcaagttatagaaagttgatatctctgaaaataactgatactgatataagaccgaagatcagtttaaaatttaatacaaaagatgaaatgcctatcttcaagcttgattataattatttctatcatctgcttcatataattattatttctggtactgacattgttcgacaaatatttgatgaggctatgccacctcctcttttgaaaaaagagcttcttatacacaagaatgtgctggaatcctactacaaccatctttggaccaatcatcctttgggtggatcatggcatctgctttatcctcctaacaaggagttaccgcaatccaaacagtttgacttatgcctcctgttagctcttataaaacatttaaatgtgttccctgcacccaaaaaaggatggaatatggaaccgccatcttctgacatctctaaatctgcagacatcctgagactgtgcaaatacagggatatcctccttagtgagattttgatgaatggtctcactgagtcacagttcaattcaatttggaaaaaagtttcagatattcttctgcgccttgggatgatgcaagaggatattgacaaagtgaaggagaatcccattgagaatatctcccttgattaccatcagctatctgtctacctaggcataccagtaccagaaatcatacagaggatgttatcctgctatcaacaaggaattgctctacagtcaataacaggcagtcagcgtattgaaatagaagagttacagaatgaggaagaagaactaagtccacctctcatggagtacaatataaatgtgaaatcacaccctgagatacagtttgcagaaattaataaagatgggacctcaatacccagtgaatcttcaacagaatctcttaaagatctccaggaagttaagagtaaacaaaggaaaaagaagaagactaagaataaaaagaataaagactcaaaagaagaccaagtcccatatgtggtagaaaaggaagagcagttgaggaaagaacaagcaaatccacactcagtcagtagacttataaaagatgatgcaagtgatgttcaagaggattctgcaatggaagacaagttctatagcctggatgaattgcatattctggacatgatagagcagggctcagctggcaaagtaactacagactatggagaaactgaaaaggaaaggcttgctcgtcaaaggcagctttataaattgcactatcagtgtgaagatttcaaaagacagttgagaacagtgacttttcggtggcaagaaaaccaaatgcagattaaaaagaaagacaaaattatcgcatctcttaatcaacaagttgcttttggaatcaataaggtttccaaattacagcgtcaaatccatgctaaagataatgaaatcaagaaccttaaagagcaactttctatgaaaagatctcagtgggaaatggaaaaacataatctggaaagcacaatgaaaacatacgtaagcaaactgaacgcagaaactagcagagctttaacagccgaggtgtatttcttacagtgtcgtagggattttggtttgcttcatctagagcagactgaaaaggaatgtctcaatcagcttgccagggtgactcacatggcagcaagcaacctagaatcacttcaattaaaggctgcggtagacagttggaatgccattgtggcagatgttagaaacaagattgcattcctcaggacacagtacaatgaacaaataaacaaagtcaagcaaggatttgccttgagtaccttgcctccagtccagcttcctcctccaccacccagtcctgagatactgatgcagcagttcttaggaagaccccttgtgaaagaatctttctttagacccatacttactgttcctcaaatgcctgcagtttgcccgggagtcgtctctgcaactggccaacctagagcccccctgatgactggcatagcctgggctctgccagcgcctgtgggagacgctgtgcctcccagtgcaggtctgcggagtgatccctccatcatgaattgggagagaattacagacaggctgaaaactgcctttccacagcaaaccagaaaggaacttacagatttcttacggaaattgaaggatgcttatggaaaatccttgtctgaactgacatttgatgaaattgtttgcaagatttcccagtttattgaccccaaaaagtctcagagtcaaggaaaatcagtgtcaaatgttaattgtgtttcacctagtcattctccatcacagcctgatgctgcccagcccccaaaaccagcctggaggccactcacttcacagggtcctgccacatgggaaggagccagtaatccagatgaggaagaggaagaagaagagccttgtgtgatctgtcatgagaatctgtctccagaaaatctttcagttttgccttgcgctcacaaattccatgctcagtgcattagaccatggttgatgcaacaggggacatgtccaacgtgcagactccacgttttgctaccagaagaattccctggtcaccccagccggcagttgcccaagatctgatacaaggtacccatgaagagattatgaactacttgaaggtggagactgtacggtggtgtgttggagctggcttgtaatgtcttatgagtgacaatcgttagtttgaggaattttgtgagacagttgtcaaattgttgctagcttgaaatctgcggcaattggagtatttacaccatagaaatgctataagtgaagacctacctttcccttaagagctagttgttaaacctttaccagcataccactggaccttgtctaaaatttctttgtgttcccagtgtcttgcccagtagatacaagataaatattgccagaatcagatatcaggaagtagtaagaaaaggagttaatatgcaaactaaatcactcgctcaattgaataattgagatcttctgttcatttgttccttggaccttaatcatttgcattttggagaaaattttttctgctttaaaagtctgtaatttcagtttttgtgtcggggagagggaaaaactatttgtctgtagttgctttttgtgacaaagtgaatacccactgggctaagtttcatatctaaagcttgtcactaagaattttcatttttaggggtcaaaaacctattttgaaaatagtgttgtgtgaatgctgtaagtgttgtacatgtctctggtttcagaattaaaagaattcagagttaccttgtgagataaatgttctttgcttcatattcacagtttcacctccatttaaatttatggggaagaataaatgtttcctgactcagaaacaattttgcctccatatttcagtgcaaatatattttgaagttacttttaaatatttatttaaaacctctgtttctgtaactgtatgttaaacgtattcttctgtaatgagaatagactggaacatgtgagggaaaaatattaaaaaaaagatggcagtcatctagacatgtaaaatgccaagaatgtcttagaattgcacaatttagaatttatagagcctttaatcaccttgtctagcaccttgtattagtccattttcatgctgctgataaagacatacctgagattgggcaatttacaaaagaaagaggtttaatggacttacagttccacatgactaaggaggcctcacaatcatggtggaaggcaaagaggagcaagtcacatcttacatggatggcagcagacaaggagagagagcttgtgcagggaaactcccatttttaaaaccatcagatctcatgaggcttactatcacgagaacagcatgggaaagacctgcccccgtgattaaattatttcccaccaggcccctcccacaacatggaataatgggagatacaagatatttgggtggagacacagagccaaaccatatcacaccttaaggtcatggtcatatagctagttatcttgtaaaaccaatgtttcttagttcatacttacaactgcaatttcactttcatttagaaaagaataaatgtttcttaattgaacaactattttatctgtgtatttc

SEQ ID NO: 49563 - DNA, 4721 bp, Homo sapiens
  misc_feature (86)..(86): n is a, c, g, or t
tcatggatggtgaagatctgcctagtgttactgatattcgaagacctcggctctacctcctcaagtggctaaaatctgataaggcnctaatgatgctctttaatgatggcacctttcaggtgaatttctaccatgatcatacaaaaatcatcatctgtagccaaaatgaagaataccttctcacctacatcaatgaggataggatatctacaactttcaggctgacaactctgctgatgtctggctgttcatcagaattaaaaaatcgaatggaatatgccctgaacatgctcttacaaagatgtaactgaaagacttttcgaatggaccctatgggactcctcttttccattgtgaacgatcttgtgaagctgacattttgaagaacaccagttataagggattttttcagttaatgtgcagtaaaagttgctgtgtttatttccataaaatttgctggaaaaagttcaagaatttaaagtatccaggtgaaaatgatcagagttttagtgggaaaaaatgtttgaaggaaggatgtacaggtgacatggtaaggatgctgcaatgtgatgtacctggaattgttaaaattttgtttgaagttgtgagaaaggatgaatatatcaccattgaaaatttaggagcaagttatagaaagttgatatctctgaaaataactgatactgatataagaccgaagatcagtttaaaatttaatacaaaagatgaaatgcctatcttcaagcttgattataattatttctatcatctgcttcatataattattatttctggtactgacattgttcgacaaatatttgatgaggctatgccacctcctcttttgaaaaaagagcttcttatacacaagaatgtgctggaatcctactacaaccatctttggaccaatcatcctttgggtggatcatggcatctgctttatcctcctaacaaggagttaccgcaatccaaacagtttgacttatgcctcctgttagctcttataaaacatttaaatgtgttccctgcacccaaaaaaggatggaatatggaaccgccatcttctgacatctctaaatctgcagacatcctgagactgtgcaaatacagggatatcctccttagtgagattttgatgaatggtctcactgagtcacagttcaattcaatttggaaaaaagtttcagatattcttctgcgccttgggatgatgcaagaggatattgacaaagtgaaggagaatcccattgagaatatctcccttgattaccatcagctatctgtctacctaggcataccagtaccagaaatcatacagaggatgttatcctgctatcaacaaggaattgctctacagtcaataacaggcagtcagcgtattgaaatagaagagttacagaatgaggaagaagaactaagtccacctctcatggagtacaatataaatgtgaaatcacaccctgagatacagtttgcagaaattaataaagatgggacctcaatacccagtgaatcttcaacagaatctcttaaagatctccaggaagttaagagtaaacaaaggaaaaagaagaagactaagaataaaaagaataaagactcaaaagaagaccaagtcccatatgtggtagaaaaggaagagcagttgaggaaagaacaagcaaatccacactcagtcagtagacttataaaagatgatgcaagtgatgttcaagaggattctgcaatggaagacaagttctatagcctggatgaattgcatattctggacatgatagagcagggctcagctggcaaagtaactacagactatggagaaactgaaaaggaaaggcttgctcgtcaaaggcagctttataaattgcactatcagtgtgaagatttcaaaagacagttgagaacagtgacttttcggtggcaagaaaaccaaatgcagattaaaaagaaagacaaaattatcgcatctcttaatcaacaagttgcttttggaatcaataaggtttccaaattacagcgtcaaatccatgctaaagataatgaaatcaagaaccttaaagagcaactttctatgaaaagatctcagtgggaaatggaaaaacataatctggaaagcacaatgaaaacatacgtaagcaaactgaacgcagaaactagcagagctttaacagccgaggtgtatttcttacagtgtcgtagggattttggtttgcttcatctagagcagactgaaaaggaatgtctcaatcagcttgccagggtgactcacatggcagcaagcaacctagaatcacttcaattaaaggctgcggtagacagttggaatgccattgtggcagatgttagaaacaagattgcattcctcaggacacagtacaatgaacaaataaacaaagtcaagcaaggatttgccttgagtaccttgcctccagtccagcttcctcctccaccacccagtcctgagatactgatgcagcagttcttaggaagaccccttgtgaaagaatctttctttagacccatacttactgttcctcaaatgcctgcagtttgcccgggagtcgtctctgcaactggccaacctagagcccccctgatgactggcatagcctgggctctgccagcgcctgtgggagacgctgtgcctcccagtgcaggtctgcggagtgatccctccatcatgaattgggagagaattacagacaggctgaaaactgcctttccacagcaaaccagaaaggaacttacagatttcttacggaaattgaaggatgcttatggaaaatccttgtctgaactgacatttgatgaaattgtttgcaagatttcccagtttattgaccccaaaaagtctcagagtcaaggaaaatcagtgtcaaatgttaattgtgtttcacctagtcattctccatcacagcctgatgctgcccagcccccaaaaccagcctggaggccactcacttcacagggtcctgccacatgggaaggagccagtaatccagatgaggaagaggaagaagaagagccttgtgtgatctgtcatgagaatctgtctccagaaaatctttcagttttgccttgcgctcacaaattccatgctcagtgcattagaccatggttgatgcaacaggggacatgtccaacgtgcagactccacgttttgctaccagaagaattccctggtcaccccagccggcagttgcccaagatctgatacaaggtacccatgaagagattatgaactacttgaaggtggagactgtacggtggtgtgttggagctggcttgtaatgtcttatgagtgacaatcgttagtttgaggaattttgtgagacagttgtcaaattgttgctagcttgaaatctgcggcaattggagtatttacaccatagaaatgctataagtgaagacctacctttcccttaagagctagttgttaaacctttaccagcataccactggaccttgtctaaaatttctttgtgttcccagtgtcttgcccagtagatacaagataaatattgccagaatcagatatcaggaagtagtaagaaaaggagttaatatgcaaactaaatcactcgctcaattgaataattgagatcttctgttcatttgttccttggaccttaatcatttgcattttggagaaaattttttctgctttaaaagtctgtaatttcagtttttgtgtcggggagagggaaaaactatttgtctgtagttgctttttgtgacaaagtgaatacccactgggctaagtttcatatctaaagcttgtcactaagaattttcatttttaggggtcaaaaacctattttgaaaatagtgttgtgtgaatgctgtaagtgttgtacatgtctctggtttcagaattaaaagaattcagagttaccttgtgagataaatgttctttgcttcatattcacagtttcacctccatttaaatttatggggaagaataaatgtttcctgactcagaaacaattttgcctccatatttcagtgcaaatatattttgaagttacttttaaatatttatttaaaacctctgtttctgtaactgtatgttaaacgtattcttctgtaatgagaatagactggaacatgtgagggaaaaatattaaaaaaaagatggcagtcatctagacatgtaaaatgccaagaatgtcttagaattgcacaatttagaatttatagagcctttaatcaccttgtctagcaccttgtattagtccattttcatgctgctgataaagacatacctgagattgggcaatttacaaaagaaagaggtttaatggacttacagttccacatgactaaggaggcctcacaatcatggtggaaggcaaagaggagcaagtcacatcttacatggatggcagcagacaaggagagagagcttgtgcagggaaactcccatttttaaaaccatcagatctcatgaggcttactatcacgagaacagcatgggaaagacctgcccccgtgattaaattatttcccaccaggcccctcccacaacatggaataatgggagatacaagatatttgggtggagacacagagccaaaccatatcacaccttaaggtcatggtcatatagctagttatcttgtaaaaccaatgtttcttagttcatacttacaactgcaatttcactttcatttagaaaagaataaatgtttcttaattgaacaactattttatctgtgtatttc

SEQ ID NO: 49564 - DNA, 2703 bp, Homo sapiens
tcactaaattatccttagatctttcatcttataggcatgaatatgttgctttttaaaaagtgtcttcctcctttgttacatccatgtgtgtaagtgagcatctgtgaacttttatcagtaacctacttattgacattatgtgttgttcctttattcatcagtgattatttaaggacagaagactaggattaaaataaaaatgataaaaacaaaaataattgtttccatagaatctagaaagaaatacctataatattagaaaacaaaagatctcagtggtgagaggaaatatattttgcaaaataacccattgggcaatttgaattacatatttaataaataattttttacctactaggttaagagtaaacaaaggaaaaagaagaagactaagaataaaaagaataaagactcaaaagaagaccaagtcccatatgtggtagaaaaggaagagcagttgaggaaagaacaagcaaatccacactcagtcagtagacttataaaagatgatgcaagtgatgttcaagaggattctgcaatggaagacaagttctatagcctggatgaattgcatattctggacatgatagagcagggctcagctggcaaagtaactacagactatggagaaactgaaaaggaaaggcttgctcgtcaaaggcagctttataaattgcactatcagtgtgaagatttcaaaagacagttgagaacagtgacttttcggtggcaagaaaaccaaatgcagattaaaaagaaagacaaaattatcgcatctcttaatcaacaagttgcttttggaatcaataaggtttccaaattacagcgtcaaatccatgctaaagataatgaaatcaagaaccttaaagagcaactttctatgaaaagatctcagtgggaaatggaaaaacataatctggaaagcacaatgaaaacatacgtaagcaaactgaacgcagaaactagcagagctttaacagccgaggtgtatttcttacagtgtcgtagggattttggtttgcttcatctagagcagactgaaaaggaatgtctcaatcagcttgccagggtgactcacatggcagcaagcaacctagaatcacttcaattaaaggctgcggtagacagttggaatgccattgtggcagatgttagaaacaagattgcattcctcaggacacagtacaatgaacaaataaacaaagtcaagcaaggatttgccttgagtaccttgcctccagtccagcttcctcctccaccacccagtcctgagatactgatgcagcagttcttaggaagaccccttgtgaaagaatctttctttagacccatacttactgttcctcaaatgcctgcagtttgcccgggagtcgtctctgcaactggccaacctagagcccccctgatgactggcatagcctgggctctgccagcgcctgtgggagacgctgtgcctcccagtgcaggtctgcggagtgatccctccatcatgaattgggagagaattacagacaggctgaaaactgcctttccacagcaaaccagaaaggaacttacagatttcttacggaaattgaaggatgcttatggaaaatccttgtctgaactgacatttgatgaaattgtttgcaagatttcccagtttattgaccccaaaaagtctcagagtcaaggaaaatcagtgtcaaatgttaattgtgtttcacctagtcattctccatcacagcctgatgctgcccagcccccaaaaccagcctggaggccactcacttcacagggtcctgccacatgggaaggagccagtaatccagatgaggaagaggaagaagaagagccttgtgtgatctgtcatgagaatctgtctccagaaaatctttcagttttgccttgcgctcacaaattccatgctcagtgcattagaccatggttgatgcaacaggggacatgtccaacgtgcagactccacgttttgctaccagaagaattccctggtcaccccagccggcagttgcccaagatctgatacaaggtacccatgaagagattatgaactacttgaaggtggagactgtacggtggtgtgttggagctggcttgtaatgtcttatgagtgacaatcgttagtttgaggaattttgtgagacagttgtcaaattgttgctagcttgaaatctgcggcaattggagtatttacaccatagaaatgctataagtgaagacctacctttcccttaagagctagttgttaaacctttaccagcataccactggaccttgtctaaaatttctttgtgttcccagtgtcttgcccagtagatacaagataaatattgccagaatcagatatcaggaagtagtaagaaaaggagttaatatgcaaactaaatcactcgctcaattgaataattgagatcttctgttcatttgttccttggaccttaatcatttgcattttggagaaaattttttctgctttaaaagtctgtaatttcagtttttgtgtcggggagagggaaaaactatttgtctgtagttgctttttgtgacaaagtgaatacccactgggctaagtttcatatctaaagcttgtcactaagaattttcatttttaggggtcaaaaacctattttgaaaatagtgttgtgtgaatgctgtaagtgttgtacatgtctctggtttcagaattaaaagaattcagagtta

SEQ ID NO: 49565 - DNA, 2835 bp, Homo sapiens
attctcgggagaggaatcggttaggagaagggggattcctcactcagctgtgcgctctgatttcgtgcgcttcctcgtccttcatgttggatggccagtttttcgtttgtgcgtcatcctctacctgagaaatggtcgcttgcccctagtctagacacgcattaaagggcagtatttaaagtcagttggcaagcagtggaataagatttttgtaaagaaaccttgtgcagcatggattctctaccagatgaattttttgtgaggcatcctgctgtggaggatcagaggaaggaagaaactgagaataagctagaaaaatcatctggtcaactgaacaaacaggaaaatgacatacctactgatcttgtccctgttaacctactattagaagtgaagaagttattaaatgcaattaatactctaccaaaaggtgtggttcctcacattaagaagttcttacaagaagatttttccttccaaactatgcagagagaagttgcagctaacagccagaatggtgaggaaattgttcctgctttgactttacgtttcttgattacacagctagaagcagcacttaggaacattcaagctggcaattataccgcacaccagattaatattggttattatttgacattactgtttttatatggagtagcactcactgaaagaggaaagaaagaggattatacagaagctgagaataaatttctggtgatgaagatgatgatccaagaaaatgaaatttgtgaaaactttatgtctttagtttattttggacgtggtttactgcgatgtgctcaaaagagatataatggaggactgctagaatttcataaaagcttacaagaaattggagacaaaaatgaccattggtttgacatagatcctacagaagatgaagatttacctacaacttttaaagatcttcttaataattttatcaagacaactgaaagcaatataatgaagcagacgatttgtagttacctagattgtgaacgatcttgtgaagctgacattttgaagaacaccagttataagggattttttcagttaatgtgcagtaaaagttgctgtgtttatttccataaaatttgctggaaaaagttcaagaatttaaagtatccaggtgaaaatgatcagagttttagtgggaaaaaatgtttgaaggaaggatgtacaggtgacatggtaaggatgctgcaatgtgatgtacctggaattgttaaaattttgtttgaagttgtgagaaaggatgaatatatcaccattgaaaatttaggagcaagttatagaaagttgatatctctgaaaataactgatactgatataagaccgaagatcagtttaaaatttaatacaaaagatgaaatgcctatcttcaagcttgattataattatttctatcatctgcttcatataattattatttctggtactgacattgttcgacaaatatttgatgaggctatgccacctcctcttttgaaaaaagagcttcttatacacaagaatgtgctggaatcctactacaaccatctttggaccaatcatcctttgggtggatcatggcatctgctttatcctcctaacaaggagttaccgcaatccaaacagtttgacttatgcctcctgttagctcttataaaacatttaaatgtgttccctgcacccaaaaaaggatggaatatggaaccgccatcttctgacatctctaaatctgcagacatcctgagactgtgcaaatacagggatatcctccttagtgagattttgatgaatggtctcactgagtcacagttcaattcaatttggaaaaaagtttcagatattcttctgcgccttgggatgatgcaagaggatattgacaaagtgaaggagaatcccattgagaatatctcccttgattaccatcagctatctgtctacctaggcataccagtaccagaaatcatacagaggatgttatcctgctatcaacaaggaattgctctacagtcaataacaggcagtcagcgtattgaaatagaagagttacagaatgaggaagaagaactaagtccacctctcatggagtacaatataaatgtgaaatcacaccctgagatacagtttgcagaaattaataaagatgggacctcaatacccagtgaatcttcaacagaatctcttaaagatctccaggaagttaagagtaaacaaaggaaaaagaagaagactaagaataaaaagaataaagactcaaaagaagaccaagtcccatatgtggtagaaaaggaagagcagttgaggaaagaacaagcaaatccacactcagtcagtagacttataaaagatgatgcaagtgatgttcaagaggattctgcaatggaagacaagttctatagcctggatgaattgcatattctggacatgatagagcaggtaagcatgattagagagggtgcctgccttctcttattgttatctggtttttcctgtgactctttaaacagcatcaccctttgaaaagcccagtggtttatactgtttgtgaggagaaagagaaaagcataaaaggtaaggagggatatatgaaggaaaatagaataaggaaaaaaaagaacgcctaggagctggaaacttcactttagccctcaaaccatttcctggctttaattatagggcaaagttgattacaaatgcatttcttgcaaacgtttttcgaataccacaaaggaaaaaaaaagactagcataatcctactagattacatgtcatgagaaaaatagttttgtaatataaagctgctttcatttttaaaaattaaatatgattgttaccataaaa

SEQ ID NO: 49566 - DNA, 2150 bp, Homo sapiens
ttttgaggaaaataatacatgcatatttcctgtgctcaatagggctcagctggcaaagtaactacagactatggagaaactgaaaaggaaaggcttgctcgtcaaaggcagctttataaattgcactatcagtgtgaagatttcaaaagacagttgagaacagtgacttttcggtggcaagaaaaccaaatgcagattaaaaagaaagacaaaattatcgcatctcttaatcaacaagttgcttttggaatcaataaggtttccaaattacagcgtcaaatccatgctaaagataatgaaatcaagaaccttaaagagcaactttctatgaaaagatctcagtgggaaatggaaaaacataatctggaaagcacaatgaaaacatacgtaagcaaactgaacgcagaaactagcagagctttaacagccgaggtgtatttcttacagtgtcgtagggattttggtttgcttcatctagagcagactgaaaaggaatgtctcaatcagcttgccagggtgactcacatggcagcaagcaacctagaatcacttcaattaaaggctgcggtagacagttggaatgccattgtggcagatgttagaaacaagattgcattcctcaggacacagtacaatgaacaaataaacaaagtcaagcaaggatttgccttgagtaccttgcctccagtccagcttcctcctccaccacccagtcctgagatactgatgcagcagttcttaggaagaccccttgtgaaagaatctttctttagacccatacttactgttcctcaaatgcctgcagtttgcccgggagtcgtctctgcaactggccaacctagagcccccctgatgactggcatagcctgggctctgccagcgcctgtgggagacgctgtgcctcccagtgcaggtctgcggagtgatccctccatcatgaattgggagagaattacagacaggctgaaaactgcctttccacagcaaaccagaaaggaacttacagatttcttacggaaattgaaggatgcttatggaaaatccttgtctgaactgacatttgatgaaattgtttgcaagatttcccagtttattgaccccaaaaagtctcagagtcaaggaaaatcagtgtcaaatgttaattgtgtttcacctagtcattctccatcacagcctgatgctgcccagcccccaaaaccagcctggaggccactcacttcacagggtcctgccacatgggaaggagccagtaatccagatgaggaagaggaagaagaagagccttgtgtgatctgtcatgagaatctgtctccagaaaatctttcagttttgccttgcgctcacaaattccatgctcagtgcattagaccatggttgatgcaacaggggacatgtccaacgtgcagactccacgttttgctaccagaagaattccctggtcaccccagccggcagttgcccaagatctgatacaaggtacccatgaagagattatgaactacttgaaggtggagactgtacggtggtgtgttggagctggcttgtaatgtcttatgagtgacaatcgttagtttgaggaattttgtgagacagttgtcaaattgttgctagcttgaaatctgcggcaattggagtatttacaccatagaaatgctataagtgaagacctacctttcccttaagagctagttgttaaacctttaccagcataccactggaccttgtctaaaatttctttgtgttcccagtgtcttgcccagtagatacaagataaatattgccagaatcagatatcaggaagtagtaagaaaaggagttaatatgcaaactaaatcactcgctcaattgaataattgagatcttctgttcatttgttccttggaccttaatcatttgcattttggagaaaattttttctgctttaaaagtctgtaatttcagtttttgtgtcggggagagggaaaaactatttgtctgtagttgctttttgtgacaaagtgaatacccactgggctaagtttcatatctaaagcttgtcactaagaattttcatttttaggggtcaaaaacctattttgaaaatagtgttgtgtgaatgctgtaagtgttgtacatgtctctggtttcagaattaaaagaattcagagtta

SEQ ID NO: 49567 - DNA, 1340 bp, Homo sapiens
tgctggcgaccgagaggacccccaccgccgatgggtccagatagtttacttttccaagtttactaacaagtttgccaagttcccccagtttattaccattagaccatacctttttgtccaatcatttaaaacaaatttttatataataagttttatttgtatgtaataaattttattatataaaaataagttttaatatatattatataaaaagttttaataaatacctaatatattatttaatatgataaaacttatattaaatgaaattttatgctgttctcttgtcaatctgtcttttgttatcttgctggtgtgcctgtcatgtgagggactgcaatctgatatgcctattttccacagtcaaagcaattacaagagaattgttacaattacccagttatgtcaagagatttttttttaattcactaaggtagagataaggagaatgtattaaaataggatattttaattataaatgcatgactggggagggggtattgtttttgaataaaatatgaggttatttgccatgacaaaaaaaaaaagaagtaggaaaatcccatggaaatttatgttccttctaacttttaaaactacctaaaaaatataattgatttaaattatatctcaatattccccattcttttatatccccttaaataggtacccatgaagagattatgaactacttgaaggtggagactgtacggtggtgtgttggagctggcttgtaatgtcttatgagtgacaatcgttagtttgaggaattttgtgagacagttgtcaaattgttgctagcttgaaatctgcggcaattggagtatttacaccatagaaatgctataagtgaagacctacctttcccttaagagctagttgttaaacctttaccagcataccactggaccttgtctaaaatttctttgtgttcccagtgtcttgcccagtagatacaagataaatattgccagaatcagatatcaggaagtagtaagaaaaggagttaatatgcaaactaaatcactcgctcaattgaataattgagatcttctgttcatttgttccttggaccttaatcatttgcattttggagaaaattttttctgctttaaaagtctgtaatttcagtttttgtgtcggggagagggaaaaactatttgtctgtagttgctttttgtgacaaagtgaatacccactgggctaagtttcatatctaaagcttgtcactaagaattttcatttttaggggtcaaaaacctattttgaaaatagtgttgtgtgaatgctgtaagtgttgtacatgtctctggtttcagaattaaaagaattcagagtta

SEQ ID NO: 49568 - DNA, 1713 bp, Homo sapiens
gacccatgcgtccgttgggtgagcttcactctatgagtcaagacggtagtacacggaagtgtctcattcagctagccaggggactcgcatgtctgaccgcaacctagaatcacttcaattaaaggctgcggtagacagttggaatgccattgtggcagatgttagaaacaagattgcattcctcaggacacagtacaatgaacaaataaacaaagtcaagcaaggatttgccttgagtaccttgcctccagtccagcttcctcctccaccacccagtcctgagatactgatgcagcagttcttaggaagaccccttgtgaaagaatctttctttagacccatacttactgttcctcaaatgcctgcagtttgcccgggagtcgtctctgcaactggccaacctagagcccccctgatgactggcatagcctgggctctgccagcgcctgtgggagacgctgtgcctcccagtgcaggtctgcggagtgatccctccatcatgaattgggagagaattacagacaggctgaaaactgcctttccacagcaaaccagaaaggaacttacagatttcttacggaaattgaaggatgcttatggaaaatccttgtctgaactgacatttgatgaaattgtttgcaagatttcccagtttattgaccccaaaaagtctcagagtcaaggaaaatcagtgtcaaatgttaattgtgtttcacctagtcattctccatcacagcctgatgctgcccagcccccaaaaccagcctggaggccactcacttcacagggtcctgccacatgggaaggagccagtaatccagatgaggaagaggaagaagaagagccttgtgtgatctgtcatgagaatctgtctccagaaaatctttcagttttgccttgcgctcacaaattccatgctcagtgcattagaccatggttgatgcaacaggggacatgtccaacgtgcagactccacgttttgctaccagaagaattccctggtcaccccagccggcagttgcccaagatctgatacaaggtacccatgaagagattatgaactacttgaaggtggagactgtacggtggtgtgttggagctggcttgtaatgtcttatgagtgacaatcgttagtttgaggaattttgtgagacagttgtcaaattgttgctagcttgaaatctgcggcaattggagtatttacaccatagaaatgctataagtgaagacctacctttcccttaagagctagttgttaaacctttaccagcataccactggaccttgtctaaaatttctttgtgttcccagtgtcttgcccagtagatacaagataaatattgccagaatcagatatcaggaagtagtaagaaaaggagttaatatgcaaactaaatcactcgctcaattgaataattgagatcttctgttcatttgttccttggaccttaatcatttgcattttggagaaaattttttctgctttaaaagtctgtaatttcagtttttgtgtcggggagagggaaaaactatttgtctgtagttgctttttgtgacaaagtgaatacccactgggctaagtttcatatctaaagcttgtcactaagaattttcatttttaggggtcaaaaacctattttgaaaatagtgttgtgtgaatgctgtaagtgttgtacatgtctctggtttcagaattaaaagaattcagagtta

SEQ ID NO: 49569 - DNA, 1535 bp, Homo sapiens
ctgttgttgttctacatacatttaaagtcagggcacatgcgtcactgcttatttttcttacttgacatattccctgcatttccatgtctgcctgtcctttagataaacagtaaaagtttcccatgtgccagtatttctcaaatggtttacatcagaatcacctggaggacttttaagctagattgtttggtcccatcccagggattctgaatcaacaggtttgcgatgggtccagatagtttacttttccaagtttactaacaagtttgccaagttcccccagtttattaccattagaccatacctttttgtccaatcatttaaaacaaatttttatataataagttttatttgtatgtaataaattttattatataaaaataagttttaatatatattatataaaaagttttaataaatacctaatatattatttaatatgataaaacttatattaaatgaaattttatgctgttctcttgtcaatctgtcttttgttatcttgctggtgtgcctgtcatgtgagggactgcaatctgatatgcctattttccacagtcaaagcaattacaagagaattgttacaattacccagttatgtcaagagatttttttttaattcactaaggtagagataaggagaatgtattaaaataggatattttaattataaatgcatgactggggagggggtattgtttttgaataaaatatgaggttatttgccatgacaaaaaaaaaaagaagtaggaaaatcccatggaaatttatgttccttctaacttttaaaactacctaaaaaatataattgatttaaattatatctcaatattccccattcttttatatccccttaaataggtacccatgaagagattatgaactacttgaaggtggagactgtacggtggtgtgttggagctggcttgtaatgtcttatgagtgacaatcgttagtttgaggaattttgtgagacagttgtcaaattgttgctagcttgaaatctgcggcaattggagtatttacaccatagaaatgctataagtgaagacctacctttcccttaagagctagttgttaaacctttaccagcataccactggaccttgtctaaaatttctttgtgttcccagtgtcttgcccagtagatacaagataaatattgccagaatcagatatcaggaagtagtaagaaaaggagttaatatgcaaactaaatcactcgctcaattgaataattgagatcttctgttcatttgttccttggaccttaatcatttgcattttggagaaaattttttctgctttaaaagtctgtaatttcagtttttgtgtcggggagagggaaaaactatttgtctgtagttgctttttgtgacaaagtgaatacccactgggctaagtttcatatctaaagcttgtcactaagaattttcatttttaggggtcaaaaacctattttgaaaatagtgttgtgtgaatgctgtaagtgttgtacatgtctctggtttcagaattaaaagaattcagagtta

SEQ ID NO: 49570 - DNA, 2395 bp, Homo sapiens
attctcgggagaggaatcggttaggagaagggggattcctcactcagctgtgcgctctgatttcgtgcgcttcctcgtccttcatgttggatggccagtttttcgtttgtgcgtcatcctctacctgagaaatggtcgcttgcccctagtctagacacgcattaaagggcagtatttaaagtcagttggcaagcagtggaataagatttttgtaaagaaaccttgtgcagcatggattctctaccagatgaattttttgtgaggcatcctgctgtggaggatcagaggaaggaagaaactgagaataagctagaaaaatcatctggtcaactgaacaaacaggaaaatgacatacctactgatcttgtccctgttaacctactattagaagtgaagaagttattaaatgcaattaatactctaccaaaaggtgtggttcctcacattaagaagttcttacaagaagatttttccttccaaactatgcagagagaagttgcagctaacagccagaatggtgaggaaattgttcctgctttgactttacgtttcttgattacacagctagaagcagcacttaggaacattcaagctggcaattataccgcacaccagattaatattggttattatttgacattactgtttttatatggagtagcactcactgaaagaggaaagaaagaggattatacagaagctgagaataaatttctggtgatgaagatgatgatccaagaaaatgaaatttgtgaaaactttatgtctttagtttattttggacgtggtttactgcgatgtgctcaaaagagatataatggaggactgctagaatttcataaaagcttacaagaaattggagacaaaaatgaccattggtttgacatagatcctacagaagatgaagatttacctacaacttttaaagatcttcttaataattttatcaagacaactgaaagcaatataatgaagcagacgatttgtagttacctagattgtgaacgatcttgtgaagctgacattttgaagaacaccagttataagggattttttcagttaatgtgcagtaaaagttgctgtgtttatttccataaaatttgctggaaaaagttcaagaatttaaagtatccaggtgaaaatgatcagagttttagtgggaaaaaatgtttgaaggaaggatgtacaggtgacatggtaaggatgctgcaatgtgatgtacctggaattgttaaaattttgtttgaagttgtgagaaaggatgaatatatcaccattgaaaatttaggagcaagttatagaaagttgatatctctgaaaataactgatactgatataagaccgaagatcagtttaaaatttaatacaaaagatgaaatgcctatcttcaagcttgattataattatttctatcatctgcttcatataattattatttctggtactgacattgttcgacaaatatttgatgaggctatgccacctcctcttttgaaaaaagagcttcttatacacaagaatgtgctggaatcctactacaaccatctttggaccaatcatcctttgggtggatcatggcatctgctttatcctcctaacaaggagttaccgcaatccaaacagtttgacttatgcctcctgttagctcttataaaacatttaaatgtgttccctgcacccaaaaaaggatggaatatggaaccgccatcttctgacatctctaaatctgcagacatcctgagactgtgcaaatacagggatatcctccttagtgagattttgatgaatggtctcactgagtcacagttcaattcaatttggaaaaaagtttcagatattcttctgcgccttgggatgatgcaagaggatattgacaaagtgaaggagaatcccattgagaatatctcccttgattaccatcagctatctgtctacctaggcataccagtaccagaaatcatacagaggatgttatcctgctatcaacaagggtattgaaatagaagagttacagaatgaggaagaagaactaagtccacctctcatggagtacaatataaatgtgaaatcacaccctgagatacagtttgcagaaattaataaagatgggacctcaatacccagtgaatcttcaacagaatctcttaaagatctccaggaagttaagagtaaacaaaggaaaaagaagaagactaagaataaaaagaataaagactcagaagaagaactaagtccacctctcatggagtacaatataaatgtgaaatcacaccctgagatacagtttgcagaaattaataaagatgggacctcaatacccagtgaatcttcaacagaatctcttaaagatctccaggaagttaagagtaaacaaaggaaaaagaagaagactaag

SEQ ID NO: 49571 - DNA, 1540 bp, Homo sapiens
attctcgggagaggaatcggttaggagaagggggattcctcactcagctgtgcgctctgatttcgtgcgcttcctcgtccttcatgttggatggccagtttttcgtttgtgcgtcatcctctacctgagaaatggtcgcttgcccctagtctagacacgcattaaagggcagtatttaaagtcagttggcaagcagtggaataagatttttgtaaagaaaccttgtgcagcatggattctctaccagatgaattttttgtgaggcatcctgctgtggaggatcagaggaaggaagaaactgagaataagctagaaaaatcatctggtcaactgaacaaacaggaaaatgacatacctactgatcttgtccctgttaacctactattagaagtgaagaagttattaaatgcaattaatactctaccaaaaggtgtggttcctcacattaagaagttcttacaagaagatttttccttccaaactatgcagagagaagttgcagctaacagccagaatggtgaggaaattgttcctgctttgactttacgtttcttgattacacagctagaagcagcacttaggaacattcaagctggcaattataccgcacaccagattaatattggttattatttgacattactgtttttatatggagtagcactcactgaaagaggaaagaaagaggattatacagaagctgagaataaatttctggtgatgaagatgatgatccaagaaaatgaaatttgtgaaaactttatgtctttagtttattttggacgtggtttactgcgatgtgctcaaaagagatataatggaggactgctagaatttcataaaagcttacaagaaattggagacaaaaatgaccattggtttgacatagatcctacagaagatgaagatttacctacaacttttaaagatcttcttaataattttatcaagacaactgaaagcaatataatgaagcagacgatttgtagttacctagattgtgaacgatcttgtgaagctgacattttgaagaacaccagttataagggattttttcagttaatgtgcagtaaaagttgctgtgtttatttccataaaatttgctggaaaaagttcaagaatttaaagtatccaggtgaaaatgatcagagttttagtgggaaaaaatgtttgaaggaaggatgtacaggtgacatggtaaggatgctgcaatgtgatgtacctggaattgttaaaattttgtttgaagttgtgagaaaggatgaatatatcaccattgaaaatttaggagcaagttatagaaagttgatatctctgaaaataactgatactgatataagaccgaagatcagtttaaaatttaatacaaaagaattgctctacagtcaataacaggcagtcagcgtattgaaatagaagagttacagaatgaggaagaagaactaagtccacctctcatggagtacaatataaatgtgaaatcacaccctgagatacagtttgccacaacacaaacacacacacacatcaccaacacacc

SEQ ID NO: 49572 - DNA, 346 bp, Homo sapiens
ctgttttctctaccaccatccagtaagggcatggccaattcgtcttctttaacatgagtctctaaagagatatggcacctaccaccattaccagtctttgatacattttggttacactttcagacaataattcaattgttagattctttactactacaatttgtgttctttgtgagaagatgctcttaatatacctcattttcatttaaaataggcatcctgctgtggaggatcagaggaaggaagaaactgagaataagctagaaaaatcatctggtcaactgggtaagagaaagtttaattttcattaactgttagttaattgataataactaattatatatgc

SEQ ID NO: 49573 - DNA, 4246 bp, Homo sapiens
gatgagattgatgattctttctcctggaaaacctttcatcacagagattcatctcagcattaaagggcagtatttaaagtcagttggcaagcagtggaataagatttttgtaaagaaaccttgtgcagcatggattctctaccagatgaattttttgtgaggcatcctgctgtggaggatcagaggaaggaagaaactgagaataagctagaaaaatcatctggtcaactgaacaaacaggaaaatgacatacctactgatcttgtccctgttaacctactattagaagtgaagaagttattaaatgcaattaatactctaccaaaaggtgtggttcctcacattaagaagttcttacaagaagatttttccttccaaactatgcagagagaagttgcagctaacagccagaatggtgaggaaattgttcctgctttgactttacgtttcttgattacacagctagaagcagcacttaggaacattcaagctggcaattataccgcacaccagattaatattggttattatttgacattactgtttttatatggagtagcactcactgaaagaggaaagaaagaggattatacagaagctgagaataaatttctggtgatgaagatgatgatccaagaaaatgaaatttgtgaaaactttatgtctttagtttattttggacgtggtttactgcgatgtgctcaaaagagatataatggaggactgctagaatttcataaaagcttacaagaaattggagacaaaaatgaccattggtttgacatagatcctacagaagatgaagatttacctacaacttttaaagatcttcttaataattttatcaagacaactgaaagcaatataatgaagcagacgatttgtagttacctagattgtgaacgatcttgtgaagctgacattttgaagaacaccagttataagggattttttcagttaatgtgcagtaaaagttgctgtgtttatttccataaaatttgctggaaaaagttcaagaatttaaagtatccaggtgaaaatgatcagagttttagtgggaaaaaatgtttgaaggaaggatgtacaggtgacatggtaaggatgctgcaatgtgatgtacctggaattgttaaaattttgtttgaagttgtgagaaaggatgaatatatcaccattgaaaatttaggagcaagttatagaaagttgatatctctgaaaataactgatactgatataagaccgaagatcagtttaaaatttaatacaaaagatgaaatgcctatcttcaagcttgattataattatttctatcatctgcttcatataattattatttctggtactgacattgttcgacaaatatttgatgaggctatgccacctcctcttttgaaaaaagagcttcttatacacaagaatgtgctggaatcctactacaaccatctttggaccaatcatcctttgggtggatcatggcatctgctttatcctcctaacaaggagttaccgcaatccaaacagtttgacttatgcctcctgttagctcttataaaacatttaaatgtgttccctgcacccaaaaaaggatggaatatggaaccgccatcttctgacatctctaaatctgcagacatcctgagactgtgcaaatacagggatatcctccttagtgagattttgatgaatggtctcactgagtcacagttcaattcaatttggaaaaaagtttcagatattcttctgcgccttgggatgatgcaagaggatattgacaaagtgaaggagaatcccattgagaatatctcccttgattaccatcagctatctgtctacctaggcataccagtaccagaaatcatacagaggatgttatcctgctatcaacaaggaattgctctacagtcaataacaggcagtcagcgtattgaaatagaagagttacagaatgaggaagaagaactaagtccacctctcatggagtacaatataaatgtgaaatcacaccctgagatacagtttgcagaaattaataaagatgggacctcaatacccagtgaatcttcaacagaatctcttaaagatctccaggaagttaagagtaaacaaaggaaaaagaagaagactaagaataaaaagaataaagactcaaaagaagaccaagtcccatatgtggtagaaaaggaagagcagttgaggaaagaacaagcaaatccacactcagtcagtagacttataaaagatgatgcaagtgatgttcaagaggattctgcaatggaagacaagttctatagcctggatgaattgcatattctggacatgatagagcagggctcagctggcaaagtaactacagactatggagaaactgaaaaggaaaggcttgctcgtcaaaggcagctttataaattgcactatcagtgtgaagatttcaaaagacagttgagaacagtgacttttcggtggcaagaaaaccaaatgcagattaaaaagaaagacaaaattatcgcatctcttaatcaacaagttgcttttggaatcaataaggtttccaaattacagcgtcaaatccatgctaaagataatgaaatcaagaaccttaaagagcaactttctatgaaaagatctcagtgggaaatggaaaaacataatctggaaagcacaatgaaaacatacgtaagcaaactgaacgcagaaactagcagagctttaacagccgaggtgtatttcttacagtgtcgtagggattttggtttgcttcatctagagcagactgaaaaggaatgtctcaatcagcttgccagggtgactcacatggcagcaagcaacctagaatcacttcaattaaaggctgcggtagacagttggaatgccattgtggcagatgttagaaacaagattgcattcctcaggacacagtacaatgaacaaataaacaaagtcaagcaaggatttgccttgagtaccttgcctccagtccagcttcctcctccaccacccagtcctgagatactgatgcagcagttcttaggaagaccccttgtgaaagaatctttctttagacccatacttactgttcctcaaatgcctgcagtttgcccgggagtcgtctctgcaactggccaacctagagcccccctgatgactggcatagcctgggctctgccagcgcctgtgggagacgctgtgcctcccagtgcaggtctgcggagtgatccctccatcatgaattgggagagaattacagacaggctgaaaactgcctttccacagcaaaccagaaaggaacttacagatttcttacggaaattgaaggatgcttatggaaaatccttgtctgaactgacatttgatgaaattgtttgcaagatttcccagtttattgaccccaaaaagtctcagagtcaaggaaaatcagtgtcaaatgttaattgtgtttcacctagtcattctccatcacagcctgatgctgcccagcccccaaaaccagcctggaggccactcacttcacagggtcctgccacatgggaaggagccagtaatccagatgaggaagaggaagaagaagagccttgtgtgatctgtcatgagaatctgtctccagaaaatctttcagttttgccttgcgctcacaaattccatgctcagtgcattagaccatggttgatgcaacaggggacatgtccaacgtgcagactccacgttttgctaccagaagaattccctggtcaccccagccggcagttgcccaagatctgatacaaggtcggggtgtctatgcaaaggaagctcagttttcttttattatgagctgcttgtttgagtggtgtaaaactatgtgctcttcaatatagtgctaaagaagccagctaattttatcaaagcagcagccaaagaagtcaggacaaatcttcaggacttgtgaaatgaactgaaagagcttgaagcagatggaattttaatagttacactatatatgctcttagtaggtttttttcttgtagtggaaacataactgttagcatatttcttaggatgttttttcttgtctttttaaattcttatttcactcatcctttactctcccctcaagtattctacactttaatttcctgaaataaatttaaggaaaagggaaatagtaaagaagtaggaatgggtgcagcacaccagcatggcacatgaatacacatgtaactaacctgcacattgtgcacatgtaccctaaaacttaaagtataataataat

SEQ ID NO: 49574 - DNA, 1822 bp, Homo sapiens
  misc_feature (1467)..(1467): n is a, c, g, or t
ggccccctggaaccaatgagagtgcgaccgagatgttccactcgctggcgtccgggccgctggtgatctccggtagcactcgggccggcggacagtgagggcgcgacaacaagggaggtgtcacagttttccatttagatcaacaacttcaagttcttaccatggaaaattccgagaagactgaagtggttctccttgcttgtggttcattcaatcccatcaccaacatgcacctcaggttgtttgagctggccaaggactacatgaatggaacaggaaggtacacagttgtcaaaggcatcatctctcctgttggtgatgcctacaagaagaaaggactcattcctgcctatcaccgggtcatcatggcagaacttgctaccaagaattctaaatgggtggaagttgatacatgggaaagtcttcagaaggagtggaaagagactctgaaggtgctaagacaccatcaagagaaattggaggctagtgactgtgatcaccagcagaactcacctactctagaaaggcctggaaggaagaggaagtggactgaaacacaagattctagtcaaaagaaatccctagagccaaaaacaaaagctgtgccaaaggtcaagctgctgtgtggggcagatttattggagtcctttgctgttcccaatttgtggaagagtgaagacatcacccaaatcgtggccaactatgggctcatatgtgttactcgggctggaaatgatgctcagaagtttatctatgaatcggatgtgctgtggaaacaccggagcaacattcacgtggtgaatgaatggatcgctaatgacatctcatccacaaaaatccggagagccctcagaaggggccagagcattcgctacttggtaccagatcttgtccaagaatacattgaaaagcataatttgtacagctctgagagtgaagacaggaatgctggggtcatcctggcccctttgcagagaaacactgcagaagctaagacataggaattctacagcatgatatttcagacttcccatttggggatctgaaacaatctgggagttaataactggggaaagaagttgtgatctgttgcctaaactaaagcttaaaagtttagtaaaaatcgtctgggcacagtggctcacgcctgtagtcccagctacttgggaggctgaggcaggagaatcacttgaccccaggtggtggaggttgcagtgagccaagattgcaccattgcactccagcctggcaacagagcaagactctgtctcaaaaaaaaaaaaaaatttagtaaaaatcaatggtaagctaaaataagtttttgtttgtttatttgtttttgagatggagtctctactaaaaatacaaaaaattagccaggcatggtgccgcataactataatcccagctacttgggaggctgaggcaggagaatcgcttgaacccgggaggcacaggttccagtgngccaaggttgtgccactgcactccagcctgggcaaaaaagcaaaactccatctcaaagagaaaaaaaaaaaagaccgggtgtggtggctcacacctgtaatcccagcactttgggaggcctaagtgggtggatcacgtgaggtcaagagttcaagaccagcctggccaatatggtgaaaccccatctctactaagaatacaaaaaattagctgagcatggtggtgggctcctgtagtcccagctacttgggaggctgaggcaggagaatcgcttgaacctgggaggcagaggttgcagtaagccaagatcgtgccattgcactccagcctgggtgacagagcgagactccatctc

SEQ ID NO: 49575 - DNA, 2075 bp, Homo sapiens
  misc_feature (1916)..(1916): n is a, c, g, or t
  misc_feature (1920)..(1920): n is a, c, g, or t
  misc_feature (1924)..(1924): n is a, c, g, or t
  misc_feature (1926)..(1926): n is a, c, g, or t
  misc_feature (1932)..(1932): n is a, c, g, or t
ggccccctggaaccaatgagagtgcgaccgagatgttccactcgctggcgtccgggccgctggtgatctccggtagcactcgggccggcggacagtgagggcgcgacaacaagggaggtgtcacagttttccatttagatcaacaacttcaagttcttaccatggaaaattccgagaagactgaagtggttctccttgcttgtggttcattcaatcccatcaccaacatgcacctcaggttgtttgagctggccaaggactacatgaatggaacaggaaggtacacagttgtcaaaggcatcatctctcctgttggtgatgcctacaagaagaaaggactcattcctgcctatcaccgggtcatcatggcagaacttgctaccaagaattctaaatgggtggaagttgatacatgggaaagtcttcagaaggagtggaaagagactctgaaggtgctaagacaccatcaagagaaattggaggctagtgactgtgatcaccagcagaactcacctactctagaaaggcctggaaggaagaggaagtggactgaaacacaagattctagtcaaaagaaatccctagagccaaaaacaaaagctgtgccaaaggtcaagctgctgtgtggggcagatttattggagtcctttgctgttcccaatttgtggaagagtgaagacatcacccaaatcgtggccaactatgggctcatatgtgttactcgggctggaaatgatgctcagaagtttatctatgaatcggatgtgctgtggaaacaccggagcaacattcacgtggtgaatgaatggatcgctaatgacatctcatccacaaaaatccggagagccctcagaaggggccagagcattcgctacttggtaccagatcttgtccaagaatacattgaaaagcataatttgtacagctctgagagtgaagacaggaatgctggggtcatcctggcccctttgcagagaaacactgcagaagctaagacataggaattctacagcatgatatttcagacttcccatttggggatctgaaacaatctgggagttaataactggggaaagaagttgtgatctgttgcctaaactaaagcttaaaagtttagtaaaaatcgtctgggcacagtggctcacgcctgtaatcccagcactttgggaggctgaggcaggtggatcacggggtcaagagatcgagaccatcctggccaatatggtgaaaccccatctctactaaaaatacaaaaattagctgtgtgtggtggcacgtgcctgtagtcccagctacttgggaggctgaggcaggagaatcacttgaccccaggtggtggaggttgcagtgagccaagattgcaccattgcactccagcctggcaacagagcaagactctgtctcaaaaaaaaaaaaaaatttagtaaaaatcaatggtaagctaaaataagtttttgtttgtttatttgtttttgagatggagtctctactaaaaatacaaaaaattagccaggcatggtgccgcataactataatcccagctacttgggaggctgaggcaggagaatcgcttgaactcctgacctcaggtgatctgcccacctcggccttccaaagtgctgggattacaggcatgagccactgcacccagcctgatcctattgttgcactatttatggagcaacaactttgtacaaagaacaagctttgtacagagaacaagcttggctttttctcccaacgccgaggatgctgttgatgctgccacgtaatagcataattttgggtgtcctcaaggacagaacttccactttgaataatggaagttagaacaatgaatttcacaggggaataaatattaatgactgacgtgaaaaacaaaaaaaaaacaaaaaacaaaaaaaaaaaacaaaaangaanagananaaaaanaaagaaaaacaagcaagaaacaacaaaacaaacaaaaaaaatacaaaacaaaacaacgaaaagaaaaaaacacgacaacgaggagccaggcgcggcccacagaagatacacccagcgaggaacggacaccagcatctagcacc

SEQ ID NO: 49576 - DNA, 1015 bp, Homo sapiens
  misc_feature (589)..(590): n is a, c, g, or t
ttttttggccatcatgaggatctaacaacagagtagaaggaaggatgccctaggtcagcatgcagggtggtgggagggctttcatcttccttacccaagcctctcttttcacttttctagaagtccagaagttgttatatgatgaaatagcctcctttaacgtttatttctgggtgccaagggaggcccattcctctaacattctcataatttttctcaaaggcctatgatctaaacatttcaccacggcatccactcagctgtgaggctgcgtacacagtctccacctctgaaatctgaacttcgtttaccagtggtgctgtttgaacttcataatgtcagcacttcctgaacacttactgtgtgcttggcttgtgctcctgagtgccttatatcataaggaaacggcaaaatcaggggactggtataaatggtgagctgagcttgaatctaagctttgtcttcagagccagtacccctaatctctctttctgtaaaatattacttttcaaagaatgaagttgtagccaaatcttgaaatttttcatttaccctaagtgaggacaaataaagctttcaacaacagttnnggtagtctgatggagatgagtccgacgtattcagtcctcacggaaggactaggctgaacttgcccagtgttagcaattccttggaactagaacagtggaatccgagggagaaggtgatatgggccataattaacttttgtgtttgtgtgtgtgtgtatgtgtgtgtgtgtttgcttctgagacagttttgctgtcctgggcaacaagagcaaaaactccctctcaacaaacaaaaacaaaacaagtgtactaagtccagtgcggtggctcacacctgtaatcccagcactttggaggccaagacaggaggagcacttgagcccagcatgagcaacagagtgagaccctgtgtctacaaaaatttttttaaaaattagccaggcagcagggcgcagtggctcacgcctgtaattccagcactttgg

SEQ ID NO: 49577 - DNA, 1935 bp, Homo sapiens
  misc_feature (1776)..(1776): n is a, c, g, or t
  misc_feature (1780)..(1780): n is a, c, g, or t
  misc_feature (1784)..(1784): n is a, c, g, or t
  misc_feature (1786)..(1786): n is a, c, g, or t
  misc_feature (1792)..(1792): n is a, c, g, or t
ggccccctggaaccaatgagagtgcgaccgagatgttccactcgctggcgtccgggccgctggtgatctccggtagcactcgggccggcggacagtgagggcgcgacaacaagggaggtgtcacagttttccatttagatcaacaacttcaagttcttaccatggaaaattccgagaagactgaagtggttctccttgcttgtggttcattcaatcccatcaccaacatgcacctcaggttgtttgagctggccaaggactacatgaatggaacaggaaggtacacagttgtcaaaggcatcatctctcctgttggtgatgcctacaagaagaaaggactcattcctgcctatcaccgggtcatcatggcagaacttgctaccaagaattctaaatgggtggaagttgatacatgggaaagtcttcagaaggagtggaaagagactctgaaggtgctaagctgtgccaaaggtcaagctgctgtgtggggcagatttattggagtcctttgctgttcccaatttgtggaagagtgaagacatcacccaaatcgtggccaactatgggctcatatgtgttactcgggctggaaatgatgctcagaagtttatctatgaatcggatgtgctgtggaaacaccggagcaacattcacgtggtgaatgaatggatcgctaatgacatctcatccacaaaaatccggagagccctcagaaggggccagagcattcgctacttggtaccagatcttgtccaagaatacattgaaaagcataatttgtacagctctgagagtgaagacaggaatgctggggtcatcctggcccctttgcagagaaacactgcagaagctaagacataggaattctacagcatgatatttcagacttcccatttggggatctgaaacaatctgggagttaataactggggaaagaagttgtgatctgttgcctaaactaaagcttaaaagtttagtaaaaatcgtctgggcacagtggctcacgcctgtaatcccagcactttgggaggctgaggcaggtggatcacggggtcaagagatcgagaccatcctggccaatatggtgaaaccccatctctactaaaaatacaaaaattagctgtgtgtggtggcacgtgcctgtagtcccagctacttgggaggctgaggcaggagaatcacttgaccccaggtggtggaggttgcagtgagccaagattgcaccattgcactccagcctggcaacagagcaagactctgtctcaaaaaaaaaaaaaaatttagtaaaaatcaatggtaagctaaaataagtttttgtttgtttatttgtttttgagatggagtctctactaaaaatacaaaaaattagccaggcatggtgccgcataactataatcccagctacttgggaggctgaggcaggagaatcgcttgaactcctgacctcaggtgatctgcccacctcggccttccaaagtgctgggattacaggcatgagccactgcacccagcctgatcctattgttgcactatttatggagcaacaactttgtacaaagaacaagctttgtacagagaacaagcttggctttttctcccaacgccgaggatgctgttgatgctgccacgtaatagcataattttgggtgtcctcaaggacagaacttccactttgaataatggaagttagaacaatgaatttcacaggggaataaatattaatgactgacgtgaaaaacaaaaaaaaaacaaaaaacaaaaaaaaaaaacaaaaangaanagananaaaaanaaagaaaaacaagcaagaaacaacaaaacaaacaaaaaaaatacaaaacaaaacaacgaaaagaaaaaaacacgacaacgaggagccaggcgcggcccacagaagatacacccagcgaggaacggacaccagcatctagcacc

SEQ ID NO: 49578 - DNA, 752 bp, Homo sapiens
gcactcgggccggcggacagtgagggcgcggtaagctccccgcaaggagcccctgagaaactggtcgctttttgtcctagatataggggagtccaggatggtgtggtggagtctttagagtcgaatatgacccgaggcaagctcatattcaggtttggggcaaggagctttgattgacccttaattttttcagtggaacggaaaacttcggtaaaatagcttctgaccttcggaacagatggattcaccttggaaaggaaaaatctctttctagaagagtcttgaggtctggcacctttaggcttaacgggggacggctgggcgtcagaggaggaaatccttcattccgaacgacttccctttcctcctaaatccttctttccaaatctgtaaaagactacatctactttgctggaggtggtttgacactcatgctccttgagaaggaggtaatgagctgtagggcagctcttaaaaagttacccttggacgggcgcggtggctcacgcctgtaatcccagcactttgggaggccgaggcaggcggatcacgaggtcaggagttcgagaccagcctggccaacatagtgaaaccccgtctctactaaaaatacaaaaaattagctgggcgtggtggtgggcgcctgtaatctcagctactcgggaggctgaggcaggagaatcgcttgaatcctggaggcggaggttacagtgagccgagatcgcgccattgcactccagccggggcgacag

SEQ ID NO: 49579 - DNA, 770 bp, Homo sapiens
ggccccctggaaccaatgagagtgcgaccgagatgttccactcgctggcgtccgggccgctggtgatctccggtagcactcgggccggcggacagtgagggcgcgacaacaagggaggtgtcacagttttccatttagatcaacaacttcaagttcttaccatggaaaattccgagaagactgaagtggttctccttgcttgtggttcattcaatcccatcaccaacatgcacctcaggttgtttgagctggccaaggactacatgaatggaacaggaaggtacacagttgtcaaaggcatcatctctcctgttggtgatgcctacaagaagaaaggactcattcctgcctatcaccgggtcatcatggcagaacttgctaccaagaattctaaatgggtggaagttgatacatgggaaagtcttcagaaggagtggaaagagactctgaaggtgctaagacaccatcaagagaaattggaggctagtgactgtgatcaccagcagaactcacctactctagaaaggcctggaaggaagaggaagtggactgaaacacaagattctagtcaaaagaaatccctagagccaaaaacaaaagatggagtctcgctctatcacccaggctggagtgcagtggcatgatctcagctcactgcaagctctgcctcctgggttcatgccattctcctgcctcagcctcctgagcagctgggactacaggtgcctgccaccacgcctgtctaatttgtttgtatttttagtagagac

SEQ ID NO: 49580 - DNA, 1393 bp, Homo sapiens
  misc_feature (967)..(968): n is a, c, g, or t
ggccccctggaaccaatgagagtgcgaccgagatgttccactcgctggcgtccgggccgctggtgatctccggtagcactcgggccggcggacagtgagggcgcgacaacaagggaggtgtcacagttttccatttagatcaacaacttcaagttcttaccatggaaaattccgagaagactgaagtggttctccttgcttgtggttcattcaatcccatcaccaacatgcacctcaggttgtttgagctggccaaggactacatgaatggaacaggaaggtacacagttgtcaaaggcatcatctctcctgttggtgatgcctacaagaagaaaggactcattcctgcctatcaccgggtcatcatggcagaacttgctaccaagaattctaaatgggtggaagttgatacatgggaaagtcttcagaaggagtggaaagagactctgaaggtgctaagacaccatcaagagaaattggaggctagtgactgtgatcaccagcagaactcacctactctagaaaggcctggaaggaagaggaagtggactgaaacacaagattctagtcaaaagaaatccctagagccaaaaacaaaaggcctatgatctaaacatttcaccacggcatccactcagctgtgaggctgcgtacacagtctccacctctgaaatctgaacttcgtttaccagtggtgctgtttgaacttcataatgtcagcacttcctgaacacttactgtgtgcttggcttgtgctcctgagtgccttatatcataaggaaacggcaaaatcaggggactggtataaatggtgagctgagcttgaatctaagctttgtcttcagagccagtacccctaatctctctttctgtaaaatattacttttcaaagaatgaagttgtagccaaatcttgaaatttttcatttaccctaagtgaggacaaataaagctttcaacaacagttnnggtagtctgatggagatgagtccgacgtattcagtcctcacggaaggactaggctgaacttgcccagtgttagcaattccttggaactagaacagtggaatccgagggagaaggtgatatgggccataattaacttttgtgtttgtgtgtgtgtgtatgtgtgtgtgtgtttgcttctgagacagttttgctgtcctgggcaacaagagcaaaaactccctctcaacaaacaaaaacaaaacaagtgtactaagtccagtgcggtggctcacacctgtaatcccagcactttggaggccaagacaggaggagcacttgagcccagcatgagcaacagagtgagaccctgtgtctacaaaaatttttttaaaaattagccaggcagcagggcgcagtggctcacgcctgtaattccagcactttgg

SEQ ID NO: 49581 - DNA, 855 bp, Homo sapiens
ggccccctggaaccaatgagagtgcgaccgagatgttccactcgctggcgtccgggccgctggtgatctccggtagcactcgggccggcggacagtgagggcgcgacaacaagggaggtgtcacagttttccatttagatcaacaacttcaagttcttaccatggaaaattccgagaagactgaagtggttctccttgcttgtggttcattcaatcccatcaccaacatgcacctcaggttgtttgagctggccaaggactacatgaatggaacaggaaggtacacagttgtcaaaggcatcatctctcctgttggtgatgcctacaagaagaaaggactcattcctgcctatcaccgggtcatcatggcagaacttgctaccaagaattctaaatgggtggaagttgatacatgggaaagtcttcagaaggagtggaaagagactctgaaggtgctaagacaccatcaagagaaattggaggctagtgactgtgatcaccagcagaactcaccactgcactccagcctgggcaaaaaagcaaaactccatctcaaagagaaaaaaaaaaaagaccgggtgtggtggctcacacctgtaatcccagcactttgggaggcctaagtgggtggatcacgtgaggtcaagagttcaagaccagcctggccaatatggtgaaaccccatctctactaagaatacaaaaaattagctgagcatggtggtgggctcctgtagtcccagctacttgggaggctgaggcaggagaatcgcttgaacctgggaggcagaggttgcagtaagccaagatcgtgccattgcactccagcctgggtgacagagcgagactccatctc

SEQ ID NO: 49582 - DNA, 302 bp, Homo sapiens
taatttctttgttttaaatggtgtcatatcataaacattactacaagggaccaactgcaggttaatcttagtttgggaccacagtcagttgtaagcaagatggttataaaaaatgttgaaaaagagacattcttccttttgtagcatcttgcaagaacatttatattttaatatgtaaaacatgaaacttcatagtgtaaaattttagaacaggtgtcgcctatttccattttgaaatttccttaaaaatatatctgtgcatattaatgatgggagttctatgttctagtcttatgtattaa

SEQ ID NO: 49583 - DNA, 751 bp, Homo sapiens
gagctcggtaccctccccgtacgcccaaactatatcaccccgtccagcctccttttccttagctcccttcacattctagtttctgcctgagccatcaggccctgtggcccagaccaggcatcttgaactatatcccagaccctcctcatgaacagaatcactgctcaaaagtcctccttttttcacctgccctgtgctctagtctagattctgatttcttgtggtgagttggtgttgccttggatttcttgtgcctgctcagatctgtggatttggccctaggtcctttttctttcttcctgttggcctcctcagctccctccctcctttctgccaggtattccctgcaggcctcagcgtcagggctacctctattgacaggggatccttgggcgttcgggccatagtttttctttggtgaataaatatgtatggcttacaaaacatgtgtttctaaatttatgaaattatatgtatgtttatacattcattcgtgctttcatttagccaacatttattaagttttttacatagcagaaaccacttcataactgtgagactctgggataaatcacttaagtttcctgagtgtcattttcttctctgtggaaatgggagggtaataatgattgggctccggtgtgggtcctggcaccttggaacaaggatagtgggactttaaaggggctttcatcaggatggccagccccagaaggtgttccagtgggtaagaatgtcccccctgatgcca

SEQ ID NO: 49584 - DNA, 509 bp, Homo sapiens
gggcgacccagtgagactccgtctcaaaaatatatacataattttttttaagtaaagagttcattgataattgattagcatgtatataaagtaaaagtgtgaaatggatataatttcaggctttaacacatattaagacagatttgggattatcatacctagtggattatactatttaaagatagatcatttgttaagaatatggggtaggctgggtgcagtggtcacagctgtaattccagcacttcgggaggctaaggtgggcagatcgcttgaacccaggagttaaaggccagcctgggcaacatggtgaaaccctgtctctacaaaaaaaaaaaaaaaggaaaaattagctgggcatgtggtgtgtgcctgtagtcctagctactcagaaagttgaagtgggaggatcccttgagccctgggaagttgaggctgcagtgagccgagattgtgccactgtactccaacctgagtgatgggactgagaccctgtatcaaaaaaaaaa

SEQ ID NO: 49585 - DNA, 381 bp, Homo sapiens
gtctacaccccaaagcttgttgggggtgctttaaaattttgaagacagactttggaatcctgataccacaaagcagacttttaattcacatacacgcccagaagcacccaagaactcatgagaggctctttggcctacagcaagttggtgacacggacaagtggacaaggggatggataattcacgaccccataaaagactccaaagaagtcacacttgactgtggccaagggtcttcaacaacatgtctagagactctcagggcctttccaaaagggatcttagagtccccacttcttccattcagaggattaggaattttgtagccaagtatatgaactcatgctctccaggcttcacaaggggaggggcagagttggg

SEQ ID NO: 49586 - DNA, 339 bp, Homo sapiens
ccacaacactgaaaagggagaagttaccaactaatgctgagagcaaaactggtagaggtcctactgaaaaaacaaaaacaaaacactacaaaacaaaacaaccaacaaccatttaatcttatttcaaacctaatgcaaacattctcaaataaaatattagcaaacagaattcaaaaatgcagctgttttgatagaatgaaatatccaagacctgtgagacaactgtaaaaggtgttaacatgtataataagaatttcagaagagagaaaggaacagaagaaatattcagacaataataactgagaatttatccaggaagctcatagaatactgaataga

SEQ ID NO: 49587 - DNA, 225 bp, Homo sapiens
gtcccttcactacgccgtaattgtgaaggccagcaggtctgagacacaatggaagggataggaaatgccacctgtaatcccagcactttgggaggctgaggcgggcggatcacctgaggtcaggagatcgagaccagcctggccaacatggtgaaaccccgtctctactaaaactacaaaaactagccagtcgtggtggtgcacgcctgtaatcccagctacttg

SEQ ID NO: 49588 - DNA, 1531 bp, Homo sapiens
  misc_feature (1492)..(1494): n is a, c, g, or t
  misc_feature (1500)..(1500): n is a, c, g, or t
ttccctaggcattctcaatacacatgggcttttgttcacatagggcataaacctggaatatcttgctctgtttttccaccttcatttctaccttctgtatgtagaaatcccatttatcctaagggaccaataagatattaactcttggcaatctttttcttcattcactaatcagaattcattagcatttttgtttgtgataaacagtactttttgtacttctgatatttggatgtatgttcttatgttttcagtaagttgttggtatgtgtcatctttactagattggaacctcttagatggcaagattgtatcttactcaccttggtatcaccatagcaggttgttttgtacataactgcaggctgagtgagtgactgattgttgagcaaatgactgatatgagacatactagagaaactctttcttgactttcaggtggagcatgtcaaagtgaaaaataatcttagatgtgggtaatttttttttatcctgaagggaaaaccatacccacttgagagaaaatcgtttagtaatgaaattagagaattactaaatatcattgcacagccacaggactataagcagtataatcacaactattggttttgataaatacaaagttggtaaatgccattgtccaagttaacaagtcacagtatcaagtgtacttggttgtgaatgtcaggtctgaactccgtgctgttggttaatatcataaccatagttgtgttagtgagcaagatatttgtgtttatttttaagattttattaatagtaaatcacttttattaatttcttatatttatagagaatgataagagaaaatgaagtatcttaatgaaaggaaatgaccattttatcctttttgctgcatttcacaaaatgaatattaggttatttataacaaaaacatgtattaggttgttaagagattaattagtatataaaaaccacacaagaagatttagcagttatttcacagatagagggtttactttttcaggaaagaaaatgcatacccgtaactagaacacattctgtctggaaggatacctttaccagtgactgtgctgggtagtggaaaatggcaccagctttgaagttgtcttaacctggattcaaattccatatgctctcatcattaactctgaacctcagcttccttgttggatgagatttttattatgattcaaaagaagaatgcaggagcaataacataaactttgatttgagccaaacttcagttcgctctgactcataaaatcatggaaccagtgagataatagactaggtgttatgtttctcatcttgcttggacaggtttaagctattaaagaaatttgaagctggtcatagtagctcacttctgtaatcccaactactgggaggctaaggtgggaggattgctttggtccaggattttgaggctgcagatcacaccactgcattccagcctgggtgacagagcaagaccgtatcatgaaaaccnnncttaancatgtcaggcaatcccggcgggcctcccggc

SEQ ID NO: 49589 - DNA, 627 bp, Homo sapiens
aactgctctagcaaattcatcaaacctgaatagagcattgtgggaatcccaatttatagctagttgatcagaagttccttaggcccagacttgtgactggtttctgaaggtggggcagggcagtcttgaagactgagcccttaacctgtgggacctgaggctgtctacaggtagatggtatcagaattgaattagcggacattcagctggcgtttgatgcttggtgtgtttagggggaattagaaaacccagacatttggtcacagaagtcttctgtattgatgattgttactgttaagagagaataggaaaaaacaaaatgttgctttttccacactcaaagttcgtttttattatcacattaaacgttctgtcataaaatttgagcattatattgttcaaatgagagaataattagtcctgcctggttaagaagaggggttgtgataactaggaaaaacttgatagaaaaagtaaaatttgacaacatctcatatctatagagtgacttccagaggaaaatagatgttcaaagactacaaattatttgagaggagtgatgtacaaacactggagggtagacaatttatgaaagaagttggcaaaattttaataaggaatgttgga

SEQ ID NO: 49590 - DNA, 625 bp, Homo sapiens
ctgagtttctcttgcccaggctagagtgcaaggacaggatcatagcttactgtaacctcgaactcctgggctcaagtgatcttcctgcttcagcctcctgagtaactaggaatacaggcatgtgccactatgcacacctaatttttaaattttttgtagggaagggtggggggtgtcaatatgtggtccaggcttttcttgaactcccggcctttaatgatcctgctgtgttgacctcccaaagtactgggattacaggtgtgggccactgcccctggccagattcttttaaattttaagtactttaaaaaaacaaaaaacaaacgtagttcctttaccattaatcacacttcaaaaaagttaacagtaaatctttaatataataaaataccaatcagtgatctatttttttcaggtcctttgtatagctagtgtattacaatgtagcctttcccccatgatctatttctcttgctgctctgaataggctgagtgggaagatgtaggaccggatatgtaggtttgagatatgtcagaataataatttcagtttaatttctggatttaccttagttcataaattgagaggattctgttacctttagttatatttaggatacctaaa

SEQ ID NO: 49591 - DNA, 429 bp, Homo sapiens
ataattttgaagaattaatttaactgcagtatttctgccttttatagttcaaggactataatgaaataagaatgaagtgaagcatgtaagtatctagtttatcaatagtctgtttttatgttgctctatattttctactttcttaagtagtatcaatatattgtccaatagggtcactactagctgtgagtggcaatttaaacttaaattgctggccaggcgccgtggctcacgcctataatcccagcactttggtaggtcgaggtaggcagattgtttgaatccaggagttcgagaccagcctgcgcaacatggcgaaatcccattgctacaaaaaacaaaaaaaatacaaaaattagctgggtgataccctgtccctcccccatcccacctccagctgctccaaatgttaataaatccatctcaaaa

SEQ ID NO: 49592 - DNA, 288 bp, Homo sapiens
atgagcctctcctgtcttcaaatagcctggtattttccagcgttgttaaggtaggagggggaggaacgttttgtgagaacagctttaagattggaggaggctggaccagtagacctgtgtgaaccataggttcagttaagagagcaaacccatgagtttgtgagatgcttctgtgttctcctagcttgtgagcatgctctgttgtgtggcggaaaccagactatttcctttaacagtaacagctcagaggcagtattatgagcatttgaaatcatcattcaacaaaat

SEQ ID NO: 49593 - DNA, 237 bp, Homo sapiens
ctcacaagggagctatttcctagcctccaactctgtccctgtagacccaaccggaccctgccctcaaccctgttcctaccaccatcccaaatgtgggaaaacgctcttggccccacctgtagcctctaagacattctactctttggccaggacaccaccccatcccagcctccagctcaaacccctgacactctccagccaagccctgcccctagccaaggccagagtctgggctgg

SEQ ID NO: 49594 - DNA, 263 bp, Homo sapiens
cagcccgggcaatagagtgagatcctgtctcaaaaaaaaaaaagagcaattataaatctaaaattatattatccatcatatttaactgctcacaaagtatgttgtttgaaacacaaacttaacaatgagcaggccccggggctgcaaacagggacttacccttccttggaagtcaagacagacttttcagtctcagcttctttctaaagtgcctgcagtctacacatggttcaaagtgcacttaaatgagtgggaagaaaaaa

SEQ ID NO: 49595 - DNA, 736 bp, Homo sapiens
ctgcatgtaagtggcaaagatgactgtctgaaaatatatacctacttttttaaagggctatctcaagccattctggagaagcaccaaaagccactttgcttatactgggagaatagtttgctttccctaatttgtgatgagtgaaacactgaacagagacatagaataatattctgtagttcaggggttggtgtaatatggccagtgggcggaatctggtcctcagactgattttgcaaataatcttatagaaacacagcaacacccattcattacatgttgtttatggttgctttggggttacaatggcagagttgagtagttgtgacagagatcactaggctcaccacatctgagatatgtactgactgaccctgtacagaaagtttgctgctcttagaggaatgtgtgtttctagtgtcagcaataaacttcttggattgttttgttttctcatctttacatgatagttgcagactagttgatccttgtgacctgtttttgaatgccactgtgtattctgtcagggccctctgattctgtttcttatggtgctgaatgcacaatttaatgccctggaatttccttctgtcttctgctaaactcatgcctcttcagatagttaaaatcctgttctaccttagaagtctccagagttattttcctaaattaagaagaactggctttgaagttactcattatgccacacacaatggttgaaaagagcatctcttat

SEQ ID NO: 49596 - DNA, 413 bp, Homo sapiens
  misc_feature (310)..(310): n is a, c, g, or t
tgtttacttaatcttttcatgactaatgaattttctgcctagaaattgtaaaggaaaagacaggcaagattttttttagagatacggataccttgtatgatactgctcacaaatttcctgacagaagtgttttcgcttatgcctttttagcaagaatagcaaaatggatatatatgtatgtatgagacactcctgggaaattacaatagcatcctgttgttatgcacagagtacttatgtcagggaccatatagaatgagaatttaggccagggcgcagtggctcacaggcctgtaatctcaacactttnggaaggctgaggcggtgcggatcacgaggtcagggagatcgaggaccatcctgggccattgatggaaaccctgttcttcttactaaaaacacaaaaattagct

SEQ ID NO: 49597 - DNA, 385 bp, Homo sapiens
gagccaatttgttcaggtaagaactaggaatgcttcataagtcatgaggatgtttttatatatatatgtggcaaacaaatatgacagtgcttgctgtgtaacagatgttccataataacctgtaaacattcctgctggagttagtttgtaacttcaagtcagagatggaaaataccaatagtgaagaaataacattgattcttcatgtgcagataacattttttttccatgctgcaaagctaaattttgctgaatttaaaaagaaattttggttcttttatttcctaattacctttagttttgtttgtcttattatgtgacttctgtgtattcatcacagcccttctccttctttttctatgtgatggctacactttgctcactg

SEQ ID NO: 49598 - DNA, 272 bp, Homo sapiens
ctgttaaattctgtaattcagttacttgaaatgatgtttgcatagttagcagtaaatatttctattctgcttatttatgtatttatttatttggctggactggaacaaatatagttaactgatttgagtatttgttaatgcaaataccaaagcccttagccatattattgtaaaactattttaaagtatcataatgattttaagatttatttttgcctggtgtatgtggctttttatatgatcatttatgaggataaatgattataataata

SEQ ID NO: 49599 - DNA, 420 bp, Homo sapiens
  misc_feature (414)..(414): n is a, c, g, or t
  misc_feature (416)..(420): n is a, c, g, or t
gtcctcaaggttcatccatgttgtagcatgtgtcagaaattccttcctttttaaggctgaataacattccattgcatgcatagactacattttgcttctctgtccattcgctgatgggcacttgggctccttccacctcttggctgttgtgaacagagctgcaatgaacatggatgtacaaatatctgttcacattgagatctctctcctttggaaaaggcagggcaaatgtgaaaaaaaatcatactttcctgatttattgtgactcaaaatttcccaaacctacttcttatttttgaaaagtagatgtcacaattagtaaaaatcctgaaaattttgagtgaaatatgttaggtgatttcccttcgtaagaatataaaagaagtaaaataaaatgatgctgaatctttaaanannnnn

SEQ ID NO: 49600 - DNA, 845 bp, Homo sapiens
ttactgttgccttcacatttagctattctttctaattttttctccaaattttttcgtaacatgcatgcacaggttgagtatcccaaatacaaaatgctccaaaatctaaaactttttgagcaacagtatgacactcacaggaaatgcccattggagtattttggatttttggatttgaaatgctgaactgatataatgcaaatattccaaattctgaaaaattcctaaatcagaaacccttctttttttttttccaaaatcggaaacacttctggtcagcatttcagataaggggtactcagcatgtactggtagttgttgatccctctctcctccccgcctcctgtttaaggcagtatctactgattctttttctttggaagatgggaattttgccatcctcctcctcccacctccttgtgcacatttgccctccctccatctttccattaaagttctctcattgggagtcaatgtgccatagtgttcagagccaggctgtctgccttcacctcccagctctagcacttagttgctctgtggcattggacaagttatttaacttttttgtgcctacatttgcacatttgggaatcctccttggcatctaatctgtagggttgttgtgaaattgaattcaaacacataaaaattgcttagaatggtgtatgtcgtatggaaagcatttgttatttcttagcaaatgacaaaattaaattttaaaaggttattttttaatctcccactatggttttgaactttatataaatggaattagtatacacacacacatacatgtcatttgtttctaggatgattagactgacatatggaaaaaaaaaaga

SEQ ID NO: 49601 - DNA, 303 bp, Homo sapiens
catcatcactctcggctaatttttgtatttttaatacagatggtgtttcaccatgttggccaggctggtcttgaactcctggcctcaggtcatctgcctgccttggccttctaaagtgctgggattacaggtgtgaggcaccacgtcccgctgggagaataatgttatttaaagttagatgttgattaattaataatgcatattgtaaaccttagggcaaccaccaataaaatgtgtaaacatgggcataagtaataggttgataaaagagataaaatgaaacaatgaaaacaataagcacaa

SEQ ID NO: 49602 - DNA, 532 bp, Homo sapiens
  misc_feature (24)..(24): n is a, c, g, or t
  misc_feature (65)..(65): n is a, c, g, or t
  misc_feature (78)..(78): n is a, c, g, or t
tgattcccggaatttaaaaaccgncctaacctaatagggaaattttggccctcaaaggccaaaanaatcggggcaccnaaaaggggatccttgctttcttcaacctcaattggatatcttttttgagctcactttctccagagtggtgggaaagtactcactgtcaatcaggatttcctcagtcacttcagggctccctcctccttggatgtgcgtctaagttttagattgtttatataaaaccttagggtcagctgaggatgggagtgggtgggggatatctttggttgtcatcatgtagccatactggtatccatggcaacttaccattcatctggtccctggtttgtagtctatggagatcatgtctgcgatctttccaccccaactgtaggtcttctccaggatttgaggctctcagcagcatgctgatgtgtgagcagacttgatgaggcagcctcatgccggcccgcccaggtgatctgtgtggctgtctctccttctgctcctgcaccatgccgggcatgagata

SEQ ID NO: 49603 - DNA, 411 bp, Homo sapiens
cccgtttaaaaatggggatccccatcagcggcctttcaggcagctctgtgggggtccccagggctcttctgagtacattgagaaacttcctttaaagtcaatgtatttgagagttagatatataattatcttttgcaccttcttcatgtagtaatactacactccactttaaaatttacagcattgtgtatttgcttatgctgtaaatattgcttgagcacctactgtttgccagaccctagaatagacaggaggaggaggtgacttaaacgtggtaaggtctgaacaaaaggttgaagtgtgaatagaaaacaaccaggagggcgttccaggtccagtagactgcaggggaaagctggaaagctgggaggaagcagcctggcagatcgggaagatgggggtgggtgcact

SEQ ID NO: 49604 - DNA, 180 bp, Homo sapiens
aaagcattgagcttcctctaactgtaccactgtaacttaaaatgcatctgaagctaaaccatagcatttcatgcagttgctgtgaatatgactttacaattgctttacgaagattctacctcacagataataatttattactgtatgatattcctctttgactaaaactttggatttttt

SEQ ID NO: 49605 - DNA, 433 bp, Homo sapiens
ggtacagattaggtctcactgtgatgcgcagactgggctcgaactcgtgggctcaagcaagccttccatctcagcttcccaaagtgttggaattataggcatgagccaccaggcctgctccctggtccttttaagcatatgggttttcaaatatgttagagcacctaagatataaaataataagatacaaaaaaaatacatagctcttagctagatcatcttaattgaaaacttactgtgtgtgtgctagacaccatttttaaatctttttcttttttaacttgttttttttgagacaaggtcttgctctgtcttccaggctggagggcagtggtgcaatcagagatcactgcagcctctaactcctaggctgaaatgatcctcttgcctcaacctcccgagtagctgggactacaggcacacacgaccacac

SEQ ID NO: 49606 - DNA, 275 bp, Homo sapiens
tagacacccagagagggttgggtggaggagcttgaggctggggatgggactggaggtggagcatgccagaggccctgggagcgctgggtgctgagcccgtgaaccccctggccagccggacgttgatgcaatatggctttgtccagaccctatccagctgctgccccatctccaagagcctcgccctgctggaagtgcactgctagtctggttcatcagccactctgcacaggacccctgcccaggacccagggtctgcattttaggccatcctt

SEQ ID NO: 49607 - DNA, 902 bp, Homo sapiens
cttcatttgtccatccataaaatgaagcgagtaaggcctgatcccacatgagagaaaccaagtggactcagacacagatgaagggattgtacgaatcaaactgttggtatcactattggtttcctccctgggagaacctgcagccaggagctagcattcttctcagcccttactgtgaactgagctgagttgactgggctagaccaggctctgacactctcagggacctgaccacccctactcaagtctggaaggacaggtggggctggggtacacagcagcagtgatccctgtcttcgagcggcccccgccaacccactgacccctatgctgccaggggcctcctatcccaagagctgaagcttggggagactggaccatctgattatctggaaccctgagctccagtcatgggttaggaatttgggtgatgacctttggtaaattctagaaggaaatcccccaaaatccacccacaaagcatcaagtcccctaaactgttagaatccttcttgtctaagtcagtgaattcttgaaaatatatatcaagcattctttcctcctaaacacacataaaggtatgtgtgtttaaaatacctttgctctagaaagacagaaagtagaatagtggttactatagggggcttaggggacaggggaatgaggagttactgcttgatagataccgagtttcagtctggaaacatgaaaatattattcaaacagaagatggatggtggtgacggttacgcaacaatgggaatgtgcttgatgccaatgaactgtacacttaaaaatagttaagctggggctgggtgaggtggctcacacctgtaatcccagcactttgggaggctgaggcgggcggatcacctgaggtcgggagttcaagaccagcttga

SEQ ID NO: 49608 - DNA, 389 bp, Homo sapiens
aaaaaacaaaacacacacaagtttccaaagttttaaaacccaaaagaaaaaaagaagcaataggtaatttttacagcaaagaaaagaactcaagagcagttaaattgctacttttccatagtttttcaagacaagcaaaagtaagtagttgataattttcctttcctaagagacacatagaaatgaaatgcacctcatttaaataacatacaactactccttcatccccaacaagtgacctctactgtcagttgttttacattaacaaattaaggtaacatcactagttcttagtttggtcctcataaaaggcatttttttcaattaatcttgaaatgtatttgccttatataaggctttaaaatcacagcattttataataatgtata

SEQ ID NO: 49609 - DNA, 663 bp, Homo sapiens
gccttctcttcgaggacgcctctgctcttctgcctcacactcggattggaccttcttcagcacagccagtggccgaggcttcctccctggggctcagtggagcaggacagatgctgcatccaaactcttccattgggttccagtctgttccagtcatgcccttgagcctctaaagctcctaggtgagagacgtagcagctgacagcacttcccacttgatttgggtggactccagcctccccagcaacaataagagatcaaaagcatcgttgaggaagcagcttgctgaaacgctgagtgcccgccactctcaggtcaggtgggaccggcaggccagcatgagttcctgaacacttggttctcaatactggccacagccacactgtaaggggaaacaagagggcactgtatgcaaacatctcttgaactctggagtctgctcaccttcctgcctcaagcccctctcccacgtggtccagtcaccattctccacagagactaccctaaaacccagcgactctcgtgtgcctgcagaatggcacagcccgttctcatagcagcactcctgtttaatcagagggatgttaacgaccaagtcatatttgctcgatttgtgttcaacatatttcatttgtaccgataaaacttaaaaatatccccaca

SEQ ID NO: 49610 - DNA, 498 bp, Homo sapiens
tcaatattttaaatcttcaggaatagatggtgaattctaccaaacatttaatgaaaacaataatcctaatcataatcataaactgatatggtttggctgtgtccccacccaaatctcaccttgaattgtaataatcctcaagtgtcaagggtggggccagtggacataatcgaatcatgggggcagtgtcccataagtgaataagtctcacgagatttaatggtttttataaatgggagttcccctgcacaagccctcttgcctgccgccatgtaagaggtgaatttgctcctcattcgccttccaccatgattgtgaggtctccccagccatatggaactgtgagtcagttaaacctctttcttttataacttacccagtctcagatatttctttattagcagcattagaaccaactaatgcacaaactcaaccagaaataaaaaagggagggaagacttcccaactcattttatgaggtcagcataaccctaacaa

SEQ ID NO: 49611 - DNA, 278 bp, Homo sapiens
gaatctctaagaaggcaaagcaaccaacaaaaggacccaggagaaggtgccacagtggggattcaggctgaggaggggaaagcccctttgacccagggagctcacacaaggcaagggcctggacaccagagctcaggtgtgcagggatcctcaccaaagtccaacaccccaacacagaaaagcctcttactgcatagggggaacaagaatgtgaaacgagagtttacactccctctttccatcccaagaacccaacagagggtcatgggcaggtgctc

SEQ ID NO: 49612 - DNA, 378 bp, Homo sapiens
tggagtttgcttaatcaagcatcagtgtttctgtcagtgcttggaaatccatgtcctgctgttgttcatctgtcagcagaaagatcaaacctgcacccttaacttcacactgcactaataagatgatgcattaagcatctcataggtaatacctggtgtgttgcaagtattgtttttgtaaagccctcatttgtgcataactcacacaaagtattccaatttaaaaatatcatgcttggtctggcacagtggctcacacctgtaatcccagtacttgggaggttaaggcaggaggatggcttgagcccaggagtttgaaaccagccttggcaacatggaaaaatccagtctctacaaaaaatacaaaaattagctggg

SEQ ID NO: 49613 - DNA, 354 bp, Homo sapiens
gacaaagaagtagaaaatgaggttgaaaaataggtaatttcaagatttatttgcaagccagtataaaggattttattttattctaagtgattggaatccactagttagtttcaatatagcaaataggctattgagtggatagttgtggtgtcaagagtagcagcagataagttaggaggctattgtagaactataggtggaaatgttgatggcttagattatggtattggtcatgagaatgaaggaaagtggttaggttcaggattctttcatttgttccacaaaaatttatttacttcttactatgtgccaggcactgtgtaaatccttagaatacgttgcttcacaggacag

SEQ ID NO: 49614 - DNA, 333 bp, Homo sapiens
ttatacatgaaaccaatgtatctttcacatctcaagttgcttggctaaagacagagttgcattagcttaagttacagttcttgaggatacatgaggacagtataatattgctacagaaaaataaggtactactgatgggaatttatatgtactctcatcttttgcattcctaacaaatctgaagaagaaaattgagctatttctgaattaagcatttgcaatatttgaacttcaatttgaagaatgttagttcagatttaaattcagttataggtccctggttttaaactataaagtggttattgcaaatctcacattgcatctggaatataa

SEQ ID NO: 49615 - DNA, 402 bp, Homo sapiens
ctccctcatttgtattcctggagaacttgatacgccttccacaagatttccatgatgtaatatagttatttgtgtatgtgggttgaggcttgggaccacatcttgatttgtttttctgttgtatgcacctagcataatgcctgttttatccaacacccttgaattttagaaactgatcatggtaaatatattgcatacttcttaacactgaagcagaaatctgcaatccaatacatgtctatatctatagagaaatttatggatactcgcactaagtgagcagttggcctggtctcttcctagcttgttgacaactggatgccaccatacaactgtattgtatgctcagacctggtggtggctgacaggagcattttgaagcattagccctcacttcttcag

SEQ ID NO: 49616 - DNA, 403 bp, Homo sapiens
ccaacagtgatggccaatttcttatcactagcttgtaactcttggaattaaatcatgtaactcttaaaatgtaattcatatatcacatatatgaaagtctgatgacaattatactcatgtacttgtatactatgtttcagctctggtctggctctgcttttttagacttgctgagaggtatggagccagtcttgtatcttactttttgagccaaggaagactttagagcaaggcctgctcatggttctcttctgcttggtcaacttgaaaaaaggctcagtaaagccaaggagaaagctggcatggggaattgccttggcaagcagtggtgactctgcaggcatgagagatagtgtgctttgccctgggaaataaagctattacctgttgattgctttgcttt

SEQ ID NO: 49617 - DNA, 1593 bp, Homo sapiens
ttctcttatgtgtttttaaattagcccttcatataaacttcaaattttaggtaggggagcttttatggttccctttatgccagtgaggaaacagccagagaggttgagtaacttgtccagggttatatggttaataagtggttaggattagtaactaggccagacccttctatggcctgtttttatctctaagatgatccccagtatgttagacttgaaactatggatggagtgaaaaatattctctgcaaatacatcaacactctgaaagccattgttttctctgtttagaaagtagttgaaaaagtagtgagaaactagagctttttcttttctggtgttagtttcagcttcctaccttgaagggaaccttaaggcccaaaccttcttttttacatttgaggattctaagtccatgcatctcggaaactatggagacgggaacttcttgtgtgagttggagagcagttgtagaccgttatcatttccatcggtgcggatgctctttgggtggtggtggcatagaagatctgttttggttacctttattgacaagctctactgtgtgactggcagttcagttcagcagataggtttccagcactaatcttaggcactgtgatagattcccgagatgcaaaactgaagaaaataccttgagacaagtcagtgccatctcagatataatttcctcagaaatcaagattttagagcatttgatgtttttaaattagagtcctttcaactaatagcctgtatgaagtttttaaaacacttataaaaaatttatggtgattattattattttgagacagggtcttgctctgttgcctagctggagtgcagtggtgcagtcgtagctcactgctgcctcaaacttctgggcccacacaatcctcctacttcagcctcctaagtagctgggactaaaggtgaatcccaacaccctgggctaacttaaaaaaatattttgtggagatagagtctcactacattgcccaggctggtcactgaactcccagcttccagtgatcctcccacctcagcctctcaaagttctgagattctaagtatgagctgccaaacctggcctatatgaagttttaaacatttgtagaaccagttgttaacattgcttttttttttttttaccataaaattggtatatgtcgaggaattctatcgtttgactatatttctattgtgttaaattttttgttttcttatatcaaaaatatttttgtaaatgtaaagaaaattcaagcagacagaagatggtgcaggtgctttctattatttaatagttcacctggccaggcacagtggctcatgcctgtaatcccggcactttgggaggctgaggcaggcacatcacctgaggtcgggagttcgagatcagcctgacaaatatggagaaactccgtctctactgaaaatacaaaattagccgggtgtggtggtgcatgcctgcgatcccagctactcgggaggccgaggcaggagaatcgcttgaacccgggaggcaaaggttgtagtgagctgagatcgcgccattgcactccagcctgggcaacaagagtgaaactccatctc

SEQ ID NO: 49618 - DNA, 362 bp, Homo sapiens
ttaattctatttaaagcttaggttaaaagggattgggttaatcatgtttcttactcctggaacattgtcaccaaactttttttgcagcactacaagacatacggatgcaggtgttcacgtgtgaatatgtgtatactgagttgtcttgaatccctattccatatttctatgcatctccccatataaggaaccactcaaatgtgtttgttccatatccttgatttttacgtatcttcgtgaaatagagagtattttatgtttatatgcttttaaaagttacataagtggtattatgctatagatctcttgctgtttcttactgtttactcagtagtgtgattttaagttttgtctacttgctc

SEQ ID NO: 49619 - DNA, 331 bp, Homo sapiens
ctgcacttttataaggaaggaaaattttctttatgcgggtatgaataatactaacaaatgaaatactggaacatgtaggtggaggatacatcattttggctgttacggatgatgtcaagtcatacctaacctgctcattgtataaaacttaattagtactccaaagtgccttactgtaactaataaaagatgtattgacccccctgtgctattaagataagactgagattctgtagcaaagagacatctcatgtcagaggtaagaggtcagaggtcagtgcttcgggctccagcagggttctgttccatgcagtcattcagggtcctaaag

SEQ ID NO: 49620 - DNA, 527 bp, Homo sapiens
ctatgtctccccctaaattcatgtgttgaggtcctaaccccagtatctcagaatataactgtatttggagataaggcctttgaaaaggtgattacagtaaaaggtcatatgagcaggacctaatccaagctgactggtgtccttataagaagaggagattagggcacagacacacactcagcggccatgtgaagacacagggaggaattggccatggataaaccaagggatagaccctcagaaaaaaccatcctgccaacactttgatctcatgcttctgccttccagaactgtgaggaactgaatttctcctgttcaagccacccctctggtgcccttgattatggcagtcctgggggattaacacaggcagaaggaaaatgaaggatgcaagagtcagagaaaggaagaaaatgaaatgtaatttctcctcaaacaattttcaaaataatggactttgggaaaacactttcaggaaattattctaaactgggtgtttgacgttttattctaaactgggtgtttag

SEQ ID NO: 49621 - DNA, 382 bp, Homo sapiens
gtgaaattaataaatactgtttaggaattttctcttttaggattataagtaacctggaaaataacaataactgaaatgctctgtaatttgtaagcagtcaacagatgtataagtatcatttcagttttcaaaattacattgtaaattgtttgaattggactttgaaacaatttttcttttaactataggtggtggatacattctagaaacttgcatcttaaagcaatcaaacaatttattttcagtatagattcaagactaaagcaatctccgaataggtattgtttcacttagatagctccaaagacaaaaactaggtcccatgaggctaaaacagtggtatgcataggggggtttatttttactatcctttaaactgtcc

SEQ ID NO: 49622 - DNA, 408 bp, Homo sapiens
  misc_feature (4)..(7): n is a, c, g, or t
  misc_feature (197)..(197): n is a, c, g, or t
atcnnnngcatcctcatagcttagcttcatttacaagtgagaatatatggtatttggttttccagtcctgagttacttcccttagaacaatggcctccaacttcatccaaggtgctgcaaaggccattatttcgttccgttttatggctgagtagtattccatcatgtatgtgtaccacattttctttatccactanagataaaccaggttttgaattcaggatccacctctcctgagctgtgagcacatgggcaagtttcctcaccagtccaagcctgttttctcatctctaaaatggagacaatgacggttcctccctcactgagcacttgtgagaagtaagtggtgatcacggttacaaagtgttcagcacagtgcctggaacacggtaagcgttcaatcagtgc

SEQ ID NO: 49623 - DNA, 274 bp, Homo sapiens
tggatgttctggacaaagggatgatttatgattaaggcaggatggaacaggacagtgggagatttcatcatgctattcagaaaagcgcataatttatgaattgtttatttttagacttttttgtgtcatatgtttggattgatacatgatttgcaaatattttctctcaatttgtgggttgtctttttactttcttggtggtgtcttttgaagaacaaaactttttcattttgatgtagtccaatttattattttgtattgttgttgcttgtac

SEQ ID NO: 49624 - DNA, 477 bp, Homo sapiens
tttggtcagaaggtcaccctcatcagacaccagaggacacacacaggggagaagccttatctgtgccccaagtgtgggcgtgcatttggctttaagtcgctcctcacccgacaccagaggacacactcagaggaggagctttacgtagacagggtgtgtggacaaggacttggccagaagtcacaccttatctctgaccaaaggacacactcaggagagaagccctgcatttgcgatgaatgtgggcgcggctttggctttaagtctgccctcatccgacatcagcggacccattctggggagaagccgtatgtctgcagggagtgtgggcgtggctttagccagaagtctcacttgcatagacacaggaggaccaagtctggtcatcagctcctaccccaagaggtcttctgacctttcctttccccgtgagtgtgaagctggcagaaatcactagtaaatgcttcagtttcctga

SEQ ID NO: 49625 - DNA, 544 bp, Homo sapiens
gtcctaatactagttttatgattaaaatattttaaaaaatcatatgttgtttgagtagataaaagttgaggaattagtttttcctagatactaaaatttcagtccacgaagaatcttagactattcttactttcctgccttcagttatacagtctcccccaaaatgtcaacaaggccagtttgctgtccgtgactgcaaggacatagcactcactgggcagaacgttcttgctaaggtacttgctctttccacctgaccattataagtgggtgacttcttatgccatcatttctctagagcttcctgcttacaagaaatggtgtcgcctccaaggttagcatggtgttaggtcgtctgaaattttattttgtactcagagagtatttcaatatttacagagcatacaagtagataatgtgatcttcccaagaagtcatcacattggaataaccttctgaaaatagaaatagtcctgatctcacaaaagcaacacactaataatttcatcattttgttgacttaattggtatctcaaacaatgtg

SEQ ID NO: 49626 - DNA, 313 bp, Homo sapiens
gacaatgaccttttttgaaaacagctgaaagagtgtggatttttctcttactttcaaagttgtccaatgataaacacaaaaacttaataagtttaaaaattattttgtttttctatcgtcttctatttggagagatatgtgctctgccatccaaacgtaaggggaatattatgttagatcctgtttgttgctgtatttaataagcttgctttagatttcgcatattattttctttttctctaaaacttttataaaactttccaggggagataaaatacatctagagtactgagtatgaaaaaaacttaaagtg

SEQ ID NO: 49627 - DNA, 172 bp, Homo sapiens
catagagagatctctggggactcactatgatcagatcttaagtgctactgaaaggacagtcctgatcctgccctcaaaacatctggtgacccgggaggcagagcttgcagtgagccgagatcccgccactgcactccagcctgggcgacagagcgagactccgtctcaaaaa

SEQ ID NO: 49628 - DNA, 545 bp, Homo sapiens
acttgtccatttccccagagatgtccaaaactcaagcttcaacagacattcctagagtaaaataaccaagatgtatgaatcccccttagaggattcagggccccattccatgtacaatgtgagagcaccccagacccagtcttgtccccaagagtaaaagactcagtttaatatattagcctacatgttggcaaagagaccaatacaaaaaggataatggagaaagtctttgcacagaaattttgcattctggcatctctatctgaattgtgattcttcataaaatgctggactgaaggattgcatagaggcaggccttgtgttaggtgataaacatgtttttatacagcaacacctacagccaatttccctatatgcaagcaaaatttccagtaagaattaatagttggctgggtgcaatagctcgggtgtgtattcttagcactttgggaggctgaggcaggtggatcatctgaggtcagaagttcgagatcaacctggccaacatggtgaaaccccatctatattaaaatgcaaaaaaaaaa

SEQ ID NO: 49629 - DNA, 497 bp, Homo sapiens
  misc_feature (484)..(485): n is a, c, g, or t
  misc_feature (493)..(493): n is a, c, g, or t
atggcttgaacccaggaggtggatgttgcagtgagccaagattgcgccactgtactccaggctgggtgacagaacgagactctgtcttaaaaaaaacaaaaacaaaacaaaacaaaacaaaaaattcaccttgcaataaattatcctgccacaaatgtttatgtttaattcattttgtatcctatccctttcccctcaacccccaaagaaatcatgagggatccagtttatagttgtgctgttagttgcttgaatcctaaatcttggagtacaaactgatcagggttcccaggtctacctggtgaagggcaacccaaggtgtctgtggggcccaaggaaagtctaggccctcattgttcaccagctgtatccacggagagcttgtcagacatgtggaatctcaagacccactaaagcttaagctgtatttctttcttttcttttcttttttccagcttgggcaacagtgtaagactccaataanntcaaaggngggg

SEQ ID NO: 49630 - DNA, 477 bp, Homo sapiens
atggcttgaacccaggaggtggatgttgcagtgagccaagattgcgccactgtactccaggctgggtgacagaacgagactctgtcttaaaaaaaacaaaaacaaaacaaaacaaaacaaaaaattcaccttgcaataaattatcctgccacaaatgtttatgtttaattcattttgtatcctatccctttcccctcaacccccaaagaaatcatgagggatccagtttatagttgtgctgttagttgcttgaatcctaaatcttggagtacaaactgatcagggttcccaggtctacctggtgaagggcaacccaaggtgtctgtggggcccaaggaaagtctaggccctcattgttcaccagctgtatccacggagagcttgtcagacatgtggaatctcaagacccactaaagcttaagctgtatttctttcttttcttttctttttttcctgttgccgaggttggagtgcagt

SEQ ID NO: 49631 - DNA, 152 bp, Homo sapiens
cctacctcaaaaatggggtggggtaagaggattgttccataggtgcccagcctgttctcccttctcccatgtttgagggaacccaatttttggcatcaaaggcctctagaagagtttaaatgtgtcctttcctaataaagagaagtactgga

SEQ ID NO: 49632 - DNA, 607 bp, Homo sapiens
gtggcttattgtggacttaaagtgtaacattctccttatggtatgtaaggacttttgtataaaccaatgcctatctatctatcatttctgaaaactttttcctcctatgcaatattttctggcctctgtgaacaacttgtagttccttgagatttctattatcacttatgtttttgcaaatctgcaattgaaatgcccttgttccttgttaatgcctattgaatctatatgaacctgtacgtgtgtttctcactgtgataatataatcattgcatgttttatctttcccactagaaagcttctagaaagctagtactatcttttttgtctgtgtaatttttgcatcacaagctatatttaaatgtgggtgcagtgagtggctgttttctgccacatggagaaacatggtctgcagtgagagagaagaatgaagccatgatgaaagcaaaatcaagaaagagtcccgattgtgttccagtacctggttcttctggtcttcatgttcaggtccacctctgcccttttcatgtcttgattgttgaattcttctgtgagatactccaaatatcctaataaattctcatgtttgcttcatctggctcaagtt

SEQ ID NO: 49633 - DNA, 415 bp, Homo sapiens
aagagcggtagtaattgaacctttgttttgtctgtgctcaacttgcctacaggcccttaaacagggacttttcagtggtaggtcgcttcagaggctgtctctggtcttttagagtgcttaccttccacttccgtgtttaaaattgtcttttctgcttttgttggttagtttgtgttcaggatttttgcagtgcagatctctagctagcacggcataccagatttgaaaggaaacagatataattcacccctttatctctctcaaagagcaatcttcccaccactgaattctctgaaacctgcagttctgtgacacagaccatgtgctgccatgttgaacagcctttgtggtgtcctgtgtgtcacaagcctcagggaatagttttgagcctacagaggctaaaggatgtccccag

SEQ ID NO: 49634 - DNA, 210 bp, Homo sapiens
gaagaacttaacttcagctcacagtggagcaagaatatctaccatgaggcgaaagcaatcgcttgagggcattgcattggggtgagccagggcaggagctgcagagagcctgggacctaggaagagagcaggagaaaagacatgtggggatgaggtggagacagttgtgaaattgttcagtctcactctggaaagagaacacattcatag

SEQ ID NO: 49635 - DNA, 937 bp, Homo sapiens
atctcatgtaacctcaccttatcgcatatgaaagatcctctccagaaagcttatgaaagttaccccacgtcacagcaaggaagagtccaactctggtggcctgactcccagcaccactccttccttttccccacagcacacctgggcccacactgtgcctccttagggctctgaaatgctgggaacagagtggtgtgaggagggtggtcattctcaggccattttaagcaataactatttcaacagaactagtttaaagaggtttttaagcagggaagtgacctgaagtggaagtatgagtgggaaacttgcatggtcagcactggatttccaatgaagacctggaatccgttaggataggccagggaccaaggctgcaggctggcctctctgcccacaactctcctgaccttggaagcagggtacggaggcgtgtgtcctaaaataaagcatttgagctgctgctacagaggaacaatcaccagatattgtgaccctttcagatgcccagtagtcctgggaggcaggcagggcaggtgttattatcccttctttataaatgaggacacagaatgaggcagtacaagtgactctaaacacccccttagtgccacatcagtctcgccacctcccaggactaggtgtcacctgtattgacctcttcccctctgattataaaagtaatatatgttcattgtggaaagtttggaaaatgcagaaaataaaattaataatttaccccaaatcccaccatcctgagatcatcactgttaatgttttagtgtatttccttcctgtattttttctatgcatatataatttattttactacaagattgggatcatgctgtatttacagatttgtatcctgctttctttaacatattgtgagcattttcccatgtcaataaatattcttcaaaaagtaaaaaaaaaa

SEQ ID NO: 49636 - DNA, 806 bp, Homo sapiens
atctcatgtaacctcaccttatcgcatatgaaagatcctctccagaaagcttatgaaagttaccccacgtcacagcaaggaagagtccaactctggtggcctgactcccagcaccactccttccttttccccacagcacacctgggcccacactgtgcctccttagggctctgaaatgctgggaacagagtggtgtgaggagggtggtcattctcaggccattttaagcaataactatttcaacagaactagtttaaagaggtttttaagcagggaagtgacctgaagtggaagtatgagtgggaaacttgcatggtcagcactggatttccaatgaagacctggaatccgttaggataggccagggaccaaggctgcaggctggcctctctgcccacaactctcctgaccttggaagcagggtacggaggcgtgtgtcctaaaataaagcatttgagctgctgctacagaggaacaatcaccagatattgtgaccctttcagatgcccagtgtcacctgtattgacctcttcccctctgattataaaagtaatatatgttcattgtggaaagtttggaaaatgcagaaaataaaattaataatttaccccaaatcccaccatcctgagatcatcactgttaatgttttagtgtatttccttcctgtattttttctatgcatatataatttattttactacaagattgggatcatgctgtatttacagatttgtatcctgctttctttaacatattgtgagcattttcccatgtcaataaatattcttcaaaaagtaaaaaaaaaa

SEQ ID NO: 49637 - DNA, 273 bp, Homo sapiens
ctcagacacgcaggggagatatacaagtagacacactgcaaggggatgaaagcagtagtcaaagactttagagaagaaaggagaggcaaatggagtggctcctgagatgacccaggtgggctttcggaaggagaggtgttcaagccttgcccgcgtgggcctcagtcgtgaaaggaagggtggtcccagcagagggagctgctggcggaaaaggcagtgggcaaggaagagtccaaagggtttggaaggcagtatggcatcagagtgggttgg

SEQ ID NO: 49638 - DNA, 373 bp, Homo sapiens
atacataaacaaatggacatggccttgttccaggaggactttatttacatcgggctgcaggccggatttgaccagtcggccatggtttgcttacccctgctttagcttatggggggtgccccgcaagcacttgggaaattaatttgttgaagataggtgagtagaggcctctgatagtccagatcctcggttttagctctgtttacacaggaccaggttctgtgttcttgccactgagtcacagctgcaagaccctcgcctccccctagccccactcccccagctttgagtgatcccgggctccttcaagcccactgctgagtggggagcagtttctgtgccttccaggatctgtctcccctactgccactcc

SEQ ID NO: 49639 - DNA, 369 bp, Homo sapiens
ttatctgtttgattcagcatggggtcagcccctatctcagaagagggtggggtgccaagctgcagcaatgaggtaaaaaaaggctccaaaggaatattggggcacccttactggaaaaggcaaggaatgctgtgcaaacaaaaacaaacatttactataatcaacaagtaaaggaatttcacagacctgtaaatagggatactttggagatatagtcagagaaggctgttgctgcccttgaaatccctgcacttaggtagccatttttcttcacatgatgaatccttctgaaggaccccttcacaatgacagtctataagtcaaacgagacagaagggactctaggattctttcgctgcttttctctca

SEQ ID NO: 49640 - DNA, 324 bp, Homo sapiens
  misc_feature (183)..(183): n is a, c, g, or t
  misc_feature (189)..(189): n is a, c, g, or t
tataacttaaaagcctattttggtgcttgcttcggcagcacgtatactaaattggaacaatcaagagaagattagcatggcctctctgcacaaggatgacacgcaaatttgtgaagtgttccatattaaaagaaaaatttttgtccactgcgcccggcccctccctagttttattaattttcntgtttntaatgagacggagcttcgctccagcctgagtgacggagtgagactccatctcaaaaaaaaataaaaacttttaaggcctgttttgcctattctggataaaaatcttcctcagatgtagacgagacatttctgtgt

SEQ ID NO: 49641 - DNA, 889 bp, Homo sapiens
catcgctgaaggagagagaggattttatttctgggaaatggaatcggtttctgagtccagccaacagcagaagagaaagccagttatccacggactggaagatcaaaagagggtaagtggcagaactttgttggttgattggattatggtgctggaattgctaagtgtgattcagagagcataggtggtcatcatcgagcatgcttgtctgtctttctctccggaaggaggtagcatggtggcttgagatttgctatgtctcgatgctgggtgtcttgacttactggtaggcaagaagaaagataaagaaaagggaaaaaaaattcagtcctggcagccaaaaaggcaaagatttataagcgttaactgagggagttaacaaaaaatgttggtgttctcaaaatccaatatgagtttctttgtactgaagcccccttcgggattcacacactcttagcaccttctggaaatgttgctcctgaaagcggaggttttgtttgaattattctctgtgtggttgtctggctcttgtgtttatggatcaaaaacatattctactgcactctttggccctatctgtgagaatgtcacagccatttaaaatggcctgttgagtgtaggtcatttgctgtcattggtctgaaagctgcagtcacccaggacctgtgtctaccagttaaagttcaacttgtctttaaaaggcagacgcgttgtggagtagcatagggtggttggttgtctaggaagaaagttgaagctacatcttctcactcttggggcatagctaagaacggggcgtggcaagggttaaataaatctctagcagagtccaaatttttgttgaactgaaaataatttctgacatttcctttgaaatgttgtggatggt

SEQ ID NO: 49642 - DNA, 129 bp, Homo sapiens
ggacgctcattcacacttcaaatcacttgtcaaggactctaccacactgtaccactgtacactctggaatgtgattagttctgtgtcccccagacactggcacagtaaatgctcaatgccgcttgctaa

SEQ ID NO: 49643 - DNA, 885 bp, Homo sapiens
aggaaatgctcggaacttctttacgtttttcaaacgcagctggctctgaaactgctccagtgtctgaaagtgacggatgcgcctcatttctatggcctgccgtcccttgagcggaccttacgagggatggctaacctcactgcgtttccgggatggagctcacactctcctctcacaaagcctctagatatctgtgtgaagtacttgtcaggtctccttgaggtcattacttctttttatgtggagcgtggaggaaatgctatgtccttcatgggaaaaggtgttacaaagagcacaattctttgcttgcttcacttatcccatgagatgatggcccaggctgggagcttggagtggatgtcactttggttcttgcctttgggtagtcatagtgaagaacatattcctactcaacaaggattggcttggttgattccattatgggttgatcgggacccagaggtgagattcacttcactgggattaggatcagcactgaccacccttgaaacgggctgtgtggccttagcaaacagttgtcagaacatttccggtgggctctggggaactgtggtgaacattcttctggaccagtcagaatgtagtatggtgcgccgggaggcggcatttattcttcagaatctccttgtaattccaatgcctacagaaattataaaggattatacttggcagggtccctgtgttcatgatgaggactctggcctatcgctcattggaaaacctgcccttcaggctcttttatatcactgccatttttatgaacatttgaatcagatggtaaagcattgttacctaggacggtgtatgtttgatttgaatttttctgcttttgatagaaattcagaaagcaatgatttaaatggt

SEQ ID NO: 49644 - DNA, 397 bp, Homo sapiens
ccttgctcccttttgaaatgatgaaaatgacagtaaattagggattttaaagaggcaaaaataaataaaatgagataagatatattttcaggaattttttctaagctatgaaacagatggacaaaaggtaacagataagtagatctgaggaaactgaatgctacaccagcaatagggagaaagctaagaactgaccctatttatattgtggagcagaggccctgggattgggaccatcaggtatctgacagagtaaaggctgaaaacaatgagtggttgagaatctgtttaagaagcagttggaatccctgattccttcttatataactaagctaatgattcttccttttctactttaggagaaaactataatttttaacccctccacccccaacgg

SEQ ID NO: 49645 - DNA, 411 bp, Homo sapiens
ctccactgcactccagtctaggtggcagaatgagatcctgtaacaaaaaaaaaaaattacaaacataaaatttgttaatgtatttgtttagttgtcccaatattatttattaaataaaccatctttctaatacatttgaaaggcttgctctttgacatatatgaaggtcaaatcacggcaatcctgggtcacagtggagctggcaaatcttcactgctaaatattcttaatggattgtctgttccaacagaaggatcagttaccatctataataaaaatctctctgaaatgcaagacttggaggaaatcagaaagataactggcgtctgtcctcaattcaatgttcaatttgacatactcaccgtgaaggaaaacctcagcctgtttgctaaaataaaagggattcatcta

SEQ ID NO: 49646 - DNA, 645 bp, Homo sapiens
cattctggtctgataatttttgctttgatgtagttcaaattatcaatctttttctgcatggtttctagattttgcatattttctggatgtatacatacatgacattagcaaggctttatatctcaaatgcataattaacaagtgaaataccctagtttcttttctcccctgtaacctggaatcagataatagtgttgctatactgagttcacattggcttatgctgacctagacttcagataggcaactgtctttgattaataaaacatggaagacaaaaattattatgtgtaaatgcaatttggtagggaagaatttcaaagcatggaggagggaggaagtatatattaaaaaaggaatcttggtcaggtatggtggtgcacgcctgtaatcccagaacttatggaggccaaggcgggtggatcaattgagctctggagttcaagacaagcctaggcaacatggcaaaaccccatctttacaaaaaatacaaacattagccaggcatggtggcatgtgcctgtagtcccagctattcggaggctggggagagaagatcacttaagcccaggaggttgaggctgcagtgagctgtgattgcatcactgcactccagcctgggtgatagagtgagaccctgtctcc

SEQ ID NO: 49647 - DNA, 601 bp, Homo sapiens
caattctcagtcctcatcttaattgacttatctggctggagtttgacacaccttcctccttctaacactttttcatttgcctaatagtcaccctttatcttggtatttctcttcttagtagccactcttcattctgtctttctgatgtctggtgcctcctcatatctgtaacctctaaacattgaagtaatccagaactcactccttgtccattttctcctttttactattcactcccaaggtcactgtttcttaatgtgtagaagacgactctggtagatggtcaaataacttttctctggcgtaaaactttgggatcatcatcttacacatttcacattaaatccctcagcaaattgtgtcagctcttgtgtcaggtatctagtgatatgtgagaaaacacagagattaatggctaaaaaacaccactcatgtatttgtttacaattctgcagattggatagggcttggcaggaacaacttgtctttgctgtactaggccacaaaatccactgttaggttggctgacacatatggtgggcaagttggctcttagctgggaactcagctgggactgttagccaggtgcttaattatccag

SEQ ID NO: 49648 - DNA, 1542 bp, Homo sapiens
gccgttctccaggtgaccttggactgacccacttctccccacttctcactagttgtcaaaaagaacagccttgctatctggtcaggtgaatgacaaccaagtggaaaaagatctgtgtggttacaaggagtatggcaaaaggttgctaactggcaaggacaaatacatgtcacctgtggatgctgggaataccatagccaccttttagggaaacttaaattatgtttttggataccctgtaaaactttgctctgacaaggaacctcctttactgcccaaggaacatgacagcaggcacactcatggaatacaatgggttttccatgcaccctgtcatcctcagtccaatagagctgttgaacaatggaaagccagctcacaatgagtgaaggaaggacaccaagatagcctacaagtggggtggtaccaccccatccgaatacggcagtatggacactgagcactgccctccagggcaagggaaccacatgattgcagcacatgttgagaagcactgagcttggaggaggtacaggtggaccagatgacggctctgcctgtgaaatccaaattccagtgttcccagccattttctctttttagagtgcacatcctgtgggtggtttgcagttcaggctgccacagtaccccaaaaggcccccctaactcttaatctggagtcagcgtttccctcaggtgcactccctgtgggatccctcaagggtggaaacaggaccaagaaataccaggatgctagagtccctctgatagtgccagggacatctgatccttccatttggctgggcaatgttgtcagacatgtcatcattcaagaagtgacttcccttcctggactggatggctgaggctgaaatgtctgaggcatttcaagggtagtaccacaggatatggtaatgtttatagtatacagtgtgatgttttgatatttgtatatgttatggaatgattacctcaatcaagctaattaacatatcatctcacataattaccttttttgtgtgtatggtgagaacattaagatgtattctggcaaattttaaatatataacagtattagctatagtcaccatgctgtacagcagatctccagaacttattcatcatgcataactatgactttgtattctttgataaacatctccccacttcccctgctccccagcccttggcaaccacattctactccctggttctatgcgtttgactttttcagattttacaaatgagtgagatcattagagtatttgtctttctgtgcctctttgatttcgcttagcattatcccttctatgttaatacatgtcacaaataacatgtcctttttaacgctaaataatactcctgtgtgtatctttatatctaggttgactctagtttttttgctagtatgaataccgtaaacatttgtgtacaggtcacagacatctgatccttccattgtggtgggcgatgttatcagataggtcaagtttgtttaggacctgacctcccttcctggactagaccactgaggccaaaagg

SEQ ID NO: 49649 - DNA, 1352 bp, Homo sapiens
gccgttctccaggtgaccttggactgacccacttctccccacttctcactagttgtcaaaaagaacagccttgctatctggtcaggtgaatgacaaccaagtggaaaaagatctgtgtggttacaaggagtatggcaaaaggttgctaactggcaaggacaaatacatgtcacctgtggatgctgggaataccatagccaccttttagggaaacttaaattatgtttttggataccctgtaaaactttgctctgacaaggaacctcctttactgcccaaggaacatgacagcaggcacactcatggaatacaatgggttttccatgcaccctgtcatcctcagtccaatagagctgttgaacaatggaaagccagctcacaatgagtgaaggaaggacaccaagatagcctacaagtggggtggtaccaccccatccgaatacggcagtatggacactgagcactgccctccagggcaagggaaccacatgattgcagcacatgttgagaagcactgagcttggaggaggtacaggtggaccagatgacggctctgcctgtgaaatccaaattccagtgttcccagccattttctctttttagagtgcacatcctgtgggtggtttgcagttcaggctgccacagtaccccaaaaggcccccctaactcttaatctggagtcagcgtttccctcaggtgcactccctgtgggatccctcaagggtggaaacaggaccaagaaataccaggatgctagagtccctctgatagtgccagggacatctgatccttccatttggctgggcaatgttgtcagacatgtcatcattcaagaagtgacttcccttcctggactggatggctgaggctgaaatgtctgaggcatttcaagggtagtaccacaggatatggtaatgtttatagtatacagtgtgatgttttgatatttgtatatgttatggaatgattacctcaatcaagctaattaacatatcatctcacataattaccttttttgtgtgtatggtgagaacattaagatgtattctggcaaattttaaatatataacagtattagctatagtcaccatgctgtacagcagatctccagaacttattcatcatgcataactatgactttgtattctttgataaacatctccccacttcccctgctccccagcccttggcaaccacattctactccctggttctatgcgtttgactttttcagattttacaaatgagtgagatcattagagtatttgtctttctgtgcctctttgatttcgcttagcattatcccttctatgttaatacatgtcacaaataacatgtcctttttaacgcta

SEQ ID NO: 49650 - DNA, 346 bp, Homo sapiens
aaaacaaaaataaaattaattttcttcaagaatgaagaattgaaagtataaccaagggaatgtattcacaatgtagcatcatataacagaggaagcaggcaagactttcctagtatgttaattcaaaatggtcttacattaacacgggaacaaaggcccagagaggttaagtgattggtcaaagatacccagtgagttaggggtactcctgggctaaactcaaatgctaaactcttggctgagcactctttccaccacctatggtgccagctttatgcagcagctatgaaatctcaataaattttagtcactgacattcttttccaactcgattgataaatacaga

SEQ ID NO: 49651 - DNA, 409 bp, Homo sapiens
tcttacaataaacctgttttacagctttcattttacacataagaaaaactgaagcagagagaggttaagtaacatttccaaagttatacaactagtaagttgggattcaaacccgggaggtctgctgtgagtccttgcattaaagacaatgcttgccaagtaataagttctcaaaaaatggatgatgatgatgatgataagaaaatagcctggcatatagtaggtactccatataagccatgctgccctcttctgtggctagccctaatcctaaacatctatcccctccccgcagtaagcacattttctttttccttctcacctcttttctggccatttgggtgctctgagcaagccagacagaggcttggctggatgcggaaagaccaaatgtggtgttgcaggtgaa

SEQ ID NO: 49652 - DNA, 588 bp, Homo sapiens
ggaaaatcttggttcttataagatgcgttttatatagatacagaaatttgtgtgcttttgaattgattttccagttagctaatgtttattctggttctgcttttttcccccttttttaatgttttaatctgcctacatttgaaaatttccattttgagagtgttcatgaaaacttccgtgtttctaagtgttgataaatataaattagtacagtaaaactttggaattttaatcagtttcagttaacaggacaggtgttctgtggcctgacgttttggggggacaacacggagtataaatgtcagctttttctttttttaataaatgtcagcttttttttaacagaaaatttcccagatggttatctgaatccccaaattacctgtcctagttgtaaatcaatgccataacgtcattctgcttctaaaataagaggcttaaacctaaattctatccatgatgtggtttgagataccatttcaaaagcaccaaccctatgctaattactttactgccaacatcattctttcaggtccactcccctccctccagtagtagtgatggtttgagttaatgaccagatcttta

SEQ ID NO: 49653 - DNA, 278 bp, Homo sapiens
gacgacaatgtttattctcattagtcagacgaactgcagcacaagtgtttcaaagaggaaccccaagaactcccaggcttgtaggaagcatctgattttacataagtttgcacagtaggaaactgaggtcctcggggaggaacaaagcaacttatgatcagacaaatgagtcactagtagagctgaaatgagaagccagatctcctaaccactcccacaccccatcacagtgcctcactgcgtctcttactggtgggcttgattgctttccaaggcca

SEQ ID NO: 49654 - DNA, 715 bp, Homo sapiens
ggtggaatctgcagattcagaacccatgaatacggagtgctgactgtatatactattgaaaaaaatcagatactatagaagagtacgaagaagaaggcaaaaatgtccctagccgggttaccacccacagataacttgtctgatatattttagtgaccatctttagcatgtttttacacacctgcgtgcatacgcattcccccattccctctcaggcataaggaaactattttacataaatagcaatttagtttcattgctgttctctagcttatcttttatttttactgaatcagtagtataggtgtctcttttcatgtttaataaaaatatatcaactcataatttttaatagttatacattatgatatgttccacagtccacatgaccaaatccctactggtagatattttacttatttctttttttaaaatactataataaaaaagtgctgtgctaaccttatctacttgtgtcatttttcttcttagctttaattcctagatgtgagtttgctagatcaagggcatgcttattctttgcttattcttctcccgtctcctcccgtttttctccttcctgcctgcctgcctgcctgcctttctttttcttttccccttctccttccctttttcctttctccttttaccactctggagtgcggtggcatgatcacagctcactgtagccttgatcttctgggctcaagtcatc

SEQ ID NO: 49655 - DNA, 736 bp, Homo sapiens
agcaaagttttaaatgagtagaagtgtacaatccccattttgcagaagagaaaactgaggtgcacagaggttaagtaacttgccagacgtggcaggtctgataagagatgagattcacatcccttccacccacccccaaattaagcactattttagatttttttttttaaccttactcattcttgagcatatgatcatgaaaaaaggtacaatgtgacataagtagacagctgttgctactagcttctttcctaatctctctctttggaaagtgggggagctgaggatttttattttaatataatttctagcccatttcgagacatagttttacccactagatgtagcatcttttgatgataaggatgatgatgattgtttaaatcaattattgtcacgatggtggcaaagtggcaaggtctaactccatcctacatttattagtctgtattctactcagaaaaactgcactctttccatcatctccattgatgaaagaaaaacttcagctaaattaaatgtaaaggagtttaattgagcaatgaacggttcgccaatcgggcagctcccagaatcacagtggattcacagagactccagcgcagccacgtggtggaagaagatttatagaggaaaaaagggaaatgacttacagaaatcagaagtgaggtacagaacagctggattggttacagcttggcatttgccttacacagtttgaacactcagcaatgta

SEQ ID NO: 49656 - DNA, 1687 bp, Homo sapiens
agaatctagaaccatggctgaccaaagcgagacttccgagtaaggttcgttaacaggcatcctgctgaattagaaggaaacaggaacgaatccaaagcaaacggggctaaacttccctcgaggacatttcctgagctgcaacatgggaagcgacacaccgaagctggtgagctggtgcaactgcacacaccttttctctggtttttagtactcgggtcatcctggggagaccgctcatgggctatgggcagcccatgcctggattttttggtgaatgagtctgaaaagcagtgaccaggtgtgttgagggcctccccttgcctgcacctttttatctctgagtgactgagggctgccaaggccagacaacgcacatgtgtcctggatcctcccctggcctggggcagcagcagcagcagcagctgggcttggggtgagtaggctggcttgaggaaggggctgcccacaagcagggctcatttcctgggtcagggcctgtcagactcaaagtcagctcttcagcattctgtttagaaaatgatgatgcagttcagtgagaaagaaagctcaggataaaatatgttttctggaggggaaatactcaagtgttctaagccaggaacagagactctcaagagaggaattctctggcattctctgccttggataaatcatggattaaacatgagcatccttagaataattttatttttgtatttcactttacactgtaatgcaaacagcttttatgttttctttgacgaagaatcataattgagtcactttaggtcttttagctggaagcatttcaccctaaatgaaaagttaatgcattttttacaaggattaacatgctaactacaacttgccctttcagcagatgacaataagggattctgaaaagtttggactgtctttttctttttgtatacaaataaagcagcagatcctttctctgtgaaggttgttgcagagctcccgtaccagcttataaaatgcggctgtttaagcaggacttgggtgggcagcagaattctgcacatgacgagtggctgcagcttagaaagcaaatttcacctgattccagtactgtgattttaaggaaacggtaaaactcaaagtgccagtaatgccatcaaggctcagtaacatgccatttcctcagcagctaaagacaaaaagaattattttggtgaggggatagaaatcctttcgctttgcagtgacacccactttttcttagcttggcttgggagtaaggagattggagtgtggggggacattagaaactcatttaaggcaaactgaaatctccttcatcagcagtcttcctgctggtgtagccacagcagaactccgaggcttgcaggctgggctgtctccttgctgcctggcctgggtgtttatttgggcaatgcaagctgacattgtgaggtgttgccgatgcccaggccagctagcagggagccctcccagggctggtagaaacctatgtgtatatatattctcaaatttaaatagattgtacatagtgaaatgtaaatgacatgtaaaacagcaatctctatttttcttaactattatatagcagtatatatttgttgaacatgcttgtatactcttcattaaccattttaatattttgtacagataagttgattaaatattttattcataaaaccgctca

SEQ ID NO: 49657 - DNA, 936 bp, Homo sapiens
  misc_feature (1)..(3): n is a, c, g, or t
nnngaggagctgaagggaccagcttggccgtcagttgcaagggtgtgaggcagaagcaacacaaaagatcttgatatgaagcaattatttttggtcttaaactgctgggactccagatgacccagaccacggtcagcaggcagaagccagatgctattgtcaacagaattgccttcaagattccttttctgattgttcattgctgagatgacatctcactatattgcccaggctggtcttgaacttctagcctcaagcaatcctcccacctcagcctctgaacgtactggaattacagatggagcaactgagattcttccccaactagactataagttctctgagggataaggaacatgtctggtttcctcatctctctgtcacagcaccctgtgaatgcctagaagacagtaagaatcaactgaatgtttgtagaaagaataacgatacttacctatagtctaaaggtttagtgatgaaatgaagtccactaacttctctctgcttacttccaccctcaataacatatttcctcaaaccccacagaggaaagacaattcattttttactattgtttaatagagccatgtttgtatgtagcttcctgttccgcttagcccaagacattaagtgggtcaggagtaaactctgccctctgtttttttccattcctttgtcacctgctcaagtggcagcccagagccgcttggcggcttccctgaagatgagcagagtgcagtagattaggcatggcctttctatctatttctactatggagaagctgaaaaagctatatggctggaaaaaaatcaccttggtactaatttgctattttacaatatttgaaaataaagacctgtggtcttcctatgtatttctttttaaacaatgaggggtatggaacatctatgaataaacatcaaggtcttcaagtg

SEQ ID NO: 49658 - DNA, 1403 bp, Homo sapiens
  misc_feature (1)..(3): n is a, c, g, or t
  misc_feature (1402)..(1402): n is a, c, g, or t
nnngaggagctgaagggaccagcttggccgtcagttgcaagggtgtgaggcagaagcaacacaaaagatcttgatatgaagcaattatttttggtcttaaactgctgggactccagatgacccagaccacggtcagcaggcagaagccagagatgacatctcactatattgcccaggctggtcttgaacttctagcctcaagcaatcctcccacctcagcctctgaacgtactggaattacagatggagcaactgagattcttccccaactagactataagttctctgagggataaggaacatgtctggtttcctcatctctctgtcacagcaccctgtgaatgcctagaagacaaatgaaatgggtcagcatctgacatactgcataaatcactgaaccaatattttctaaatgtaacatgcatgatggtacaaaatcacacatagatgaaaatcaactggtctttgaagaactttgattcattagtgagcttgaaaacccaacacaataaacagatagtggaagtggaaggagtatccctaaggatgcatttaaggagaaatgatgtgacagaagatttgaaagcaaaaaagaatctatcaggaagataagaaagcaattattaaacaaaaattaagaagccaatcgccctcccaagtttctaccccttggtaacattactgattcacactagtcaaaagtgctgaataatttgctacatgccattggaaaactatataacttactactaataaaacacctcacttctttttactgtctttcttcatttacccaagtcacctcttttaagaggcatctttgatttgcctacaacacattcatctacactgattgcttgtacaagaaaacaatgcaacccagcaatgtcagagactgaaaggttgtcttcttgctgtgtaagatttactgtgaatagagggaggatgtggaaaaacgctacaaccattgctccagggactatctctgccaaacagagatattatactgacgaaatgataatggtgaaatagctgtcagaccaaataattagaatatggagccgtaatacagtaaagtagtcttcatatattttatacagtttgtattgttctataggttgcttggagtttgtgtccagtgaaaatggatttagaacaacctgggatacttagtaataacaacgcacaaacatgtgtatacacaccaaagaagtgtgcattattcaataaatgtgttcctgatatgttgcatgtaaactgattttgtatggtcaaataatatcttaaatgatcaaggaattgattaaagaaatatgagatattagttacaaaaggaaatcattttgaaatacacgtgaaattttaaatcatgtttcatcaataaatatgattattacttttnt

SEQ ID NO: 49659 - DNA, 881 bp, Homo sapiens
  misc_feature (1)..(3): n is a, c, g, or t
nnngaggagctgaagggaccagcttggccgtcagttgcaagggtgtgaggcagaagcaacacaaaagatcttgatatgaagcaattatttttggtcttaaactgctgggactccagatgacccagaccacggtcagcaggcagaagccagagatgacatctcactatattgcccaggctggtcttgaacttctagcctcaagcaatcctcccacctcagcctctgaacgtactggaattacagatggagcaactgagattcttccccaactagactataagttctctgagggataaggaacatgtctggtttcctcatctctctgtcacagcaccctgtgaatgcctagaagacagtaagaatcaactgaatgtttgtagaaagaataacgatacttacctatagtctaaaggtttagtgatgaaatgaagtccactaacttctctctgcttacttccaccctcaataacatatttcctcaaaccccacagaggaaagacaattcattttttactattgtttaatagagccatgtttgtatgtagcttcctgttccgcttagcccaagacattaagtgggtcaggagtaaactctgccctctgtttttttccattcctttgtcacctgctcaagtggcagcccagagccgcttggcggcttccctgaagatgagcagagtgcagtagattaggcatggcctttctatctatttctactatggagaagctgaaaaagctatatggctggaaaaaaatcaccttggtactaatttgctattttacaatatttgaaaataaagacctgtggtcttcctatgtatttctttttaaacaatgaggggtatggaacatctatgaataaacatcaaggtcttcaagtg

SEQ ID NO: 49660 - DNA, 1102 bp, Homo sapiens
  misc_feature (1)..(3): n is a, c, g, or t
nnngaggagctgaagggaccagcttggccgtcagttgcaagggtgtgaggcagaagcaacacaaaagatcttgatatgaagcaattatttttggtcttaaactgctgggactccagatgacccagaccacggtcagcaggcagaagccagatgctattgtcaacagaattgccttcaagattccttttctgattgttcattgctgagacatggtcttgctctgtcacctaggccgtaatacagtggcgtgatcctagctcacagcagcctccaactcctgggctcaagagatcctcctgcctcagccttctgactagctgggactacaggaatgtgctaccacacccagctaattttttaattttttgcagagatgacatctcactatattgcccaggctggtcttgaacttctagcctcaagcaatcctcccacctcagcctctgaacgtactggaattacagatggagcaactgagattcttccccaactagactataagttctctgagggataaggaacatgtctggtttcctcatctctctgtcacagcaccctgtgaatgcctagaagacagtaagaatcaactgaatgtttgtagaaagaataacgatacttacctatagtctaaaggtttagtgatgaaatgaagtccactaacttctctctgcttacttccaccctcaataacatatttcctcaaaccccacagaggaaagacaattcattttttactattgtttaatagagccatgtttgtatgtagcttcctgttccgcttagcccaagacattaagtgggtcaggagtaaactctgccctctgtttttttccattcctttgtcacctgctcaagtggcagcccagagccgcttggcggcttccctgaagatgagcagagtgcagtagattaggcatggcctttctatctatttctactatggagaagctgaaaaagctatatggctggaaaaaaatcaccttggtactaatttgctattttacaatatttgaaaataaagacctgtggtcttcctatgtatttctttttaaacaatgaggggtatggaacatctatgaataaacatcaaggtcttcaagtg

SEQ ID NO: 49661 - DNA, 1003 bp, Homo sapiens
ccgagatcatgccactgcactccagcccgggcgacagagcagattccgtctcaaaataaacaaacaaacaaacaaaccaaacatccagatttcttgaccaaaccagtgccttctgcaatcttttgtatctcagtaaatggcagtttgccaggctgtattagtcagggtcggggttctctagagggacagaactaataggatacatgtatatatgaaagggagtttattgaggagaattgactcacacgatcacaagctaaagtcccatgattggctgtctgcaagctgaggtgcaaggaagccagtggtggatcagtccaagtcccaaaacctcaaaaatagggaagccgacagtgtagccttccatctgtgggcaaaggcccaagaggccctggcaaaccactggtgtaagtctaagagtccgaaagctgaagaactgggaggctgatgttcaagggcaggaagcatccagtacggcagaaagatgaaggccagaagactcagcaagtctgctttattctagccgctctggtagccgattagatggggcccacccagattgagggtgggtcagcctcttccggtccactgactcaaatgttaatctcctttgggaacaccctcacgacacacctaggaacaatactgtgaatccttcaatcaagttgacacttaatattaaacatcacaccagggccaaaccttgggagtcctgcctgacttctcacacccacatttgatccatcagcaagtcctacaggctctactgtcaagagcatccagaatctgcttttgctactcccactgcctcacccccgaatcctggccacctcctggaccagcccgcctcacctctctcctgccttttgcagctacctccccttcctgcttctatgcttgtctccctgtgttgtcttttctcaacacagctgctagagcaatcctattaaaatgtaaacaaacaaaaccaaaaataaatgacaattctcctttaaaaaaacca

SEQ ID NO: 49662 - DNA, 985 bp, Homo sapiens
ccgagatcatgccactgcactccagcccgggcgacagagcagattccgtctcaaaataaacaaacaaacaaacaaaccaaacatccagatttcttgaccaaaccagtgccttctgcaatcttttgtatctcagtaaatggcagtttgccaggctgtattagtcagggtcggggttctctagagggacagaactaataggatacatgtatatatgaaagggagtttattgaggagaattgactcacacgatcacaagctaaagtcccatgattggctgtctgcaagctgaggtgcaaggaagccagtggtggatcagtccaagtcccaaaacctcaaaaatagggaagccgacagtgtagccttccatctgtgggcaaaggcccaagaggccctggcaaaccactggtgtaagtctaagagtccgaaagctgaagaactgggaggctgatgttcaagggcaggaagcatccagtacggcagaaagatgaaggccagaagactcagcaagtctgctttattctagccgctctggtagccgattagatggggcccacccagattgagggtgggtcagcctcttccggtccactgactcaaatgttaatctcctttgggaacaccctcacgacacacctaggaacaatactgtgaatccttcaatcaagttgacacttaatattaaacatcacaccagggccaaaccttgggagtcctgcctgacttctcacacccacatttgatccatcagcaagtcctacaggctctactgtcaagagcatccagaatctgcttttgctactcccactgcctcacccccgaatcctggccacctcctggaccagcccgcctcacctctctcctgccttttgcagctacctccccttcctgcttctatgcttgtctccctgtgttgtcttttctcaatccaccttctaaggatatccagttggaatgtaatctttctttaccaatggtttatggatag

SEQ ID NO: 49663 - DNA, 316 bp, Homo sapiens
  misc_feature (146)..(146): n is a, c, g, or t
tcagtgaataatagaaaacttttattagcagcatcttaaaaagtagggaaacaaacacccagtctcttgataaaaatgagtctcttgggccaggcgtggtggctcatgcttgtaatcccagcactttcagaggcccaggtggcagnatcacaaggtcaggagttcaagaccagcctggccaaatggtgagaccacgcccccccccccccatctctactaaaaatacaaaaattagccgggtgtctgttgtcccagctacttgggaggctgaggcaggagaattgcttgaacctgggaggcggaggttgtagtgagc

SEQ ID NO: 49664 - DNA, 443 bp, Homo sapiens
cctctggctgcccttctgaaggatcccgtgaggccaggcagaaatggtttgctaggggacccagcgagctcacaagtctttcctcattgcttcctctgcccctgtattttgctaggctctctaaattgactcggcttcaggtatcaagacgctcaccttctaagaggcttgccctaactggagtgctggagtctgaactttctttgaacatcgtttgatctcagatgcagccagtcctgtgcacagcctgatgggatggaatgttcaggatcatcatgtgattcccctgggtggcctagctgagggacacaaatttccccaggcagagaagacagcacaggaggaagaagctccaatatcgagagtgagagggctgcaaattcgtcaagagctggcacctccaaccaaaaatgtgcagttatcgatcaataaaaccagctttt

SEQ ID NO: 49665 - DNA, 940 bp, Homo sapiens
tctggttggctctctgcaaggctgctttaaagcaacactgcagtgctagcagtggaggccctgctgatcagtgattcatcccagggattctgaggggccatccatatcaggcaggtggcccaccctgcccactgatccctctcaccctgctcagcaggtcctcccctgccaccgagcgcaaacatctgtgtccttcaatgacctgcccaactctgtttggtttcctgcggagagagggctttttaactttctgcttcctgcctcgccctgcttccctggttggcccaccggagtgacctctgatcctctagtctcagttgagccaaattctgactgtggactgttgtctgggttctagctttctttcaaaccgcgtgacagtaggggtttgggttggctctagacacggtgagcgcctagtcattgtcatgagactggatcatttcagcctgggggtctgccagcagttgtgtgttttgctgggatagactcagacagctcccttgagacattcccaggcaatgggaagcctaggaggcctgcaggactcagtttacatgcaatctcctactgactccacacctggggttcattttggaggctctaggtcaagaaaccctctggctgcttccctctttttccctgtgggagcttcatagggtagatgtggaggccacagtgtatatggggaccaggaagctcagaaatagagggaggctgatgatgggggagcagaattgagtgtggcatggaggctgccaggggagctgttacaggtctgcttgcatcagagtggactaggttgacgagaaggattagtaaagaggagctgggacttgaagctaagatttaagaaaaaggatctccaggacacttcatctggaggcccagagaaggcaaaatcttccagtcaaagcaacttagctgaggaacaattttt

SEQ ID NO: 49666 - DNA, 145 bp, Homo sapiens
gaaacaaagttcctgattgagagaccagaggaggccacttgggatttgatctcagaagggagtctgctcatacagagatgcatatgaagacgttccagaaagagggaacagagttggcagagcttcagctgcagagagggagcag

SEQ ID NO: 49667 - DNA, 397 bp, Homo sapiens
aggggaggcacagactctgcatgggcataaccccatgatgcagggaaacccacacctggtggaaggggatggctagaggaggctcggagtgaagccccctgaagctcaggacctggagcttggcattttgtgcctgggtataagagagacaataccgttaggtgaaattttccaattcttacaagaaacccttccctaatcgtgttcacatggtttgacatttttaaatgcttttgacatttggcttttgcaaatattaataacagtttagctgatagaaatataaactgaacgttagttgtataaaaattatatgctctcaaaatatatttagcaacttcaaaagatttagctgcccatctgttttgtagaattaacaccagcttgaaacatattc

SEQ ID NO: 49668 - DNA, 644 bp, Homo sapiens
gcaggttttattcctggccaggaatggaaaaggagagagctcttgctctaaagacaccttcctcccaagctgtgggaagctggggaactttaaggagttagatgttgggtggaagataggtaagcatattcagagaggaactccagatgtactggcatacatcataaacgtgtctccatacaccccacgttcagaaaaggcagcgattctcctctgggtgagaagcttagcattataatgatatgctaatgatctaaaggtagcaaggagtctctgcttctggtttgctgagtttcactcaggccttatcttcctgtagtaattggcgaagggtcctgaaactcctggaccacaaggagtccttttaagcaggcttaaaaggactttaagtaaaagagaatagaaaaaaagaaagctgtttaagaaaataatgagcttcctcagctgtatctcctggaccgccctggtaacagaattaggaaaataaatagcagtggcaaagtagaggtacttttctcctttattgtcatgaattactaaatgaatcagaactaacagagctggcatgaataggaactttaacattggacaaagagaaattcaagcataagccatatcaatatcaaaaatttccttagatgtat

SEQ ID NO: 49669 - DNA, 422 bp, Homo sapiens
aaccagtctggcaaagtagaaaaagcaaaggatttagaagtcaaaacacctgcttttaaaaggtcctgatggccagcagccatttgacctcaagccacaacctctctgggtcttatcttactcatctgtaaaatggttataataatacaggacagagttgctgtaaaggctcaaacaagctaaggcactttctaaactatgcagtttatagagtttataggcttcaaatgatgactactacaatgcttagtatctcgtaataaatatgtttctccttctccaatgatcagatctacccagaaagcctacttcaggtcttgaataaatatatatatagtcttggcccggcgcggtggctcacgcctgtaatcccagcactctgggaggccgaggtgggcagatcccgaggtcaggagatggag

SEQ ID NO: 49670 - DNA, 618 bp, Homo sapiens
gagaatcgcttgaacctaggaggcggaggttgcggtgagccaagattgcgccattgcactccagcctgggcaacaagaacgaaactccatctcaaaaaaaagaaaggagaagtgagatcattgttttgtcaagtatataccgggtattaaaatttaaaaagttttctacttaattggttagatcttgtcaaacttattgtttttatactctaccttcagaatatcttagaggtctttagctcaacctcaggtaaaatatgaattaatgacattttatagaatatgaattaatgagatttcactgactgtgtgaaaataaaagtgaaacctggccaggtgtggtggctaatgcctgtaatcccagcactttgggaggccgaggtgggcggatcacctgaggtcaggagttcgagaccagcttgaccaacatgctgaaactcggcctctacgaaaaataccaaaaaaattagttgggtgtggtggcgggtgcctgtaatcctagctacttgggaggctgagatgggaggatcgcttgaacccaggaggcagaggttgcggtgagccgagatcgcgccgttgcacttcagttgggcgacagagcgagcctccgtctcaaat

SEQ ID NO: 49671 - DNA, 390 bp, Homo sapiens
gagaatcgcttgaacctaggaggcggaggttgcggtgagccaagattgcgccattgcactccagcctgggcaacaagaacgaaactccatctcaaaaaaaagaaaggagaagtgagatcattgttttgtcaagtatataccgggtattaaaatttaaaaagttttctacttaattggttagatcttgtcaaacttattgtttttatactctaccttcagaatatcttagaggtctttagctcaacctcaggtaaaatatgaattaatgacattttatagaatatgaattaatgagatttcactgactgtgtgaaaataaaagctgaggcgggcagatcacttgaggtcaggagttcgagaccagcctgaccaacatggcgaaaccctgtc

SEQ ID NO: 49672 - DNA, 601 bp, Homo sapiens
ggcacttaatgtgggtatctaaaagccaacaggaaggatccgtcgaggcaggtgggggttgaaaaaaatcattaagagagcaagaaaggatgattggaaatgccaggatccagaaagaacagaagagccaagctcaggtagaggggctggctcttcagtaccaggaagatggcaggatggaatgagtgtgtgtgcagctagatcgtgcagggacgtgaaggtatttctctccaaaggcttctgtttcccccatcgagtaggagacaaggccatctgctgaaagggacccagaggtaggggactggactctggggcaacttgaaaaggtttgaagaagtctcttaagcctcagtttcctgggtaaaataacagtatctgtgtcatacagttctgaggattaaaagagctaatacttgtccagaattagccttcgagcctcacgcataacaggtgcacaacggatgctcatggttacatgccccacggagtcatcagctgccaacactgagggcagatgctacttgcccgtggttagccttttaagtgccttgattcctcatccaatagcctgttttggtaccatagaacaaattataaaaag

SEQ ID NO: 49673 - DNA, 249 bp, Homo sapiens
gacattgcaaaccgctggtctttcgagggtatggatcgatggattaagaagattgaggaacatgcccctggtgtccctaaaatcctggtggggaatcgcctacatctggcattcaagaggcaggtgcccagggagcaggcccaggcctacgccgagcgcctgggcgtgaccttctttgaggtcagccctctgtgcaatttcaacatcatagagtctttcacggagctggccaggatagtgctgctgcgg

SEQ ID NO: 49674 - DNA, 207 bp, Homo sapiens
tttcccccctcacccccgcaagcagaagagaaaggatcccagatggaagcttggagttgcaagatattaggaaagcatgtagaagtaaatctgaatcaattatgcaattatgtctatgtaaagcagtaataacaatgtctattggggcttatgatagagagaaaattaaaatttgtgaacaatagcacataaagtatgaaagatggg

SEQ ID NO: 49675 - DNA, 355 bp, Homo sapiens
gacaaggattctcaggtatttatccagggtaagggcaagggcttttctgcagtccaggacattagaagagtcctgaaccaagaactccacccctgccccgatatcagctgtttttactgactgagctgttggagaacagttttggtgtgcggaaacagtgagatccctaaccctacacccctgaacccagcagatatatccacactgaccagaaaggactggctaaccacaagcctgcctgtgcatggcagggaaaggaaagccattcttgagtaaatggtgttcaaaggttgggcaatatatgtgtatggtgttctcctgtggacataattgtgcacaagggtcagaagaaatt

SEQ ID NO: 49676 - DNA, 460 bp, Homo sapiens
taaatttgataatatgatcctggctggttggttgggattttacagattaaatttttagggggattttcttagtaaaaacataagagaatgtttagggtcatggcatttcttgctctagtctttatttcattttgggggagacacagaattgttcttcagtcagctctgtgtcagaggagagagtaaagctgttccttcatcatgcaatagtaatctgagtcaaggatatgaaacaagcccttcaggaagtgagccaattaaatgttattcttcagatatgaagttaataaacaaaatatagtaaagcatcaaaactttggagaatcttatattccctaagtggtagaaataaattgatgtcccatgataaaaataaacgagatccatgggaaatttttcttgttcttccccatcatgttgtctcatctctcacacattatgcacaatgatatgagaaaat

SEQ ID NO: 49677 - DNA, 392 bp, Homo sapiens
tggtgaatagttttggagtcagacaaaatcaggtttaaatcctgctacggttactagctgtttgaatacagacaaaaaagtttcctaaatagtaccacaactgtagcatagagacaaaatcatattagagtgtgttaggagaagtaaattatataatgtgtacaaaatggtgcataatatgccctgaataagtggttttttcttgttattgttgataagcttcaatgtgactgagaattttttattttaccttactcagaaggcactttacatccttaactacccaaagtgtggtctgcagactgacatatcagcattatcctcttagaatttgtaagaaatgcagaatcttgggccccaccccagacctactaaaccaagatctgcatttt

SEQ ID NO: 49678 - DNA, 107 bp, Homo sapiens
tacatttacaaaggtgcaaaaaagcatcttgcttttgcaagaaatagtaacatcattcaatatgctttcttatttactaaaaccttgaaataaaattgtaaaacatc

SEQ ID NO: 49679 - DNA, 296 bp, Homo sapiens
aaggaaataaagtctccaaatgatgctgttgcatagttaagaaatatgaccttcctactgcccagaaagagaatatgaggcgaaatcaatgaagagagaaatttcagttatgtttcttgcccttgctctccagagcatcattcagagttatttttctttattctgagacaattttattttgtcctcaaatcctctggatagcatttacatatgtggttgagtctgtaatcctagagatacttggctaaaactaatacctgctggttagtcctgaagttaaagttacgttttcctaa

SEQ ID NO: 49680 - DNA, 388 bp, Homo sapiens
ccacagctaaactccccataatatgattttttgttacatagaggctagttttctttcccccaggagaggtagtatataaacgctgtagggaaccttcagaagtcaatgctcttactagaaatctagggctccagggaccaaaaatcaggaagtatgccctttccccttaaaactgcaaaataaacagatctctagggagagggtctccttcttggtaggcatgcctgatatatttgcccctaaagtatcatattctaagatcagagtttaacattatgttctaattatctgaatgccataaggggcacactaagttttccattaaataatgttttcttttattcattatataacttcaaatttaaatacctgctcacaaagaatctac

SEQ ID NO: 49681 - DNA, 366 bp, Homo sapiens
attagaggcatgagccactgcatccagcctaccataacttattaaatcagtttcccacacttggacagtgaggttttttccaattttatttggtattattaaaagtgctgttttaaacattcttgtgtatacacgtttgtgtacatccctgattacttttttaagaataattccctagaaggagaattctactttttatgccattaccaaatggccctctgaaaagtgattgccccagcttagtcttgccacatcagctttaaaaagtgacattgcacctggggcagattattttctcactgcctcacttcatcatcaatagctgcattcaaggggaccggaaagcttcagctttagctgtgactt

SEQ ID NO: 49682 - DNA, 338 bp, Homo sapiens
agatgcagtttttcgttagccacttcctccttaaaggagaccagtgggcggagggggaggactcctctgtgtgcctgttaccagtagcgaatctgatgcatctgcagcaacctcaattcttacctcctcagaagaaagaattcggccgaggggcataaggtagggagaccgagaagttttagaggagtgaaaatttattaaaaagttttagagcaggaacagaaggaaggaacgcgcacctggaagagggccaagctggtgactcgaacggttattgtgcagtttggccttttgacttgaggttttatacattggtacgtccagggtcttgtgtccct

SEQ ID NO: 49683 - DNA, 407 bp, Homo sapiens
aaaaaggaatatttcatatgtgagcttaaaaaatcattagctctgttatattgaatacttgcaaaatttcattaaaattgtttttgcagaattttatgatagaataaattacttttgtgtatgtattgatgaaatcatggagttatatgagtttggatttctcaagcacccaaatagtcaacatcaagaatcagggaattaggaggttagaaagtcacatctttagtttttttcaggaacttgcccaggaacagaggggtcctaggtgggatgaccagaccccagttctctgttcttcagcccagtgcttttttcatgacatcactcaagtcagattttaaatttgtgcattacactggctttatttagaatcctgtgccaggcaatatagttttgattagaagctg

SEQ ID NO: 49684 - DNA, 384 bp, Homo sapiens
  misc_feature (4)..(4): n is a, c, g, or t
  misc_feature (21)..(21): n is a, c, g, or t
gccntctcagatggtgatatntcactgctgatgtcatacaccagcaatcatcttttcaggcagtttctcctcctttctctctctgtttaacttatatgctatcattctttgatattttttctttctttttctcttttcacagaattgataaaaaaatgtctggaggccagagcgggtatgaactcagtgaagccaaagccattctaacagaactaaaatctatcagaaaggcaattagctcaggagaaaaagaaaaacaagatctgatgcaggtacattataaaacattttgttaagccaaacttctaccttctgaggcccccagaaactcttactggggcagaagtgctccctcagagtctggatgacccttctacctctgcc

SEQ ID NO: 49685 - DNA, 1235 bp, Homo sapiens
aatgatgcctataaggaaaagtcaagttctcacacaagcttattctcaggatcttcatccagtactaaatatgatcccgatattttaaaagctgagatctccactacaagattaagggttaaaaagctaaagagagagctctcacagatgaagcaggaactgctctataaagaacaaggctttgaaacattgcagcaaattgataaaaaaatgtctggaggccagagcgggtatgaactcagtgaagccaaagccattctaacagaactaaaatctatcagaaaggcaattagctcaggagaaaaagaaaaacaagatctgatgcagagtcttgctaagctgcaggagcggtttcatttggatcagaacattggcagatctgagccagatttgagatgtagtcctgtgaactctcatttatgtctctccagacagacccttgatgctgggtcacaaacaagcatttccggagatattggagtaagaagtagatcaaatttagctgaaaaggtcaggctaagcctacagtatgaagaagccaaaagaagtatggccaacttaaaaattgaactgtcaaaattggacagtgaggcctggcctggggcactggatattgagaaggaaaaactgatgctgattaatgaaaaagaagaacttttgaaagagcttcagttcgtcaccccacagaaacgtacccaagatgaattagaacgcctagaagctgaaaggcagcggctggaagaagagttgctgtctgtgaggggaacaccaagcagagctctggccgagagattgagattggaagagagaagaaaagagctgctacagaaacttgaagaaactactaaattaactacttatttgcattcacaacttaaaagcctctctgccagcaccctgtccatgtcatctgggagcagcctgggttccctggcatcgagtcggggctctctgaacacctccagcagagggtcactcaactccctcagttccaccgaactctattacagcagtcaaagtgatcagatagatgtggattatcagtataaactggacttccttctgcaagagaaaagcggttacattccttctggacccatcaccaccatccatgaaaacgaggtggtcaagtcccctagccagcctggccagagtggactctgtggagtggcagctgcagcaacaggccacactcctccactggctgaggccccgaagtctgtggcctccctgtc

SEQ ID NO: 49686 - DNA, 463 bp, Homo sapiens
gatttaattttactatctgttaatgtagtaacacagtggaggaaagttttttctagcattctgtgaatctgaaaattctcattacttttccgaattgggaaggcagccagccataagtggactgcaatgaggtttcagcttgattcatcttaataatatagaattatttctgtattttggcagtcaagaaaataattgactttttgcaggtcttacgataaaactaaaattatctgtaccttatttggtagcaactggttattctgacagttagtgaaaataataacttatattctagcattaaaattactggctaagatattttttaaagtctttttcataagtagttctgatgtagtcctacttatttaaaacttaaaatgtatttattacgtttgaccgaatttttggatttattgaattcttttaaagcttcacataagaaaaagggaataatatgttg

SEQ ID NO: 49687 - DNA, 823 bp, Homo sapiens
tagcgctaggtacgaggctgggtggcgccggaaacggcggcggcggcgacaggaccgaggggccttagttggtgggcaagtcggggatcccagaaagagaagcgtgacccggaagcggaaacgggtgtccgtcccagctccggcctgccagtgagcttctaccatcatggacctattgttcgggcgccggaagacgccagaggagctactgcggcagaaccagagggccctgaaccgtgccatgcgggagctggaccgcgagcgacagaaactagagacccaggagaagaaaatcattgcagacattaagaagatggccaagcaaggccagatggatgctgttcgcatcatggcaaaagacttggtgcgcacccggcgctatgtgcgcaagtttgtattgatgcgggccaacatccaggctgtgtccctcaagatccagacactcaagtccaacaactcgatggcacaagccatgaagggtgtcaccaaggccatgggcaccatgaacagacagctgaagttgccccagatccagaagatcatgatggagtttgagcggcaggcagagatcatggatatgaaggaggagatgatgaatgatgccattgatgatgccatgggtgatgaggaagatgaagaggagagtgatgctgtggtgtcccaggttctggatgagctgggacttagcctaacagatgagctgtcgaactccctcatggggctcgctagtgtggtgctggggaaaaagcgaggcgagccgcctgtgttgtgttggctgggcggttactggggtggtgcctgcccgacgggggcggtccaccgg

SEQ ID NO: 49688 - DNA, 918 bp, Homo sapiens
tagcgctaggtacgaggctgggtggcgccggaaacggcggcggcggcgacaggaccgaggggccttagttggtgggcaagtcggggatcccagaaagagaagcgtgacccggaagcggaaacgggtgtccgtcccagctccggcctgccagtgagcttctaccatcatggacctattgttcgggcgccggaagacgccagaggagctactgcggcagaaccagagggccctgaaccgtgccatgcgggagctggaccgcgagcgacagaaactagagacccaggagaagaaaatcattgcagacattaagaagatggccaagcaaggccagatggatgctgttcgcatcatggcaaaagacttggtgcgcacccggcgctatgtgcgcaagtttgtattgatgcgggccaacatccaggctgtgtccctcaagatccagacactcaagtccaacaactcgatggcacaagccatgaagggtgtcaccaaggccatgggcaccatgaacagacagctgaagttgccccagatccagaagatcatgatggagtttgagcggcaggcagagatcatggatatgaaggaggagatgatgaatgatgccattgatgatgccatgggtgatgaggaagatgaagaggagagtgatgctgtggtgtcccaggttctggatgagctgggacttagcctaacagatgagctgtcgaacctcccctcaactgggggctcgcttagtgtggctgctggtgggaaaaaagcagaggccgcagcctcagccctagctgatgctgatgcagacctggaggaacggcttaagaacctgcggagggactgagtgcccctgccactccgagataaccagtggatgcccaggatcttttaccacaacccctctgtaataaaagagatttgacacta

SEQ ID NO: 49689 - DNA, 1040 bp, Homo sapiens
tagcgctaggtacgaggctgggtggcgccggaaacggcggcggcggcgacaggaccgaggggccttagttggtgggcaagtcggggatcccagaaagagaagcgtgacccggaagcggaaacgggtgtccgtcccagctccgtgagtggcccctgctggaccgtggatcccgggcgggcgtgcgggcggcagcgtacgaggccttctactcgcccgggtgtccggtgcctcgcttctccctgggaccctgtcgtcaacatcgaggcctgccagtgagcttctaccatcatggacctattgttcgggcgccggaagacgccagaggagctactgcggcagaaccagagggccctgaaccgtgccatgcgggagctggaccgcgagcgacagaaactagagacccaggagaagaaaatcattgcagacattaagaagatggccaagcaaggccagatggatgctgttcgcatcatggcaaaagacttggtgcgcacccggcgctatgtgcgcaagtttgtattgatgcgggccaacatccaggctgtgtccctcaagatccagacactcaagtccaacaactcgatggcacaagccatgaagggtgtcaccaaggccatgggcaccatgaacagacagctgaagttgccccagatccagaagatcatgatggagtttgagcggcaggcagagatcatggatatgaaggaggagatgatgaatgatgccattgatgatgccatgggtgatgaggaagatgaagaggagagtgatgctgtggtgtcccaggttctggatgagctgggacttagcctaacagatgagctgtcgaacctcccctcaactgggggctcgcttagtgtggctgctggtgggaaaaaagcagaggccgcagcctcagccctagctgatgctgatgcagacctggaggaacggcttaagaacctgcggagggactgagtgcccctgccactccgagataaccagtggatgcccaggatcttttaccacaacccctctgtaataaaagagatttgacacta

SEQ ID NO: 49690 - DNA, 949 bp, Homo sapiens
tagcgctaggtacgaggctgggtggcgccggaaacggcggcggcggcgacaggaccgaggggccttagttggtgggcaagtcggggatcccagaaagagaagcgtgacccggaagcggaaacgggtgtccgtcccagctccggcctgccagtgagcttctaccatcatggacctattgttcgggcgccggaagacgccagaggagctactgcggcagaaccagagggccctgaaccgtgccatgcgggagctggaccgcgagcgacagaaactagagacccaggagaagaaaatcattgcagacattaagaagatggccaagcaaggccagatggatgctgttcgcatcatggcaaaagacttggtgcgcacccggcgctatgtgcgcaagtttgtattgatgcgggccaacatccaggctgtgtccctcaagatccagacactcaagtccaacaactcgatggcacaagccatgaagggtgtcaccaaggccatgggcaccatgaacagacagctgaagttgccccagatccagaagatcatgatggagtttgagcggcaggcagagatcatggatatgaaggaggagatgatgaatgatgccattgatgatgccatgggtgatgaggaagatgaagaggagagtgatgctgtggtgtcccaggttctggatgagctgggacttagcctaacagatgagctgtcgaacctcccctcaactgggggctcgcttagtgtggctgctggtgggaaaaaagcagaggccgcagcctcagccctagctgatgctgatgcagacctggaggaacggcttaagaacctgcggagggactgagtgcccctgccactccgagataaccagtggatgcccaggatcttttaccacaacccctctgtaataaaagagatttgacactaaaaaaaaaaacccgggtctttttggcggcga

SEQ ID NO: 49691 - DNA, 1668 bp, Homo sapiens
tagcgctaggtacgaggctgggtggcgccggaaacggcggcggcggcgacaggaccgaggggccttagttggtgggcaagtcggggatcccagaaagagaagcgtgacccggaagcggaaacgggtgtccgtcccagctccgtgagtggcccctgctggaccgtggatcccgggcgggcgtgcgggcggcagcgtacgaggccttctactcgcccgggtgtccggtgcctcgcttctccctgggaccctgtcgtcaacatcgaggtctccaacaccaccttgctttggtgccgggcccactgactgtcctcggtgtatagtgcgaccgaatctccatcatcccgtcctcagtgtacaggatgccccagcgcccccaaccgtctccctcagcattcagggtccccaaatcctaatgccttgtcctgagcttcacagccccacattcacctgttcttggtacttagcgtttccgcccatcctgtcctcctctatcagaacccccacaattgctctgtcctcggtgcccacagtctccaaaacaccagtgcaccggcccgcgtcatcccccgctctcagtcgtatcaaggactccagggcctcacccatagttctggagagggaagctgaacttgcaagccataacttcttttggggcatggcgatgaaggaggggctcgggccagcacttggataattttcaggtctacctgtccccctttatgtgtccccgggacaatcccagtgttctcagctgctcccttttggctcctcattcctgcctccagtctccgttagccccttcccatttggcaaggctcccgtgaccctgttctgcttcttgccctcctgggccccatgccctacaactgggcctcactcacatctgtctcaggcctgccagtgagcttctaccatcatggacctattgttcgggcgccggaagacgccagaggagctactgcggcagaaccagagggccctgaaccgtgccatgcgggagctggaccgcgagcgacagaaactagagacccaggagaagaaaatcattgcagacattaagaagatggccaagcaaggccagatggatgctgttcgcatcatggcaaaagacttggtgcgcacccggcgctatgtgcgcaagtttgtattgatgcgggccaacatccaggctgtgtccctcaagatccagacactcaagtccaacaactcgatggcacaagccatgaagggtgtcaccaaggccatgggcaccatgaacagacagctgaagttgccccagatccagaagatcatgatggagtttgagcggcaggcagagatcatggatatgaaggaggagatgatgaatgatgccattgatgatgccatgggtgatgaggaagatgaagaggagagtgatgctgtggtgtcccaggttctggatgagctgggacttagcctaacagatgagctgtcgaacctcccctcaactgggggctcgcttagtgtggctgctggtgggaaaaaagcagaggccgcagcctcagccctagctgatgctgatgcagacctggaggaacggcttaagaacctgcggagggactgagtgcccctgccactccgagataaccagtggatgcccaggatcttttaccacaacccctctgtaataaaagagatttgacacta

SEQ ID NO: 49692 - DNA, 1232 bp, Homo sapiens
tagcgctaggtacgaggctgggtggcgccggaaacggcggcggcggcgacaggaccgaggggccttagttggtgggcaagtcggggatcccagaaagagaagcgtgacccggaagcggaaacgggtgtccgtcccagctccgtgagtggcccctgctggaccgtggatcccgggcgggcgtgcgggcggcagcgtacgaggccttctactcgcccgggtgtccggtgcctcgcttctccctgggaccctgtcgtcaacatcgaggtctccaacaccaccttgctttggtgccgggcccactgactgtcctcggtgtatagtgcgaccgaatctccatcatcccgtcctcagtgtacaggatgccccagcgcccccaaccgtctccctcagcattcagggtccccaaatcctaatgccttgtcctgagcttcacagccccacattcacctgttcttggcctgccagtgagcttctaccatcatggacctattgttcgggcgccggaagacgccagaggagctactgcggcagaaccagagggccctgaaccgtgccatgcgggagctggaccgcgagcgacagaaactagagacccaggagaagaaaatcattgcagacattaagaagatggccaagcaaggccagatggatgctgttcgcatcatggcaaaagacttggtgcgcacccggcgctatgtgcgcaagtttgtattgatgcgggccaacatccaggctgtgtccctcaagatccagacactcaagtccaacaactcgatggcacaagccatgaagggtgtcaccaaggccatgggcaccatgaacagacagctgaagttgccccagatccagaagatcatgatggagtttgagcggcaggcagagatcatggatatgaaggaggagatgatgaatgatgccattgatgatgccatgggtgatgaggaagatgaagaggagagtgatgctgtggtgtcccaggttctggatgagctgggacttagcctaacagatgagctgtcgaacctcccctcaactgggggctcgcttagtgtggctgctggtgggaaaaaagcagaggccgcagcctcagccctagctgatgctgatgcagacctggaggaacggcttaagaacctgcggagggactgagtgcccctgccactccgagataaccagtggatgcccaggatcttttaccacaacccctctgtaataaaagagatttgacacta

SEQ ID NO: 49693 - DNA, 1128 bp, Homo sapiens
tagcgctaggtacgaggctgggtggcgccggaaacggcggcggcggcgacaggaccgaggggccttagttggtgggcaagtcggggatcccagaaagagaagcgtgacccggaagcggaaacgggtgtccgtcccagctccgtgagtggcccctgctggaccgtggatcccgggcgggcgtgcgggcggcagcgtacgaggccttctactcgcccgggtgtccggtgcctcgcttctccctgggaccctgtcgtcaacatcgaggtctccaacaccaccttgctttggtgccgggcccactgactgtcctcggtgtatagtgcgaccgaatctccatcatcccgtcctcagtgcctgccagtgagcttctaccatcatggacctattgttcgggcgccggaagacgccagaggagctactgcggcagaaccagagggccctgaaccgtgccatgcgggagctggaccgcgagcgacagaaactagagacccaggagaagaaaatcattgcagacattaagaagatggccaagcaaggccagatggatgctgttcgcatcatggcaaaagacttggtgcgcacccggcgctatgtgcgcaagtttgtattgatgcgggccaacatccaggctgtgtccctcaagatccagacactcaagtccaacaactcgatggcacaagccatgaagggtgtcaccaaggccatgggcaccatgaacagacagctgaagttgccccagatccagaagatcatgatggagtttgagcggcaggcagagatcatggatatgaaggaggagatgatgaatgatgccattgatgatgccatgggtgatgaggaagatgaagaggagagtgatgctgtggtgtcccaggttctggatgagctgggacttagcctaacagatgagctgtcgaacctcccctcaactgggggctcgcttagtgtggctgctggtgggaaaaaagcagaggccgcagcctcagccctagctgatgctgatgcagacctggaggaacggcttaagaacctgcggagggactgagtgcccctgccactccgagataaccagtggatgcccaggatcttttaccacaacccctctgtaataaaagagatttgacacta

SEQ ID NO: 49694 - DNA, 1071 bp, Homo sapiens
tagcgctaggtacgaggctgggtggcgccggaaacggcggcggcggcgacaggaccgaggggccttagttggtgggcaagtcggggatcccagaaagagaagcgtgacccggaagcggaaacgggtgtccgtcccagctccgtgagtggcccctgctggaccgtggatcccgggcgggcgtgcgggcggcagcgtacgaggccttctactcgcccgggtgtccggtgcctcgcttctccctgggaccctgtcgtcaacatcgaggcctgccagtgagcttctaccatcatggacctattgttcgggcgccggaagacgccagaggagctactgcggcagaaccagagggccctgaaccgtgccatgcgggagctggaccgcgagcgacagaaactagagacccaggagaagaaaatcattgcagacattaagaagatggccaagcaaggccagatggatgctgttcgcatcatggcaaaagacttggtgcgcacccggcgctatgtgcgcaagtttgtattgatgcgggccaacatccaggctgtgtccctcaagatccagacactcaagtccaacaactcgatggcacaagccatgaagggtgtcaccaaggccatgggcaccatgaacagacagctgaagttgccccagatccagaagatcatgatggagtttgagcggcaggcagagatcatggatatgaaggaggagatgatgaatgatgccattgatgatgccatgggtgatgaggaagatgaagaggagagtgatgctgtggtgtcccaggttctggatgagctgggacttagcctaacagatgagctgtcgaacctcccctcaactgggggctcgcttagtgtggctgctggtgggaaaaaagcagaggccgcagcctcagccctagctgatgctgatgcagacctggaggaacggcttaagaacctgcggagggactgagtgcccctgccactccgagataaccagtggatgcccaggatcttttaccacaacccctctgtaataaaagagatttgacactaaaaaaaaaaacccgggtctttttggcggcga

SEQ ID NO: 49695 - DNA, 969 bp, Homo sapiens
tagcgctaggtacgaggctgggtggcgccggaaacggcggcggcggcgacaggaccgaggggccttagttggtgggcaagtcggggatcccagaaagagaagcgtgacccggaagcggaaacgggtgtccgtcccagctccggcctgccagtgagcttctaccatcatggacctattgttcgggcgccggaagacgccagaggagctactgcggcagaaccagagggccctgaaccgtgccatgcgggagctggaccgcgagcgacagaaactagagacccaggagaagaaaatcattgcagacattaagaagatggccaagcaaggccagatggatgctgttcgcatcatggcaaaagacttggtgcgcacccggcgctatgtgcgcaagtttgtattgatgcgggccaacatccaggctgtgtccctcaagatccagacactcaagtccaacaactcgatggcacaagccatgaagggtgtcaccaaggccatgggcaccatgaacagacagctgaagttgccccagatccagaagatcatgatggagtttgagcggcaggcagagatcatggatatgaaggaggagatgatgaatgatgccattgatgatgccatgggtgatgaggaagatgaagaggagagtgatgctgtggtgtcccaggttctggatgagctgggacttagcctaacagatgagctgtcgaacctcccctcaactgggggctcgcttagtgtggctgctggtgggaaaaaagcagaggccgcagcctcagccctagctgatgctgatgcagacctggaggaacggcttaagaacctgcggagggactgagtgcccctgccactccgagataaccagtggatgcccaggatcttttaccacaacccctctgtaataaaagagatttgacactacaaaaaaattaaaaaaattggagattaaaagggggggaaaaagggtatgga

SEQ ID NO: 49696 - DNA, 990 bp, Homo sapiens
  misc_feature (982)..(983): n is a, c, g, or t
tagcgctaggtacgaggctgggtggcgccggaaacggcggcggcggcgacaggaccgaggggccttagttggtgggcaagtcggggatcccagaaagagaagcgtgacccggaagcggaaacgggtgtccgtcccagctccggcctgccagtgagcttctaccatcatggacctattgttcgggcgccggaagacgccagaggagctactgcggcagaaccagagggccctgaaccgtgccatgcgggagctggaccgcgagcgacagaaactagagacccaggagaagaaaatcattgcagacattaagaagatggccaagcaaggccagatggatgctgttcgcatcatggcaaaagacttggtgcgcacccggcgctatgtgcgcaagtttgtattgatgcgggccaacatccaggctgtgtccctcaagatccagacactcaagtccaacaactcgatggcacaagccatgaagggtgtcaccaaggccatgggcaccatgaacagacagctgaagttgccccagatccagaagatcatgatggagtttgagcggcaggcagagatcatggatatgaaggaggagatgatgaatgatgccattgatgatgccatgggtgatgaggaagatgaagaggagagtgatgctgtggtgtcccaggttctggatgagctgggacttagcctaacagatgagctgtcgaacctcccctcaactgggggctcgcttagtgtggctgctggtgggaaaaaagcagaggccgcagcctcagccctagctgatgctgatgcagacctggaggaacggcttaagaacctgcggagggactgagtgcccctgccactccgagataaccagtggatgcccaggatcttttaccacaacccctctgtaataaaagagatttgacactaaaaaaaaaaaaaaaaaaagaaaaaaaaaaaaaaaaaaaaaaggggggggggcaaaaaatccccnngggggcc

SEQ ID NO: 49697 - DNA, 712 bp, Homo sapiens
cgctcggtaccctcacaagacctgactcaaaaaaaacaaaaacaaaattctttggtttaccagcccggcagacccaggagaagaaaatcattgcagacattaagaagatggccaagcaaggccagatggatgctgttcgcatcatggcaaaagacttggtgcgcacccggcgctatgtgcgcaagtttgtattgatgcgggccaacatccaggctgtgtccctcaagatccagacactcaagtccaacaactcgatggcacaagccatgaagggtgtcaccaaggccatgggcaccatgaacagacagctgaagttgccccagatccagaagatcatgatggagtttgagcggcaggcagagatcatggatatgaaggaggagatgatgaatgatgccattgatgatgccatgggtgatgaggaagatgaagaggagagtgatgctgtggtgtcccaggttctggatgagctgggacttagcctaacagatgagctgtcgaacctcccctcaactgggggctcgcttagtgtggctgctggtgggaaaaaagcagaggccgcagcctcagccctagctgatgctgatgcagacctggaggaacggcttaagaacctgcggagggactgagtgcccctgccactccgagataaccagtggatgcccaggatcttttaccacaacccctctgtaataaaagagatttgacacta

SEQ ID NO: 49698 - DNA, 864 bp, Homo sapiens
tagcgctaggtacgaggctgggtggcgccggaaacggcggcggcggcgacaggaccgaggggccttagttggtgggcaagtcggggatcccagaaagagaagcgtgacccggaagcggaaacgggtgtccgtcccagctccggcctgccagtgagcttctaccatcatggacctattgttcgggcgccggaagacgccagaggagctactgcggcagaaccagagggccctgaaccgtgccatgcgggagctggaccgcgagcgacagaaactagagacccaggagaagaaaatcattgcagacattaagaagatggccaagcaaggccagatggatgctgttcgcatcatggcaaaagacttggtgcgcacccggcgctatgtgcgcaagtttgtattgatgcgggccaacatccaggctgtgtccctcaagatccagacactcaagtccaacaactcgatggcacaagccatgaagggtgtcaccaaggccatgggcaccatgaacagacagctgaagttgccccagatccagaagatcatgatggagtttgagcggcaggcagagatcatggatatgaaggaggagatgatgaatgatgccattgatgatgccatgggtgatgaggaagatgaagaggagagtgatgctgtggtgtcccaggttctggatgagctgggacttagcctaacagatgagctgtcgaacctcccctcaactgggggctcgcttagtgtggctgctggtgggaaaaaagcagaggccgcagcctcagccctagctgatgctgatgcagacctggaggaacggcttaagaacctgcggaaccacaacccctctgtaataaaagagatttgacacta

SEQ ID NO: 49699 - DNA, 389 bp, Homo sapiens
ggggtcgactctcgaggattccggatgtcacgggcagagatcatggatatgaaggaggagatgatgaatgatgccattgatgatgccatgggtgatgaggaagatgaagaggagagtgatgctgtggtgtcccaggttctggatgagctgggacttagcctaacagatgagctgtcgaacctcccctcaactgggggctcgcttagtgtggctgctggtgggaaaaaagcagaggccgcagcctcagccctagctgatgctgatgcagacctggaggaacggcttaagaacctgcggagggactgagtgcccctgccactccgagataaccagtggatgcccaggatcttttaccacaacccctctgtaataaaagagatttgacacta

SEQ ID NO: 49700 - DNA, 3263 bp, Homo sapiens
cgccgtttgggccgggaagcgatgtagtagctgccaggctgtcccccgccctgcccggcccgagccccgcgggccgccgccgccaccgccgccatgaagaagcagttcaaccgcatgaagcagctggctaaccagaccgtgggcagagctgagaaaacagaagtccttagtgaagatctattacagattgagagacgcctggacacggtgcggtcaatatgccaccattcccataagcgcttggtggcatgtttccagggccagcatggcaccgatgccgagaggagacacaaaaaactgcctctgacagctcttgctcaaaatatgcaagaagcatcgactcagctggaagactctctcctggggaagatgctggagacgtgtggagatgctgagaatcagctggctctcgagctctcccagcacgaagtctttgttgagaaggagatcgtggaccctctgtacggcatagctgaggtggagattcccaacatccagaagcagaggaagcagcttgcaagattggtgttagactgggattcagtcagagccaggtggaaccaagctcacaaatcctcaggaaccaactttcaggggcttccatcaaaaatagatactctaaaggaagagatggatgaagctggaaataaagtagaacagtgcaaggatcaacttgcagcagacatgtacaactttatggccaaagaaggggagtatggcaaattctttgttacgttattagaagcccaagcagattaccatagaaaagcattagcagtcttagaaaagaccctccccgaaatgcgagcccatcaagataagtgggcggaaaaaccagcctttgggactcccctagaagaacacctgaagaggagcgggcgcgagattgcgctgcccattgaagcctgtgtcatgctgcttctggagacaggcatgaaggaggagggccttttccgaattggggctggggcctccaagttaaagaagctgaaagctgctttggactgttctacttctcacctggatgagttctattcagacccccatgctgtagcaggtgctttaaaatcctatttacgggaattgcctgaacctttgatgacttttaatctgtatgaagaatggacacaagttgcaagtgtgcaggatcaagacaaaaaacttcaagacttgtggagaacatgtcagaagttgccaccacaaaattttgttaactttagatatttgatcaagttccttgcaaagcttgctcagaccagcgatgtgaataaaatgactcccagcaacattgcgattgtgttaggccctaacttgttatgggccagaaatgaaggaacacttgctgaaatggcagcagccacatccgtccatgtggttgcagtgattgaacccatcattcagcatgccgactggttcttccctgaagaggtggaatttaatgtatcagaagcatttgtacctctcaccaccccgagttctaatcactcattccacactggaaacgactctgactcggggaccctggagaggaagcggcctgctagcatggcggtgatggaaggagacttggtgaagaaggaaagtcctcccaaaccgaaggaccctgtatctgcagctgtgccagcaccagggagaaacaacagtcagatagcatctggccaaaatcagccccaggcagctgctggctcccaccagctctccatgggccaacctcacaatgctgcagggcccagcccgcatacactgcgccgagctgttaaaaaacccgctccagcacccccgaaaccgggcaacccacctcctggccaccccgggggccagagttcttcaggaacatctcagcatccacccagtctgtcaccaaagccacccacccgaagcccctctcctcccacccagcacacgggccagcctccaggccagccctccgccccctcccagctctcagcaccccggaggtactccagcagcttgtctccaatccaagctcccaatcacccaccgccgcagccccctacgcaggccacgccactgatgcacaccaaacccaatagccagggccctcccaaccccatggcattgcccagtgagcatggacttgagcagccatctcacacccctccccagactccaacgccccccagtactccgcccctaggaaaacagaaccccagtctgccagctcctcagaccctggcagggggtaaccctgaaactgcacagccacatgctggaaccttaccgagaccgagaccagtaccaaagccaaggaaccggcccagcgtgcccccacccccccaacctcctggtgtccactcagctggggacagcagcctcaccaacacagcaccaacagcttccaagatagtaacagactccaattccagggtttcagaaccgcatcgcagcatctttcctgaaatgcactcagactcagccagcaaagacgtgcctggccgcatcctgctggatatagacaatgataccgagagcactgccctgtgaagaaagccctttcccagccctccaccacttccaccctggcgagtggagcaggggcaggcgaacctctttctttgcagaccgaacagtgaaaagctttcagtggaggacaaaggagggcctcactgtgcgggacctggccttctgcacggcccaaggagaacctggaggccaccactaaagctgaatgacctgtgtcttgaagaagttggctttctttacatgggaaggaaatcatgccaaaaaaatccaaaacaaagaagtacctggagtggagagagtattcctgctgaaacgcgcataggaagcttttgtccctgctgttaatgcgggcagcacctacagcaacttggaatgagtaagaagcagtgcgttaactatctatttaataaaatgcgctcattatgcaagtcgcctactctctgctacctggacgttcattcttatgtattaggagggaggctgcgctccttcagacttgctgcagaatcattttgtatcatgtatggtctgtgtctccccagtcccctcagaaccatgcccatggatggtgactgctggctctgtcacctcatcaaactggatgtgacccatgccgcctcgttggattgtcggaatgtagacagaaatgtactgttcttttttttttttttaaacaatgtaattgctacttgataaggaccgaacattattctagtttcatgtttaatttgaattaaatatattctgtggtttataaaaacttcataaaataggaggta

SEQ ID NO: 49701 - DNA, 585 bp, Homo sapiens
gactctagagatccccagcggggaacaatcacttcagccacatccgtccatgtggttgcagtgattgaacccatcattcagcatgccgactggttcttccctgaagaggtggaatttaatgtatcagaagcatttgtacctctcaccaccccgagttctaatcactcattccacactggaaacgactctgactcggggaccctggagaggaagcggcctgctagcatggcggtgatggaaggagacttggtgaagaaggaaaggtatgatttgaccgttcacttccaaaccagcagtaaatatgttgttagacccgtggtatctggtatcgctcagtggacttgggatttgagagtggtcgccatccacccatgactgatggtgtccagatagtttctggaattctgctgtaggtcattccaagcactaatctcaccataaagtcagtgtgtagcttctcagttaacgtttcttccacgtgtattccagcttaacttggtggtgtgcttggtaagccctgcagtggaacggcatcatacacatgttaaaagtgattgttccccgctgggatccttagacgaaacg

SEQ ID NO: 49702 - DNA, 429 bp, Homo sapiens
gcgcagtgttgggactgtctgggtatcgttaaagcagtgcgttaactatctatttaataaaatgcgctcattatgcaagtcgcctactctctgctacctggacgttcattcttatgtattaggagggaggctgcgctccttcagacttgctgcagaatcattttgtatcatgtatggtctgtgtctccccagtcccctcagaaccatgcccatggatggtgactgctggctctgtcacctcatcaaactggatgtgacccatgccgcctcgttggattgtcggaatgtagacagaaatgtactgttcttttttttttttttaaacaatgtaattgctacttgataaggaccgaacattattctagtttcatgtttaatttgaattaaatatattctgtggtttataaaaacttcataaaataggaggta

SEQ ID NO: 49703 - DNA, 935 bp, Homo sapiens
gatgcggtgttctgaagcactgcatgccgcggagatgtcgcatctgatggagagtaactgcaacgtggagagttcacgttggccatctccagtcttgtatgacagatacttaacttgtgtttgaaattttcagagatcatttccatttttgcatagcaaagaatctatttcttgtcctctagctagaaggctttgcatggctagaataaatttcttttcaacgaaacggtatgctctggcaaatcttccttttggttcaaggcagcccactaaacccgctggcgtgtgttgatgaagtgtggtgcaggtgcagcgtgccactgcagcttctgggcagcctgagttggtgccatctaggtacgctcaggcttctgttccacaagtaaccgccccagcctggtccatagtttgctgctccagtagatggcaaataacaaaagcaaatagaacagatgtatcccctcttgcacagcctcacctaccagtcggctagaaaagcccattgggtagttggggagaaaatagcttggtaatgccgtgagtttgttgggtgtctaactgaacaatttgctgctctagataagtgggcggaaaaaccagcctttgggactcccctagaagaacacctgaagaggagcgggcgcgagattgcgctgcccattgaagcctgtgtcatgctgcttctggagacaggcatgaaggaggaggtgaggggagcttcgtgatcctgtgcaccaagtctccatgccccttgttgtacccagagcaccatgctccccgccagccccctgtccacccctgcttagttatacagccattgtccgttttgtgtagaacagtggctttcaagcttttgtcaccatgatccatattttaaattgcaaccctgttccctatgatacctatctgtctatgaatgaaacaaaggttttaca

SEQ ID NO: 49704 - DNA, 924 bp, Homo sapiens
cattagtctggtccttgccgcttcactgcatgccgggcagcttgggtggctatccccatgtgtggttttaacacatgtggaccgatgggcttctgtctcagtagtctgctcgcatggtgtgttgactgtttcttctctctgtgtagctttggtgtgaagcttatggacttccaggcccaccggcggggtggcactctaaatagaaagcacatatcccccgctttccagccgccacttccgcccacagatggcagcaccgtggtgcccgctggcccagagccccctccccagagctctagggctgaaagcagctctgggggtgggactgtcccctcttccgcgggcatactggagcaggggccgagcccaggcgacggcaggtaaggaggctgacttctgctggcagtggaggctggacgccccagccttcttgcaggtggtggcctttgagcacggcatccatgcccaaagaactgctccagcatggagtgaacagatttactttcactcctctggttggcaaaagatggaaaaaaagactatgaatggctcgcttctttttatgttttccaaagaaagcaacattggtttgcattctttgccacactgctttggtgctggaaaccggaagccagtggatgtctcatagtgtgatgagcctctgtcacctgttggatgtatactgtcagcattcatgtaccttctgttcattgtcatccagtgtgctaaccaggaagcatttgagtgtggcaagttagttaaattttcgtattcctggcatttattcacccattcgttgattgattcagtgaaacagatttactgagtcactgatatgtgctaggcacatgaggtgactaagactccactccacacccccagatttcagtcttgtagggcagttgatccatgagtccaaggtgg

SEQ ID NO: 49705 - DNA, 1392 bp, Homo sapiens
gttcatattaagtacagaatttcaggtataactttaaaaaacatgatttatgccaaattgaatgctccagaagggagatctcagggcactgtcatgttctaatggcttgggagggaagaatcaagattttcctgtagacccagtgggaacctgtttggaagtggtggtgattgtacaggttttagtgggctacctaatggcatatttttaatagtctagaacatgaccattttatttaacatttcaagaatatttccatcccaaatgctctaatttattatttaatttaaggatgaatatgggggtttctagtgtgtttttaaaaatggtaattaggggcctcaaataatttcttacagcagcctagtttaaattgttctaagtggaggcactttcggaaaagaagctgaaatacacctctgggctttccaaccatattgagtgactttgcagctaaaaatgtgccaaggtttccattaacccaaagggtgacggttaactgattctaacagcttttgataacttttttcaggaatataatacataatttgcacatgttataaatggttaataactttttttctgatgccatcagagcttttattttgaaaacaacaaagccatgttggtttgtttgttttgtttcccaatagatgcccttcctagtgccctcacaggtggggaaggtttccaggactaaggtctgtaatggccccgagcagcttgccccatagctcgccccacagctccaaatgctcctgcttagccgtgttttgcatatgtgcttttgaccatgtgctcaggagcagccgtttgaccgtgtgccctgacagccaataggccatccattctgtagcatattgacatttctttatttttatcagaagcactttgagctgcagtgcttcaaattcgaggagtagatgtcagtagatcaagagcctgatttcaagctgctcttgaagagtatcttctttcttaggggccaagcacagtggctcgtgcctctaatcccagtactttgagtggctgaggcaagaggattgcttgagctcaggagttcgagactgcagtgggtagtgattgtgtcactgcacactgcagtccagcctgcatgacagagtgagaccctgcctctttttaaaaaaaaaaaaaaaaaggaatatcttctatctttttggtgagcctcttagcagcagtctactcttcccagtgtgatttacctgtcactgatgggctcaccagcatccaaccaaagaggacccaggtgcagtcagcacgggaggaaattgtgtcctttgtgtcttgagctttaattttaaatttttgtattttaagtgcaagttaactgcatggagcttcttaatttgatattttaaattctcaagacca

SEQ ID NO: 49706 - DNA, 662 bp, Homo sapiens
actaatgttattcactctttggtgaccttgacaaaatggagctacagagtttggtataaaaagttctgggccaggaaacaggaagcctgaattctgatctctatcctgctgctaccaactctggacttcgagtagtcatttagcctctgagttctccttcttcagtccaagttattgataataatcaagccctttatcatttagggtcttattttgccatggcttttgcttagttttgtacagtgtatatgtcaacatgtaaaagccatttcatggtattaagtactgcccaatttaagtccaaacgcagtagaactgaaaactccgcattggttgctttgaaatggtctctctgatgatactggagtggcagagtcgttggagtccagtctgatgcaacgaatctcataaaataaatagtcctatagtcccggctactcagggtgctgaggcaggagaggattgcttgagtccagaaatttgagaccaacctgggcaacatagcaagacctcatctcttaaaaaaaaaatggctaatttttgtatttttagtatagacggggtttcaccatgttggccaggctggtcttgaactcctgacctcaggtgatctgcctgcctcggcctcccaaagtgctgggattacaggcatgagctaccac

SEQ ID NO: 49707 - DNA, 3240 bp, Homo sapiens
ataaggcaggctggtacggtccgggatttaggatggccgagccccgcgggccgccgccgccaccgccgccatgaagaagcagttcaaccgcatgaagcagctggctaaccagaccgtgggcagagctgagaaaacagaagtccttagtgaagatctattacagattgagagacgcctggacacggtgcggtcaatatgccaccattcccataagcgcttggtggcatgtttccagggccagcatggcaccgatgccgagaggagacacaaaaaactgcctctgacagctcttgctcaaaatatgcaagaagcatcgactcagctggaagactctctcctggggaagatgctggagacgtgtggagatgctgagaatcagctggctctcgagctctcccagcacgaagtctttgttgagaaggagatcgtggaccctctgtacggcatagctgaggtggagattcccaacatccagaagcagaggaagcagcttgcaagattggtgttagactgggattcagtcagagccaggtggaaccaagctcacaaatcctcaggaaccaactttcaggggcttccatcaaaaatagatactctaaaggaagagatggatgaagctggaaataaagtagaacagtgcaaggatcaacttgcagcagacatgtacaactttatggccaaagaaggggagtatggcaaattctttgttacgttattagaagcccaagcagattaccatagaaaagcattagcagtcttagaaaagaccctccccgaaatgcgagcccatcaagataagtgggcggaaaaaccagcctttgggactcccctagaagaacacctgaagaggagcgggcgcgagattgcgctgcccattgaagcctgtgtcatgctgcttctggagacaggcatgaaggaggagggccttttccgaattggggctggggcctccaagttaaagaagctgaaagctgctttggactgttctacttctcacctggatgagttctattcagacccccatgctgtagcaggtgctttaaaatcctatttacgggaattgcctgaacctttgatgacttttaatctgtatgaagaatggacacaagttgcaagtgtgcaggatcaagacaaaaaacttcaagacttgtggagaacatgtcagaagttgccaccacaaaattttgttaactttagatatttgatcaagttccttgcaaagcttgctcagaccagcgatgtgaataaaatgactcccagcaacattgcgattgtgttaggccctaacttgttatgggccagaaatgaaggaacacttgctgaaatggcagcagccacatccgtccatgtggttgcagtgattgaacccatcattcagcatgccgactggttcttccctgaagaggtggaatttaatgtatcagaagcatttgtacctctcaccaccccgagttctaatcactcattccacactggaaacgactctgactcggggaccctggagaggaagcggcctgctagcatggcggtgatggaaggagacttggtgaagaaggaaagtcctcccaaaccgaaggaccctgtatctgcagctgtgccagcaccagggagaaacaacagtcagatagcatctggccaaaatcagccccaggcagctgctggctcccaccagctctccatgggccaacctcacaatgctgcagggcccagcccgcatacactgcgccgagctgttaaaaaacccgctccagcacccccgaaaccgggcaacccacctcctggccaccccgggggccagagttcttcaggaacatctcagcatccacccagtctgtcaccaaagccacccacccgaagcccctctcctcccacccagcacacgggccagcctccaggccagccctccgccccctcccagctctcagcaccccggaggtactccagcagcttgtctccaatccaagctcccaatcacccaccgccgcagccccctacgcaggccacgccactgatgcacaccaaacccaatagccagggccctcccaaccccatggcattgcccagtgagcatggacttgagcagccatctcacacccctccccagactccaacgccccccagtactccgcccctaggaaaacagaaccccagtctgccagctcctcagaccctggcagggggtaaccctgaaactgcacagccacatgctggaaccttaccgagaccgagaccagtaccaaagccaaggaaccggcccagcgtgcccccacccccccaacctcctggtgtccactcagctggggacagcagcctcaccaacacagcaccaacagcttccaagatagtaacagactccaattccagggtttcagaaccgcatcgcagcatctttcctgaaatgcactcagactcagccagcaaagacgtgcctggccgcatcctgctggatatagacaatgataccgagagcactgccctgtgaagaaagccctttcccagccctccaccacttccaccctggcgagtggagcaggggcaggcgaacctctttctttgcagaccgaacagtgaaaagctttcagtggaggacaaaggagggcctcactgtgcgggacctggccttctgcacggcccaaggagaacctggaggccaccactaaagctgaatgacctgtgtcttgaagaagttggctttctttacatgggaaggaaatcatgccaaaaaaatccaaaacaaagaagtacctggagtggagagagtattcctgctgaaacgcgcataggaagcttttgtccctgctgttaatgcgggcagcacctacagcaacttggaatgagtaagaagcagtgcgttaactatctatttaataaaatgcgctcattatgcaagtcgcctactctctgctacctggacgttcattcttatgtattaggagggaggctgcgctccttcagacttgctgcagaatcattttgtatcatgtatggtctgtgtctccccagtcccctcagaaccatgcccatggatggtgactgctggctctgtcacctcatcaaactggatgtgacccatgccgcctcgttggattgtcggaatgtagacagaaatgtactgttcttttttttttttttaaacaatgtaattgctacttgataaggaccgaacattattctagtttcatgtttaatttgaattaaatatattctgtggtttataaaaacttcataaaataggaggta

SEQ ID NO: 49708 - DNA, 3474 bp, Homo sapiens
ataaggcaggctggtacggtccgggatttaggatggccgagccccgcgggccgccgccgccaccgccgccatgaagaagcagttcaaccgcatgaagcagctggctaaccagaccgtgggcagagctgagaaaacagaagtccttagtgaagatctattacagattgagagacgcctggacacggtgcggtcaatatgccaccattcccataagcgcttggtggcatgtttccagggccagcatggcaccgatgccgagaggagacacaaaaaactgcctctgacagctcttgctcaaaatatgcaagaagcatcgactcagctggaagactctctcctggggaagatgctggagacgtgtggagatgctgagaatcagctggctctcgagctctcccagcacgaagtctttgttgagaaggagatcgtggaccctctgtacggcatagctgaggtggagattcccaacatccagaagcagaggaagcagcttgcaagattggtgttagactgggattcagtcagagccaggtggaaccaagctcacaaatcctcaggaaccaactttcaggggcttccatcaaaaatagatactctaaaggaagagatggatgaagctggaaataaagtagaacagtgcaaggatcaacttgcagcagacatgtacaactttatggccaaagaaggggagtatggcaaattctttgttacgttattagaagcccaagcagattaccatagaaaagcattagcagtcttagaaaagaccctccccgaaatgcgagcccatcaagataagtgggcggaaaaaccagcctttgggactcccctagaagaacacctgaagaggagcgggcgcgagattgcgctgcccattgaagcctgtgtcatgctgcttctggagacaggcatgaaggaggagggccttttccgaattggggctggggcctccaagttaaagaagctgaaagctgctttggactgttctacttctcacctggatgagttctattcagacccccatgctgtagcaggtgctttaaaatcctatttacgggaattgcctgaacctttgatgacttttaatctgtatgaagaatggacacaagttgcaagtgtgcaggatcaagacaaaaaacttcaagacttgtggagaacatgtcagaagttgccaccacaaaattttgttaactttagatatttgatcaagttccttgcaaagcttgctcagaccagcgatgtgaataaaatgactcccagcaacattgcgattgtgttaggccctaacttgttatgggccagaaatgaaggaacacttgctgaaatggcagcagccacatccgtccatgtggttgcagtgattgaacccatcattcagcatgccgactggttcttccctgaagaggtggaatttaatgtatcagaagcatttgtacctctcaccaccccgagttctaatcactcattccacactggaaacgactctgactcggggaccctggagaggaagcggcctgctagcatggcggtgatggaaggagacttggtgaagaaggaaagctttggtgtgaagcttatggacttccaggcccaccggcggggtggcactctaaatagaaagcacatatcccccgctttccagccgccacttccgcccacagatggcagcaccgtggtgcccgctggcccagagccccctccccagagctctagggctgaaagcagctctgggggtgggactgtcccctcttccgcgggcatactggagcaggggccgagcccaggcgacggcagtcctcccaaaccgaaggaccctgtatctgcagctgtgccagcaccagggagaaacaacagtcagatagcatctggccaaaatcagccccaggcagctgctggctcccaccagctctccatgggccaacctcacaatgctgcagggcccagcccgcatacactgcgccgagctgttaaaaaacccgctccagcacccccgaaaccgggcaacccacctcctggccaccccgggggccagagttcttcaggaacatctcagcatccacccagtctgtcaccaaagccacccacccgaagcccctctcctcccacccagcacacgggccagcctccaggccagccctccgccccctcccagctctcagcaccccggaggtactccagcagcttgtctccaatccaagctcccaatcacccaccgccgcagccccctacgcaggccacgccactgatgcacaccaaacccaatagccagggccctcccaaccccatggcattgcccagtgagcatggacttgagcagccatctcacacccctccccagactccaacgccccccagtactccgcccctaggaaaacagaaccccagtctgccagctcctcagaccctggcagggggtaaccctgaaactgcacagccacatgctggaaccttaccgagaccgagaccagtaccaaagccaaggaaccggcccagcgtgcccccacccccccaacctcctggtgtccactcagctggggacagcagcctcaccaacacagcaccaacagcttccaagatagtaacagactccaattccagggtttcagaaccgcatcgcagcatctttcctgaaatgcactcagactcagccagcaaagacgtgcctggccgcatcctgctggatatagacaatgataccgagagcactgccctgtgaagaaagccctttcccagccctccaccacttccaccctggcgagtggagcaggggcaggcgaacctctttctttgcagaccgaacagtgaaaagctttcagtggaggacaaaggagggcctcactgtgcgggacctggccttctgcacggcccaaggagaacctggaggccaccactaaagctgaatgacctgtgtcttgaagaagttggctttctttacatgggaaggaaatcatgccaaaaaaatccaaaacaaagaagtacctggagtggagagagtattcctgctgaaacgcgcataggaagcttttgtccctgctgttaatgcgggcagcacctacagcaacttggaatgagtaagaagcagtgcgttaactatctatttaataaaatgcgctcattatgcaagtcgcctactctctgctacctggacgttcattcttatgtattaggagggaggctgcgctccttcagacttgctgcagaatcattttgtatcatgtatggtctgtgtctccccagtcccctcagaaccatgcccatggatggtgactgctggctctgtcacctcatcaaactggatgtgacccatgccgcctcgttggattgtcggaatgtagacagaaatgtactgttcttttttttttttttaaacaatgtaattgctacttgataaggaccgaacattattctagtttcatgtttaatttgaattaaatatattctgtggtttataaaaacttcataaaataggaggta

SEQ ID NO: 49709 - DNA, 3415 bp, Homo sapiens
cgccgtttgggccgggaagcgatgtagtagctgccaggctgtcccccgccctgcccggcccgagccccgcgggccgccgccgccaccgccgccatgaagaagcagttcaaccgcatgaagcagctggctaaccagaccgtgggcagagctgagaaaacagaagtccttagtgaagatctattacagattgagagacgcctggacacggtgcggtcaatatgccaccattcccataagcgcttggtggcatgtttccagggccagcatggcaccgatgccgagaggagacacaaaaaactgcctctgacagctcttgctcaaaatatgcaagaagcatcgactcagctggaagactctctcctggggaagatgctggagacgtgtggagatgctgagaatcagctggctctcgagctctcccagcacgaagtctttgttgagaaggagatcgtggaccctctgtacggcatagctgaggtggagattcccaacatccagaagcagaggaagcagcttgcaagattggtgttagactgggattcagtcagagccaggtggaaccaagctcacaaatcctcaggaaccaactttcaggggcttccatcaaaaatagatactctaaaggaagagatggatgaagctggaaataaagtagaacagtgcaaggatcaacttgcagcagacatgtacaactttatggccaaagaaggggagtatggcaaattctttgttacgataagtgggcggaaaaaccagcctttgggactcccctagaagaacacctgaagaggagcgggcgcgagattgcgctgcccattgaagcctgtgtcatgctgcttctggagacaggcatgaaggaggagggccttttccgaattggggctggggcctccaagttaaagaagctgaaagctgctttggactgttctacttctcacctggatgagttctattcagacccccatgctgtagcaggtgctttaaaatcctatttacgggaattgcctgaacctttgatgacttttaatctgtatgaagaatggacacaagttgcaagtgtgcaggatcaagacaaaaaacttcaagacttgtggagaacatgtcagaagttgccaccacaaaattttgttaactttagatatttgatcaagttccttgcaaagcttgctcagaccagcgatgtgaataaaatgactcccagcaacattgcgattgtgttaggccctaacttgttatgggccagaaatgaaggaacacttgctgaaatggcagcagccacatccgtccatgtggttgcagtgattgaacccatcattcagcatgccgactggttcttccctgaagaggtggaatttaatgtatcagaagcatttgtacctctcaccaccccgagttctaatcactcattccacactggaaacgactctgactcggggaccctggagaggaagcggcctgctagcatggcggtgatggaaggagacttggtgaagaaggaaagctttggtgtgaagcttatggacttccaggcccaccggcggggtggcactctaaatagaaagcacatatcccccgctttccagccgccacttccgcccacagatggcagcaccgtggtgcccgctggcccagagccccctccccagagctctagggctgaaagcagctctgggggtgggactgtcccctcttccgcgggcatactggagcaggggccgagcccaggcgacggcagtcctcccaaaccgaaggaccctgtatctgcagctgtgccagcaccagggagaaacaacagtcagatagcatctggccaaaatcagccccaggcagctgctggctcccaccagctctccatgggccaacctcacaatgctgcagggcccagcccgcatacactgcgccgagctgttaaaaaacccgctccagcacccccgaaaccgggcaacccacctcctggccaccccgggggccagagttcttcaggaacatctcagcatccacccagtctgtcaccaaagccacccacccgaagcccctctcctcccacccagcacacgggccagcctccaggccagccctccgccccctcccagctctcagcaccccggaggtactccagcagcttgtctccaatccaagctcccaatcacccaccgccgcagccccctacgcaggccacgccactgatgcacaccaaacccaatagccagggccctcccaaccccatggcattgcccagtgagcatggacttgagcagccatctcacacccctccccagactccaacgccccccagtactccgcccctaggaaaacagaaccccagtctgccagctcctcagaccctggcagggggtaaccctgaaactgcacagccacatgctggaaccttaccgagaccgagaccagtaccaaagccaaggaaccggcccagcgtgcccccacccccccaacctcctggtgtccactcagctggggacagcagcctcaccaacacagcaccaacagcttccaagatagtaacagactccaattccagggtttcagaaccgcatcgcagcatctttcctgaaatgcactcagactcagccagcaaagacgtgcctggccgcatcctgctggatatagacaatgataccgagagcactgccctgtgaagaaagccctttcccagccctccaccacttccaccctggcgagtggagcaggggcaggcgaacctctttctttgcagaccgaacagtgaaaagctttcagtggaggacaaaggagggcctcactgtgcgggacctggccttctgcacggcccaaggagaacctggaggccaccactaaagctgaatgacctgtgtcttgaagaagttggctttctttacatgggaaggaaatcatgccaaaaaaatccaaaacaaagaagtacctggagtggagagagtattcctgctgaaacgcgcataggaagcttttgtccctgctgttaatgcgggcagcacctacagcaacttggaatgagtaagaagcagtgcgttaactatctatttaataaaatgcgctcattatgcaagtcgcctactctctgctacctggacgttcattcttatgtattaggagggaggctgcgctccttcagacttgctgcagaatcattttgtatcatgtatggtctgtgtctccccagtcccctcagaaccatgcccatggatggtgactgctggctctgtcacctcatcaaactggatgtgacccatgccgcctcgttggattgtcggaatgtagacagaaatgtactgttcttttttttttttttaaacaatgtaattgctacttgataaggaccgaacattattctagtttcatgtttaatttgaattaaatatattctgtggtttataaaaacttcataaaataggaggta

SEQ ID NO: 49710 - DNA, 2840 bp, Homo sapiens
taacaaaacatatttatctgtgcccccaaaaccggaaagggcgagcagataattggaccaaaaattttcattgttacgttattagaagcccaagcagattaccatagaaaagcattagcagtcttagaaaagaccctccccgaaatgcgagcccatcaagataagtgggcggaaaaaccagcctttgggactcccctagaagaacacctgaagaggagcgggcgcgagattgcgctgcccattgaagcctgtgtcatgctgcttctggagacaggcatgaaggaggagggccttttccgaattggggctggggcctccaagttaaagaagctgaaagctgctttggactgttctacttctcacctggatgagttctattcagacccccatgctgtagcaggtgctttaaaatcctatttacgggaattgcctgaacctttgatgacttttaatctgtatgaagaatggacacaagttgcaagtgtgcaggatcaagacaaaaaacttcaagacttgtggagaacatgtcagaagttgccaccacaaaattttgttaactttagatatttgatcaagttccttgcaaagcttgctcagaccagcgatgtgaataaaatgactcccagcaacattgcgattgtgttaggccctaacttgttatgggccagaaatgaaggaacacttgctgaaatggcagcagccacatccgtccatgtggttgcagtgattgaacccatcattcagcatgccgactggttcttccctgaagaggtggaatttaatgtatcagaagcatttgtacctctcaccaccccgagttctaatcactcattccacactggaaacgactctgactcggggaccctggagaggaagcggcctgctagcatggcggtgatggaaggagacttggtgaagaaggaaagctttggtgtgaagcttatggacttccaggcccaccggcggggtggcactctaaatagaaagcacatatcccccgctttccagccgccacttccgcccacagatggcagcaccgtggtgcccgctggcccagagccccctccccagagctctagggctgaaagcagctctgggggtgggactgtcccctcttccgcgggcatactggagcaggggccgagcccaggcgacggcagtcctcccaaaccgaaggaccctgtatctgcagctgtgccagcaccagggagaaacaacagtcagatagcatctggccaaaatcagccccaggcagctgctggctcccaccagctctccatgggccaacctcacaatgctgcagggcccagcccgcatacactgcgccgagctgttaaaaaacccgctccagcacccccgaaaccgggcaacccacctcctggccaccccgggggccagagttcttcaggaacatctcagcatccacccagtctgtcaccaaagccacccacccgaagcccctctcctcccacccagcacacgggccagcctccaggccagccctccgccccctcccagctctcagcaccccggaggtactccagcagcttgtctccaatccaagctcccaatcacccaccgccgcagccccctacgcaggccacgccactgatgcacaccaaacccaatagccagggccctcccaaccccatggcattgcccagtgagcatggacttgagcagccatctcacacccctccccagactccaacgccccccagtactccgcccctaggaaaacagaaccccagtctgccagctcctcagaccctggcagggggtaaccctgaaactgcacagccacatgctggaaccttaccgagaccgagaccagtaccaaagccaaggaaccggcccagcgtgcccccacccccccaacctcctggtgtccactcagctggggacagcagcctcaccaacacagcaccaacagcttccaagatagtaacagactccaattccagggtttcagaaccgcatcgcagcatctttcctgaaatgcactcagactcagccagcaaagacgtgcctggccgcatcctgctggatatagacaatgataccgagagcactgccctgtgaagaaagccctttcccagccctccaccacttccaccctggcgagtggagcaggggcaggcgaacctctttctttgcagaccgaacagtgaaaagctttcagtggaggacaaaggagggcctcactgtgcgggacctggccttctgcacggcccaaggagaacctggaggccaccactaaagctgaatgacctgtgtcttgaagaagttggctttctttacatgggaaggaaatcatgccaaaaaaatccaaaacaaagaagtacctggagtggagagagtattcctgctgaaacgcgcataggaagcttttgtccctgctgttaatgcgggcagcacctacagcaacttggaatgagtaagaagcagtgcgttaactatctatttaataaaatgcgctcattatgcaagtcgcctactctctgctacctggacgttcattcttatgtattaggagggaggctgcgctccttcagacttgctgcagaatcattttgtatcatgtatggtctgtgtctccccagtcccctcagaaccatgcccatggatggtgactgctggctctgtcacctcatcaaactggatgtgacccatgccgcctcgttggattgtcggaatgtagacagaaatgtactgttcttttttttttttttaaacaatgtaattgctacttgataaggaccgaacattattctagtttcatgtttaatttgaattaaatatattctgtggtttataaaaacttcataaaataggaggta

SEQ ID NO: 49711 - DNA, 3259 bp, Homo sapiens
gatgcggtgttctgaagcactgcatgccgcggagatgtcgcatctgatggagagtaactgcaacgtggagagttcacgttggccatctccagtcttgtatgacagatacttaacttgtgtttgaaattttcagagatcatttccatttttgcatagcaaagaatctatttcttgtcctctagctagaaggctttgcatggctagaataaatttcttttcaacgaaacggtatgctctggcaaatcttccttttggttcaaggcagcccactaaacccgctggcgtgtgttgatgaagtgtggtgcaggtgcagcgtgccactgcagcttctgggcagcctgagttggtgccatctaggtacgctcaggcttctgttccacaagtaaccgccccagcctggtccatagtttgctgctccagtagatggcaaataacaaaagcaaatagaacagatgtatcccctcttgcacagcctcacctaccagtcggctagaaaagcccattgggtagttggggagaaaatagcttggtaatgccgtgagtttgttgggtgtctaactgaacaatttgctgctctagataagtgggcggaaaaaccagcctttgggactcccctagaagaacacctgaagaggagcgggcgcgagattgcgctgcccattgaagcctgtgtcatgctgcttctggagacaggcatgaaggaggagggccttttccgaattggggctggggcctccaagttaaagaagctgaaagctgctttggactgttctacttctcacctggatgagttctattcagacccccatgctgtagcaggtgctttaaaatcctatttacgggaattgcctgaacctttgatgacttttaatctgtatgaagaatggacacaagttgcaagtgtgcaggatcaagacaaaaaacttcaagacttgtggagaacatgtcagaagttgccaccacaaaattttgttaactttagatatttgatcaagttccttgcaaagcttgctcagaccagcgatgtgaataaaatgactcccagcaacattgcgattgtgttaggccctaacttgttatgggccagaaatgaaggaacacttgctgaaatggcagcagccacatccgtccatgtggttgcagtgattgaacccatcattcagcatgccgactggttcttccctgaagaggtggaatttaatgtatcagaagcatttgtacctctcaccaccccgagttctaatcactcattccacactggaaacgactctgactcggggaccctggagaggaagcggcctgctagcatggcggtgatggaaggagacttggtgaagaaggaaagctttggtgtgaagcttatggacttccaggcccaccggcggggtggcactctaaatagaaagcacatatcccccgctttccagccgccacttccgcccacagatggcagcaccgtggtgcccgctggcccagagccccctccccagagctctagggctgaaagcagctctgggggtgggactgtcccctcttccgcgggcatactggagcaggggccgagcccaggcgacggcagtcctcccaaaccgaaggaccctgtatctgcagctgtgccagcaccagggagaaacaacagtcagatagcatctggccaaaatcagccccaggcagctgctggctcccaccagctctccatgggccaacctcacaatgctgcagggcccagcccgcatacactgcgccgagctgttaaaaaacccgctccagcacccccgaaaccgggcaacccacctcctggccaccccgggggccagagttcttcaggaacatctcagcatccacccagtctgtcaccaaagccacccacccgaagcccctctcctcccacccagcacacgggccagcctccaggccagccctccgccccctcccagctctcagcaccccggaggtactccagcagcttgtctccaatccaagctcccaatcacccaccgccgcagccccctacgcaggccacgccactgatgcacaccaaacccaatagccagggccctcccaaccccatggcattgcccagtgagcatggacttgagcagccatctcacacccctccccagactccaacgccccccagtactccgcccctaggaaaacagaaccccagtctgccagctcctcagaccctggcagggggtaaccctgaaactgcacagccacatgctggaaccttaccgagaccgagaccagtaccaaagccaaggaaccggcccagcgtgcccccacccccccaacctcctggtgtccactcagctggggacagcagcctcaccaacacagcaccaacagcttccaagatagtaacagactccaattccagggtttcagaaccgcatcgcagcatctttcctgaaatgcactcagactcagccagcaaagacgtgcctggccgcatcctgctggatatagacaatgataccgagagcactgccctgtgaagaaagccctttcccagccctccaccacttccaccctggcgagtggagcaggggcaggcgaacctctttctttgcagaccgaacagtgaaaagctttcagtggaggacaaaggagggcctcactgtgcgggacctggccttctgcacggcccaaggagaacctggaggccaccactaaagctgaatgacctgtgtcttgaagaagttggctttctttacatgggaaggaaatcatgccaaaaaaatccaaaacaaagaagtacctggagtggagagagtattcctgctgaaacgcgcataggaagcttttgtccctgctgttaatgcgggcagcacctacagcaacttggaatgagtaagaagcagtgcgttaactatctatttaataaaatgcgctcattatgcaagtcgcctactctctgctacctggacgttcattcttatgtattaggagggaggctgcgctccttcagacttgctgcagaatcattttgtatcatgtatggtctgtgtctccccagtcccctcagaaccatgcccatggatggtgactgctggctctgtcacctcatcaaactggatgtgacccatgccgcctcgttggattgtcggaatgtagacagaaatgtactgttcttttttttttttttaaacaatgtaattgctacttgataaggaccgaacattattctagtttcatgtttaatttgaattaaatatattctgtggtttataaaaacttcataaaataggaggta

SEQ ID NO: 49712 - DNA, 1991 bp, Homo sapiens
gatgcagtgtattcggattgtattgtgttaggcccgaacttgtcatgggccagaaatgaaggaacacttgctgaaatggcagcagccacatccgtccatgtggttgcagtgattgaacccatcattcagcatgccgactggttcttccctgaagaggtggaatttaatgtatcagaagcatttgtacctctcaccaccccgagttctaatcactcattccacactggaaacgactctgactcggggaccctggagaggaagcggcctgctagcatggcggtgatggaaggagacttggtgaagaaggaaagtcctcccaaaccgaaggaccctgtatctgcagctgtgccagcaccagggagaaacaacagtcagatagcatctggccaaaatcagccccaggcagctgctggctcccaccagctctccatgggccaacctcacaatgctgcagggcccagcccgcatacactgcgccgagctgttaaaaaacccgctccagcacccccgaaaccgggcaacccacctcctggccaccccgggggccagagttcttcaggaacatctcagcatccacccagtctgtcaccaaagccacccacccgaagcccctctcctcccacccagcacacgggccagcctccaggccagccctccgccccctcccagctctcagcaccccggaggtactccagcagcttgtctccaatccaagctcccaatcacccaccgccgcagccccctacgcaggccacgccactgatgcacaccaaacccaatagccagggccctcccaaccccatggcattgcccagtgagcatggacttgagcagccatctcacacccctccccagactccaacgccccccagtactccgcccctaggaaaacagaaccccagtctgccagctcctcagaccctggcagggggtaaccctgaaactgcacagccacatgctggaaccttaccgagaccgagaccagtaccaaagccaaggaaccggcccagcgtgcccccacccccccaacctcctggtgtccactcagctggggacagcagcctcaccaacacagcaccaacagcttccaagatagtaacagactccaattccagggtttcagaaccgcatcgcagcatctttcctgaaatgcactcagactcagccagcaaagacgtgcctggccgcatcctgctggatatagacaatgataccgagagcactgccctgtgaagaaagccctttcccagccctccaccacttccaccctggcgagtggagcaggggcaggcgaacctctttctttgcagaccgaacagtgaaaagctttcagtggaggacaaaggagggcctcactgtgcgggacctggccttctgcacggcccaaggagaacctggaggccaccactaaagctgaatgacctgtgtcttgaagaagttggctttctttacatgggaaggaaatcatgccaaaaaaatccaaaacaaagaagtacctggagtggagagagtattcctgctgaaacgcgcataggaagcttttgtccctgctgttaatgcgggcagcacctacagcaacttggaatgagtaagaagcagtgcgttaactatctatttaataaaatgcgctcattatgcaagtcgcctactctctgctacctggacgttcattcttatgtattaggagggaggctgcgctccttcagacttgctgcagaatcattttgtatcatgtatggtctgtgtctccccagtcccctcagaaccatgcccatggatggtgactgctggctctgtcacctcatcaaactggatgtgacccatgccgcctcgttggattgtcggaatgtagacagaaatgtactgttcttttttttttttttaaacaatgtaattgctacttgataaggaccgaacattattctagtttcatgtttaatttgaattaaatatattctgtggtttataaaaacttcataaaataggaggta

SEQ ID NO: 49713 - DNA, 3523 bp, Homo sapiens
ataaggcaggctggtacggtccgggatttaggatggccgagccccgcgggccgccgccgccaccgccgccatgaagaagcagttcaaccgcatgaagcagctggctaaccagaccgtgggcagagctgagaaaacagaagtccttagtgaagatctattacagattgagagacgcctggacacggtgcggtcaatatgccaccattcccataagcgcttggtggcatgtttccagggccagcatggcaccgatgccgagaggagacacaaaaaactgcctctgacagctcttgctcaaaatatgcaagaagcatcgactcagctggaagactctctcctggggaagatgctggagacgtgtggagatgctgagaatcagctggctctcgagctctcccagcacgaagtctttgttgagaaggagatcgtggaccctctgtacggcatagctgaggtggagattcccaacatccagaagcagaggaagcagcttgcaagattggtgttagactgggattcagtcagagccaggtggaaccaagctcacaaatcctcaggaaccaactttcaggggcttccatcaaaaatagatactctaaaggaagagatggatgaagctggaaataaagtagaacagtgcaaggatcaacttgcagcagacatgtacaactttatggccaaagaaggggagtatggcaaattctttgttacgttattagaagcccaagcagattaccatagaaaagcattagcagtcttagaaaagaccctccccgaaatgcgagcccatcaagataagtgggcggaaaaaccagcctttgggactcccctagaagaacacctgaagaggagcgggcgcgagattgcgctgcccattgaagcctgtgtcatgctgcttctggagacaggcatgaaggaggagggccttttccgaattggggctggggcctccaagttaaagaagctgaaagctgctttggactgttctacttctcacctggatgagttctattcagacccccatgctgtagcaggtgctttaaaatcctatttacgggaattgcctgaacctttgatgacttttaatctgtatgaagaatggacacaagttgcaagtgtgcaggatcaagacaaaaaacttcaagacttgtggagaacatgtcagaagttgccaccacaaaattttgttaactttagatatttgatcaagttccttgcaaagcttgctcagaccagcgatgtgaataaaatgactcccagcaacattgcgattgtgttaggccctaacttgttatgggccagaaatgaaggaacacttgctgaaatggcagcagccacatccgtccatgtggttgcagtgattgaacccatcattcagcatgccgactggttcttccctgaagaggtggaatttaatgtatcagaagcatttgtacctctcaccaccccgagttctaatcactcattccacactggaaacgactctgactcggggaccctggagaggaagcggcctgctagcatggcggtgatggaaggagacttggtgaagaaggaaagctttggtgtgaagcttatggacttccaggcccaccggcggggtggcactctaaatagaaagcacatatcccccgctttccagccgccacttccgcccacagatggcagcaccgtggtgcccgctggcccagagccccctccccagagctctagggctgaaagcagctctgggggtgggactgtcccctcttccgcgggcatactggagcaggggccgagcccaggcgacggcagtcctcccaaaccgaaggaccctgtatctgcagctgtgccagcaccagggagaaacaacagtcagatagcatctggccaaaatcagccccaggcagctgctggctcccaccagctctccatgggccaacctcacaatgctgcagggcccagcccgcatacactgcgccgagctgttaaaaaacccgctccagcacccccgaaaccgggcaacccacctcctggccaccccgggggccagagttcttcaggaacatctcagcatccacccagtctgtcaccaaagccacccacccgaagcccctctcctcccacccagcacacgggccagcctccaggccagccctccgccccctcccagctctcagcaccccggaggtactccagcagcttgtctccaatccaagctcccaatcacccaccgccgcagccccctacgcaggccacgccactgatgcacaccaaacccaatagccagggccctcccaaccccatggcattgcccagtgagcatggacttgagcagccatctcacacccctccccagactccaacgccccccagtactccgcccctaggaaaacagaaccccagtctgccagctcctcagaccctggcagggggtaaccctgaaactgcacagccacatgctggaaccttaccgagaccgagaccagtaccaaagccaaggaaccggcccagcgtgcccccacccccccaacctcctggtgtccactcagctggggacagcagcctcaccaacacagcaccaacagcttccaagatagtaacagatgtatgacctgccatattcagtaagaactgagattggaatatttaatgactccaattccagggtttcagaaccgcatcgcagcatctttcctgaaatgcactcagactcagccagcaaagacgtgcctggccgcatcctgctggatatagacaatgataccgagagcactgccctgtgaagaaagccctttcccagccctccaccacttccaccctggcgagtggagcaggggcaggcgaacctctttctttgcagaccgaacagtgaaaagctttcagtggaggacaaaggagggcctcactgtgcgggacctggccttctgcacggcccaaggagaacctggaggccaccactaaagctgaatgacctgtgtcttgaagaagttggctttctttacatgggaaggaaatcatgccaaaaaaatccaaaacaaagaagtacctggagtggagagagtattcctgctgaaacgcgcataggaagcttttgtccctgctgttaatgcgggcagcacctacagcaacttggaatgagtaagaagcagtgcgttaactatctatttaataaaatgcgctcattatgcaagtcgcctactctctgctacctggacgttcattcttatgtattaggagggaggctgcgctccttcagacttgctgcagaatcattttgtatcatgtatggtctgtgtctccccagtcccctcagaaccatgcccatggatggtgactgctggctctgtcacctcatcaaactggatgtgacccatgccgcctcgttggattgtcggaatgtagacagaaatgtactgttcttttttttttttttaaacaatgtaattgctacttgataaggaccgaacattattctagtttcatgtttaatttgaattaaatatattctgtggtttataaaaacttcataaaataggaggta

SEQ ID NO: 49714 - DNA, 1883 bp, Homo sapiens
gattctagaggttccccgcggtacgctgactggcctacctctgaagaggtggaatttaatgtatcagaagcatttgtacctctcaccaccccgagttctaatcactcattccacactggaaacgactctgactcggggaccctggagaggaagcggcctgctagcatggcggtgatggaaggagacttggtgaagaaggaaagtcctcccaaaccgaaggaccctgtatctgcagctgtgccagcaccagggagaaacaacagtcagatagcatctggccaaaatcagccccaggcagctgctggctcccaccagctctccatgggccaacctcacaatgctgcagggcccagcccgcatacactgcgccgagctgttaaaaaacccgctccagcacccccgaaaccgggcaacccacctcctggccaccccgggggccagagttcttcaggaacatctcagcatccacccagtctgtcaccaaagccacccacccgaagcccctctcctcccacccagcacacgggccagcctccaggccagccctccgccccctcccagctctcagcaccccggaggtactccagcagcttgtctccaatccaagctcccaatcacccaccgccgcagccccctacgcaggccacgccactgatgcacaccaaacccaatagccagggccctcccaaccccatggcattgcccagtgagcatggacttgagcagccatctcacacccctccccagactccaacgccccccagtactccgcccctaggaaaacagaaccccagtctgccagctcctcagaccctggcagggggtaaccctgaaactgcacagccacatgctggaaccttaccgagaccgagaccagtaccaaagccaaggaaccggcccagcgtgcccccacccccccaacctcctggtgtccactcagctggggacagcagcctcaccaacacagcaccaacagcttccaagatagtaacagactccaattccagggtttcagaaccgcatcgcagcatctttcctgaaatgcactcagactcagccagcaaagacgtgcctggccgcatcctgctggatatagacaatgataccgagagcactgccctgtgaagaaagccctttcccagccctccaccacttccaccctggcgagtggagcaggggcaggcgaacctctttctttgcagaccgaacagtgaaaagctttcagtggaggacaaaggagggcctcactgtgcgggacctggccttctgcacggcccaaggagaacctggaggccaccactaaagctgaatgacctgtgtcttgaagaagttggctttctttacatgggaaggaaatcatgccaaaaaaatccaaaacaaagaagtacctggagtggagagagtattcctgctgaaacgcgcataggaagcttttgtccctgctgttaatgcgggcagcacctacagcaacttggaatgagtaagaagcagtgcgttaactatctatttaataaaatgcgctcattatgcaagtcgcctactctctgctacctggacgttcattcttatgtattaggagggaggctgcgctccttcagacttgctgcagaatcattttgtatcatgtatggtctgtgtctccccagtcccctcagaaccatgcccatggatggtgactgctggctctgtcacctcatcaaactggatgtgacccatgccgcctcgttggattgtcggaatgtagacagaaatgtactgttcttttttttttttttaaacaatgtaattgctacttgataaggaccgaacattattctagtttcatgtttaatttgaattaaatatattctgtggtttataaaaacttcataaaataggaggta

SEQ ID NO: 49715 - DNA, 1875 bp, Homo sapiens
tcccccgcggtgtcatagctgacggttcttccctgaaaaggtggaatttaatgtatcagaagcatttgtacctctcaccaccccgagttctaatcactcattccacactggaaacgactctgactcggggaccctggagaggaagcggcctgctagcatggcggtgatggaaggagacttggtgaagaaggaaagtcctcccaaaccgaaggaccctgtatctgcagctgtgccagcaccagggagaaacaacagtcagatagcatctggccaaaatcagccccaggcagctgctggctcccaccagctctccatgggccaacctcacaatgctgcagggcccagcccgcatacactgcgccgagctgttaaaaaacccgctccagcacccccgaaaccgggcaacccacctcctggccaccccgggggccagagttcttcaggaacatctcagcatccacccagtctgtcaccaaagccacccacccgaagcccctctcctcccacccagcacacgggccagcctccaggccagccctccgccccctcccagctctcagcaccccggaggtactccagcagcttgtctccaatccaagctcccaatcacccaccgccgcagccccctacgcaggccacgccactgatgcacaccaaacccaatagccagggccctcccaaccccatggcattgcccagtgagcatggacttgagcagccatctcacacccctccccagactccaacgccccccagtactccgcccctaggaaaacagaaccccagtctgccagctcctcagaccctggcagggggtaaccctgaaactgcacagccacatgctggaaccttaccgagaccgagaccagtaccaaagccaaggaaccggcccagcgtgcccccacccccccaacctcctggtgtccactcagctggggacagcagcctcaccaacacagcaccaacagcttccaagatagtaacagactccaattccagggtttcagaaccgcatcgcagcatctttcctgaaatgcactcagactcagccagcaaagacgtgcctggccgcatcctgctggatatagacaatgataccgagagcactgccctgtgaagaaagccctttcccagccctccaccacttccaccctggcgagtggagcaggggcaggcgaacctctttctttgcagaccgaacagtgaaaagctttcagtggaggacaaaggagggcctcactgtgcgggacctggccttctgcacggcccaaggagaacctggaggccaccactaaagctgaatgacctgtgtcttgaagaagttggctttctttacatgggaaggaaatcatgccaaaaaaatccaaaacaaagaagtacctggagtggagagagtattcctgctgaaacgcgcataggaagcttttgtccctgctgttaatgcgggcagcacctacagcaacttggaatgagtaagaagcagtgcgttaactatctatttaataaaatgcgctcattatgcaagtcgcctactctctgctacctggacgttcattcttatgtattaggagggaggctgcgctccttcagacttgctgcagaatcattttgtatcatgtatggtctgtgtctccccagtcccctcagaaccatgcccatggatggtgactgctggctctgtcacctcatcaaactggatgtgacccatgccgcctcgttggattgtcggaatgtagacagaaatgtactgttcttttttttttttttaaacaatgtaattgctacttgataaggaccgaacattattctagtttcatgtttaatttgaattaaatatattctgtggtttataaaaacttcataaaataggaggta

SEQ ID NO: 49716 - DNA, 2414 bp, Homo sapiens
actaatgttattcactctttggtgaccttgacaaaatggagctacagagtttggtataaaaagttctgggccaggaaacaggaagcctgaattctgatctctatcctgctgctaccaactctggacttcgagtagtcatttagcctctgagttctccttcttcagtccaagttattgataataatcaagccctttatcatttagggtcttattttgccatggcttttgcttagttttgtacagtgtatatgtcaacatgtaaaagccatttcatggtattaagtactgcccaatttaagtccaaacgcagtagaactgaaaactccgcattggttgctttgaaatggtctctctgatgatactggagtggcagagtcgttggagtccagtctgatgcaacgaatctcataaaataaatagtcctatagtcccggctactcagggtgctgaggcaggagaggattgcttgagtccagaaatttgagaccaacctgggcaacatagcaagacctcatctcttaaaaaaaaaatggcaccaagtaaacattagctctttatatggcaccaagtaaacattagctttataagcccagtgtgagctagttagaatttcagatccttttcctgcctgccgaagtgaaaactctgcttggaatcttatgttttatgtgcagtatgttcagattttctagctgggattgtctgacgtctaacttgacttttactcctcttagtcctcccaaaccgaaggaccctgtatctgcagctgtgccagcaccagggagaaacaacagtcagatagcatctggccaaaatcagccccaggcagctgctggctcccaccagctctccatgggccaacctcacaatgctgcagggcccagcccgcatacactgcgccgagctgttaaaaaacccgctccagcacccccgaaaccgggcaacccacctcctggccaccccgggggccagagttcttcaggaacatctcagcatccacccagtctgtcaccaaagccacccacccgaagcccctctcctcccacccagcacacgggccagcctccaggccagccctccgccccctcccagctctcagcaccccggaggtactccagcagcttgtctccaatccaagctcccaatcacccaccgccgcagccccctacgcaggccacgccactgatgcacaccaaacccaatagccagggccctcccaaccccatggcattgcccagtgagcatggacttgagcagccatctcacacccctccccagactccaacgccccccagtactccgcccctaggaaaacagaaccccagtctgccagctcctcagaccctggcagggggtaaccctgaaactgcacagccacatgctggaaccttaccgagaccgagaccagtaccaaagccaaggaaccggcccagcgtgcccccacccccccaacctcctggtgtccactcagctggggacagcagcctcaccaacacagcaccaacagcttccaagatagtaacagactccaattccagggtttcagaaccgcatcgcagcatctttcctgaaatgcactcagactcagccagcaaagacgtgcctggccgcatcctgctggatatagacaatgataccgagagcactgccctgtgaagaaagccctttcccagccctccaccacttccaccctggcgagtggagcaggggcaggcgaacctctttctttgcagaccgaacagtgaaaagctttcagtggaggacaaaggagggcctcactgtgcgggacctggccttctgcacggcccaaggagaacctggaggccaccactaaagctgaatgacctgtgtcttgaagaagttggctttctttacatgggaaggaaatcatgccaaaaaaatccaaaacaaagaagtacctggagtggagagagtattcctgctgaaacgcgcataggaagcttttgtccctgctgttaatgcgggcagcacctacagcaacttggaatgagtaagaagcagtgcgttaactatctatttaataaaatgcgctcattatgcaagtcgcctactctctgctacctggacgttcattcttatgtattaggagggaggctgcgctccttcagacttgctgcagaatcattttgtatcatgtatggtctgtgtctccccagtcccctcagaaccatgcccatggatggtgactgctggctctgtcacctcatcaaactggatgtgacccatgccgcctcgttggattgtcggaatgtagacagaaatgtactgttcttttttttttttttaaacaatgtaattgctacttgataaggaccgaacattattctagtttcatgtttaatttgaattaaatatattctgtggtttataaaaacttcataaaataggaggta

SEQ ID NO: 49717 - DNA, 1592 bp, Homo sapiens
ggcaggaggatcacttgagcccaggaggtcgagcctgcagtgagctatgattgcaccaccgcactccagcctggacaacagactgttaaaaaacccgctccagcacccccgaaaccgggcaacccacctcctggccaccccgggggccagagttcttcaggaacatctcagcatccacccagtctgtcaccaaagccacccacccgaagcccctctcctcccacccagcacacgggccagcctccaggccagccctccgccccctcccagctctcagcaccccggaggtactccagcagcttgtctccaatccaagctcccaatcacccaccgccgcagccccctacgcaggccacgccactgatgcacaccaaacccaatagccagggccctcccaaccccatggcattgcccagtgagcatggacttgagcagccatctcacacccctccccagactccaacgccccccagtactccgcccctaggaaaacagaaccccagtctgccagctcctcagaccctggcagggggtaaccctgaaactgcacagccacatgctggaaccttaccgagaccgagaccagtaccaaagccaaggaaccggcccagcgtgcccccacccccccaacctcctggtgtccactcagctggggacagcagcctcaccaacacagcaccaacagcttccaagatagtaacagactccaattccagggtttcagaaccgcatcgcagcatctttcctgaaatgcactcagactcagccagcaaagacgtgcctggccgcatcctgctggatatagacaatgataccgagagcactgccctgtgaagaaagccctttcccagccctccaccacttccaccctggcgagtggagcaggggcaggcgaacctctttctttgcagaccgaacagtgaaaagctttcagtggaggacaaaggagggcctcactgtgcgggacctggccttctgcacggcccaaggagaacctggaggccaccactaaagctgaatgacctgtgtcttgaagaagttggctttctttacatgggaaggaaatcatgccaaaaaaatccaaaacaaagaagtacctggagtggagagagtattcctgctgaaacgcgcataggaagcttttgtccctgctgttaatgcgggcagcacctacagcaacttggaatgagtaagaagcagtgcgttaactatctatttaataaaatgcgctcattatgcaagtcgcctactctctgctacctggacgttcattcttatgtattaggagggaggctgcgctccttcagacttgctgcagaatcattttgtatcatgtatggtctgtgtctccccagtcccctcagaaccatgcccatggatggtgactgctggctctgtcacctcatcaaactggatgtgacccatgccgcctcgttggattgtcggaatgtagacagaaatgtactgttcttttttttttttttaaacaatgtaattgctacttgataaggaccgaacattattctagtttcatgtttaatttgaattaaatatattctgtggtttataaaaacttcataaaataggaggta

SEQ ID NO: 49718 - DNA, 3522 bp, Homo sapiens
ataaggcaggctggtacggtccgggatttaggatggccgagccccgcgggccgccgccgccaccgccgccatgaagaagcagttcaaccgcatgaagcagctggctaaccagaccgtgggcagagctgagaaaacagaagtccttagtgaagatctattacagattgagagacgcctggacacggtgcggtcaatatgccaccattcccataagcgcttggtggcatgtttccagggccagcatggcaccgatgccgagaggagacacaaaaaactgcctctgacagctcttgctcaaaatatgcaagaagcatcgactcagctggaagactctctcctggggaagatgctggagacgtgtggagatgctgagaatcagctggctctcgagctctcccagcacgaagtctttgttgagaaggagatcgtggaccctctgtacggcatagctgaggtggagattcccaacatccagaagcagaggaagcagcttgcaagattggtgttagactgggattcagtcagagccaggtggaaccaagctcacaaatcctcaggaaccaactttcaggggcttccatcaaaaatagatactctaaaggaagagatggatgaagctggaaataaagtagaacagtgcaaggatcaacttgcagcagacatgtacaactttatggccaaagaaggggagtatggcaaattctttgttacgttattagaagcccaagcagattaccatagaaaagcattagcagtcttagaaaagaccctccccgaaatgcgagcccatcaagataagtgggcggaaaaaccagcctttgggactcccctagaagaacacctgaagaggagcgggcgcgagattgcgctgcccattgaagcctgtgtcatgctgcttctggagacaggcatgaaggaggagggccttttccgaattggggctggggcctccaagttaaagaagctgaaagctgctttggactgttctacttctcacctggatgagttctattcagacccccatgctgtagcaggtgctttaaaatcctatttacgggaattgcctgaacctttgatgacttttaatctgtatgaagaatggacacaagttgcaagtgtgcaggatcaagacaaaaaacttcaagacttgtggagaacatgtcagaagttgccaccacaaaattttgttaactttagatatttgatcaagttccttgcaaagcttgctcagaccagcgatgtgaataaaatgactcccagcaacattgcgattgtgttaggccctaacttgttatgggccagaaatgaaggaacacttgctgaaatggcagcagccacatccgtccatgtggttgcagtgattgaacccatcattcagcatgccgactggttcttccctgaagaggtggaatttaatgtatcagaagcatttgtacctctcaccaccccgagttctaatcactcattccacactggaaacgactctgactcggggaccctggagaggaagcggcctgctagcatggcggtgatggaaggagacttggtgaagaaggaaagctttggtgtgaagcttatggacttccaggcccaccggcggggtggcactctaaatagaaagcacatatcccccgctttccagccgccacttccgcccacagatggcagcaccgtggtgcccgctggcccagagccccctccccagagctctagggctgaaagcagctctgggggtgggactgtcccctcttccgcgggcatactggagcaggggccgagcccaggcgacggcagtcctcccaaaccgaaggaccctgtatctgcagctgtgccagcaccagggagaaacaacagtcagatagcatctggccaaaatcagccccaggcagctgctggctcccaccagctctccatgggccaacctcacaatgctgcagggcccagcccgcatacactgcgccgagctgttaaaaaacccgctccagcacccccgaaaccgggcaacccacctcctggccaccccgggggccagagttcttcaggaacatctcagcatccacccagtctgtcaccaaagccacccacccgaagcccctctcctcccacccagcacacgggccagcctccaggccagccctccgccccctcccagctctcagcaccccggaggtactccagcagcttgtctccaatccaagctcccaatcacccaccgccgcagccccctacgcaggccacgccactgatgcacaccaaacccaatagccagggccctcccaaccccatggcattgcccagtgagcatggacttgagcagccatctcacacccctccccagactccaacgccccccagtactccgcccctaggaaaacagaaccccagtctgccagctcctcagaccctggcagggggtaaccctgaaactgcacagccacatgctggaaccttaccgagaccgagaccagtaccaaagccaaggaaccggcccagcgtgcccccacccccccaacctcctggtgtccactcagctggggacagcagcctcaccaacacagcaccaacagcttccaagatagtaacagatgcccttcctagtgccctcacaggtggggaaggtttccaggactaagactccaattccagggtttcagaaccgcatcgcagcatctttcctgaaatgcactcagactcagccagcaaagacgtgcctggccgcatcctgctggatatagacaatgataccgagagcactgccctgtgaagaaagccctttcccagccctccaccacttccaccctggcgagtggagcaggggcaggcgaacctctttctttgcagaccgaacagtgaaaagctttcagtggaggacaaaggagggcctcactgtgcgggacctggccttctgcacggcccaaggagaacctggaggccaccactaaagctgaatgacctgtgtcttgaagaagttggctttctttacatgggaaggaaatcatgccaaaaaaatccaaaacaaagaagtacctggagtggagagagtattcctgctgaaacgcgcataggaagcttttgtccctgctgttaatgcgggcagcacctacagcaacttggaatgagtaagaagcagtgcgttaactatctatttaataaaatgcgctcattatgcaagtcgcctactctctgctacctggacgttcattcttatgtattaggagggaggctgcgctccttcagacttgctgcagaatcattttgtatcatgtatggtctgtgtctccccagtcccctcagaaccatgcccatggatggtgactgctggctctgtcacctcatcaaactggatgtgacccatgccgcctcgttggattgtcggaatgtagacagaaatgtactgttcttttttttttttttaaacaatgtaattgctacttgataaggaccgaacattattctagtttcatgtttaatttgaattaaatatattctgtggtttataaaaacttcataaaataggaggta

SEQ ID NO: 49719 - DNA, 962 bp, Homo sapiens
gggtgactctagacgatccctatatccagcagcctcaccaacacagcaccaacagcttccaagatagtaacagactccaattccagggtttcagaaccgcatcgcagcatctttcctgaaatgcactcagactcagccagcaaagacgtgcctggccgcatcctgctggatatagacaatgataccgagagcactgccctgtgaagaaagccctttcccagccctccaccacttccaccctggcgagtggagcaggggcaggcgaacctctttctttgcagaccgaacagtgaaaagctttcagtggaggacaaaggagggcctcactgtgcgggacctggccttctgcacggcccaaggagaacctggaggccaccactaaagctgaatgacctgtgtcttgaagaagttggctttctttacatgggaaggaaatcatgccaaaaaaatccaaaacaaagaagtacctggagtggagagagtattcctgctgaaacgcgcataggaagcttttgtccctgctgttaatgcgggcagcacctacagcaacttggaatgagtaagaagcagtgcgttaactatctatttaataaaatgcgctcattatgcaagtcgcctactctctgctacctggacgttcattcttatgtattaggagggaggctgcgctccttcagacttgctgcagaatcattttgtatcatgtatggtctgtgtctccccagtcccctcagaaccatgcccatggatggtgactgctggctctgtcacctcatcaaactggatgtgacccatgccgcctcgttggattgtcggaatgtagacagaaatgtactgttcttttttttttttttaaacaatgtaattgctacttgataaggaccgaacattattctagtttcatgtttaatttgaattaaatatattctgtggtttataaaaacttcataaaataggaggta

SEQ ID NO: 49720 - DNA, 979 bp, Homo sapiens
attcggaacgagggcaccaacagcttccaagatagtaacagatgtatgacctgccatattcagtaagaactgagattggaatatttaatgactccaattccagggtttcagaaccgcatcgcagcatctttcctgaaatgcactcagactcagccagcaaagacgtgcctggccgcatcctgctggatatagacaatgataccgagagcactgccctgtgaagaaagccctttcccagccctccaccacttccaccctggcgagtggagcaggggcaggcgaacctctttctttgcagaccgaacagtgaaaagctttcagtggaggacaaaggagggcctcactgtgcgggacctggccttctgcacggcccaaggagaacctggaggccaccactaaagctgaatgacctgtgtcttgaagaagttggctttctttacatgggaaggaaatcatgccaaaaaaatccaaaacaaagaagtacctggagtggagagagtattcctgctgaaacgcgcataggaagcttttgtccctgctgttaatgcgggcagcacctacagcaacttggaatgagtaagaagcagtgcgttaactatctatttaataaaatgcgctcattatgcaagtcgcctactctctgctacctggacgttcattcttatgtattaggagggaggctgcgctccttcagacttgctgcagaatcattttgtatcatgtatggtctgtgtctccccagtcccctcagaaccatgcccatggatggtgactgctggctctgtcacctcatcaaactggatgtgacccatgccgcctcgttggattgtcggaatgtagacagaaatgtactgttcttttttttttttttaaacaatgtaattgctacttgataaggaccgaacattattctagtttcatgtttaatttgaattaaatatattctgtggtttataaaaacttcataaaataggaggta

SEQ ID NO: 49721 - DNA, 917 bp, Homo sapiens
ttacactcggcgatcgagatataccggactccatttccaacggtgcatcatctgtatcgcagcatctttcctgaaatgcactcagactcagccagcaaagacgtgcctggccgcatcctgctggatatagacaatgataccgagagcactgccctgtgaagaaagccctttcccagccctccaccacttccaccctggcgagtggagcaggggcaggcgaacctctttctttgcagaccgaacagtgaaaagctttcagtggaggacaaaggagggcctcactgtgcgggacctggccttctgcacggcccaaggagaacctggaggccaccactaaagctgaatgacctgtgtcttgaagaagttggctttctttacatgggaaggaaatcatgccaaaaaaatccaaaacaaagaagtacctggagtggagagagtattcctgctgaaacgcgcataggaagcttttgtccctgctgttaatgcgggcagcacctacagcaacttggaatgagtaagaagcagtgcgttaactatctatttaataaaatgcgctcattatgcaagtcgcctactctctgctacctggacgttcattcttatgtattaggagggaggctgcgctccttcagacttgctgcagaatcattttgtatcatgtatggtctgtgtctccccagtcccctcagaaccatgcccatggatggtgactgctggctctgtcacctcatcaaactggatgtgacccatgccgcctcgttggattgtcggaatgtagacagaaatgtactgttcttttttttttttttaaacaatgtaattgctacttgataaggaccgaacattattctagtttcatgtttaatttgaattaaatatattctgtggtttataaaaacttcataaaataggaggta

SEQ ID NO: 49722 - DNA, 3212 bp, Homo sapiens
ataaggcaggctggtacggtccgggatttaggatggccgagccccgcgggccgccgccgccaccgccgccatgaagaagcagttcaaccgcatgaagcagctggctaaccagaccgtgggcagagctgagaaaacagaagtccttagtgaagatctattacagattgagagacgcctggacacggtgcggtcaatatgccaccattcccataagcgcttggtggcatgtttccagggccagcatggcaccgatgccgagaggagacacaaaaaactgcctctgacagctcttgctcaaaatatgcaagaagcatcgactcagctggaagactctctcctggggaagatgctggagacgtgtggagatgctgagaatcagctggctctcgagctctcccagcacgaagtctttgttgagaaggagatcgtggaccctctgtacggcatagctgaggtggagattcccaacatccagaagcagaggaagcagcttgcaagattggtgttagactgggattcagtcagagccaggtggaaccaagctcacaaatcctcaggaaccaactttcaggggcttccatcaaaaatagatactctaaaggaagagatggatgaagctggaaataaagtagaacagtgcaaggatcaacttgcagcagacatgtacaactttatggccaaagaaggggagtatggcaaattctttgttacgttattagaagcccaagcagattaccatagaaaagcattagcagtcttagaaaagaccctccccgaaatgcgagcccatcaagataagtgggcggaaaaaccagcctttgggactcccctagaagaacacctgaagaggagcgggcgcgagattgcgctgcccattgaagcctgtgtcatgctgcttctggagacaggcatgaaggaggagggccttttccgaattggggctggggcctccaagttaaagaagctgaaagctgctttggactgttctacttctcacctggatgagttctattcagacccccatgctgtagcaggtgctttaaaatcctatttacgggaattgcctgaacctttgatgacttttaatctgtatgaagaatggacacaagttgcaagtgtgcaggatcaagacaaaaaacttcaagacttgtggagaacatgtcagaagttgccaccacaaaattttgttaactttagatatttgatcaagttccttgcaaagcttgctcagaccagcgatgtgaataaaatgactcccagcaacattgcgattgtgttaggccctaacttgttatgggccagaaatgaaggaacacttgctgaaatggcagcagccacatccgtccatgtggttgcagtgattgaacccatcattcagcatgccgactggttcttccctgaagaggtggaatttaatgtatcagaagcatttgtacctctcaccaccccgagttctaatcactcattccacactggaaacgactctgactcggggaccctggagaggaagcggcctgctagcatggcggtgatggaaggagacttggtgaagaaggaaagtcctcccaaaccgaaggaccctgtatctgcagctgtgccagcaccagggagaaacaacagtcagatagcatctggccaaaatcagccccaggcagctgctggctcccaccagctctccatgggccaacctcacaatgctgcagggcccagcccgcatacactgcgccgagctgttaaaaaacccgctccagcacccccgaaaccgggcaacccacctcctggccaccccgggggccagagttcttcaggaacatctcagcatccacccagtctgtcaccaaagccacccacccgaagcccctctcctcccacccagcacacgggccagcctccaggccagccctccgccccctcccagctctcagcaccccggaggtactccagcagcttgtctccaatccaagctcccaatcacccaccgccgcagccccctacgcaggccacgccactgatgcacaccaaacccaatagccagggccctcccaaccccatggcattgcccagtgagcatggacttgagcagccatctcacacccctccccagactccaacgccccccagtactccgcccctaggaaaacagaaccccagtctgccagctcctcagaccctggcagggggtaaccctgaaactgcacagccacatgctggaaccttaccgagaccgagaccagtaccaaagccaaggaaccggcccagcgtgcccccacccccccaacctcctggtgtccactcagctggggacagcagcctcaccaacacagcaccaacagcttccaagatagtaacagactccaattccagggtttcagaaccgcatcgcagcatctttcctgaaatgcactcagactcagccagcaaagacgtgcctggccgcatcctgctggatatagacaatgataccgagagcactgccctgtgaagaaagccctttcccagccctccaccacttccaccctggcgagtggagcaggggcaggcgaacctctttctttgcagaccgaacagtgaaaagctttcagtggaggacaaaggagggcctcactgtgcgggacctggccttctgcacggcccaaggagaacctggaggccaccactaaagctgaatgacctgtgtcttgaagaagttggctttctttacatgggaaggaaatcatgccaaaaaaatccaaaacaaagaagtacctggagtggagagagtattcctgctgaaacgcgcataggaagcttttgtccctgctgttaatgcgggcagcacctacagcaacttggaatgagtaagaagcagtgcgttaactatctatttaataaaatgcgctcattatgcaagtcgcctactctctgctacctggacgttcattcttatgtattaggagggaggctgcgctccttcagacttgctgcagaatcattttgtatcatgtatggtctgtgtctccccagtcccctcagaaccatgcccatggatggtgactgctggctctgtcacctcatcaaactggatgtgacccatgccgcctcgttggattgtcggaatgtagacagaaatgtactgttcttttttttttttttttttttttttttttttttttttttttttttttttttttttttttttttttttttttttttattattttatatattatttt

SEQ ID NO: 49723 - DNA, 3324 bp, Homo sapiens
ataaggcaggctggtacggtccgggatttaggatggccgagccccgcgggccgccgccgccaccgccgccatgaagaagcagttcaaccgcatgaagcagctggctaaccagaccgtgggcagagctgagaaaacagaagtccttagtgaagatctattacagattgagagacgcctggacacggtgcggtcaatatgccaccattcccataagcgcttggtggcatgtttccagggccagcatggcaccgatgccgagaggagacacaaaaaactgcctctgacagctcttgctcaaaatatgcaagaagcatcgactcagctggaagactctctcctggggaagatgctggagacgtgtggagatgctgagaatcagctggctctcgagctctcccagcacgaagtctttgttgagaaggagatcgtggaccctctgtacggcatagctgaggtggagattcccaacatccagaagcagaggaagcagcttgcaagattggtgttagactgggattcagtcagagccaggtggaaccaagctcacaaatcctcaggaaccaactttcaggggcttccatcaaaaatagatactctaaaggaagagatggatgaagctggaaataaagtagaacagtgcaaggatcaacttgcagcagacatgtacaactttatggccaaagaaggggagtatggcaaattctttgttacgttattagaagcccaagcagattaccatagaaaagcattagcagtcttagaaaagaccctccccgaaatgcgagcccatcaagataagtgggcggaaaaaccagcctttgggactcccctagaagaacacctgaagaggagcgggcgcgagattgcgctgcccattgaagcctgtgtcatgctgcttctggagacaggcatgaaggaggagggccttttccgaattggggctggggcctccaagttaaagaagctgaaagctgctttggactgttctacttctcacctggatgagttctattcagacccccatgctgtagcaggtgctttaaaatcctatttacgggaattgcctgaacctttgatgacttttaatctgtatgaagaatggacacaagttgcaagtgtgcaggatcaagacaaaaaacttcaagacttgtggagaacatgtcagaagttgccaccacaaaattttgttaactttagatatttgatcaagttccttgcaaagcttgctcagaccagcgatgtgaataaaatgactcccagcaacattgcgattgtgttaggccctaacttgttatgggccagaaatgaaggaacacttgctgaaatggcagcagccacatccgtccatgtggttgcagtgattgaacccatcattcagcatgccgactggttcttccctgaagaggtggaatttaatgtatcagaagcatttgtacctctcaccaccccgagttctaatcactcattccacactggaaacgactctgactcggggaccctggagaggaagcggcctgctagcatggcggtgatggaaggagacttggtgaagaaggaaagctttggtgtgaagcttatggacttccaggcccaccggcggggtggcactctaaatagaaagcacatatcccccgctttccagccgccacttccgcccacagatggcagcaccgtggtgcccgctggcccagagccccctccccagagctctagggctgaaagcagctctgggggtgggactgtcccctcttccgcgggcatactggagcaggggccgagcccaggcgacggcagtcctcccaaaccgaaggaccctgtatctgcagctgtgccagcaccagggagaaacaacagtcagatagcatctggccaaaatcagccccaggcagctgctggctcccaccagctctccatgggccaacctcacaatgctgcagggcccagcccgcatacactgcgccgagctgttaaaaaacccgctccagcacccccgaaaccgggcaacccacctcctggccaccccgggggccagagttcttcaggaacatctcagcatccacccagtctgtcaccaaagccacccacccgaagcccctctcctcccacccagcacacgggccagcctccaggccagccctccgccccctcccagctctcagcaccccggaggtactccagcagcttgtctccaatccaagctcccaatcacccaccgccgcagccccctacgcaggccacgccactgatgcacaccaaacccaatagccagggccctcccaaccccatggcattgcccagtgagcatggacttgagcagccatctcacacccctccccagactccaacgccccccagtactccgcccctaggaaaacagaaccccagtctgccagctcctcagaccctggcagggggtaaccctgaaactgcacagccacatgctggaaccttaccgagaccgagaccagtaccaaagccaaggaaccggcccagcgtgcccccacccccccaacctcctggtgtccactcagctggggacagcagcctcaccaacacagcaccaacagcttccaagatagtaacagatgcccttcctagtgccctcacaggtggggaaggtttccaggactaaggtctgtaatggccccgagcagcttgccccatagctcgccccacagctccaaatgctcctgcttagccgtgttttgcatatgtgcttttgaccatgtgctcaggagcagccgtttgaccgtgtgccctgacagccaataggccatccattctgtagcatattgacatttctttatttttatcagaagcactttgagctgcagtgcttcaaattcgaggagtagatgtcagtagatcaagagcctgatttcaagctgctcttgaagagtatcttctttcttaggggccaagcacagtggctcgtgcctctaatcccagtactttgagtggctgaggcaagaggattgcttgagctcaggagttcgagactgcagtgggtagtgattgtgtcactgcacactgcagtccagcctgcatgacagagtgagaccctgcctctttttaaaaaaaaaaaaaaaaaggaatatcttctatctttttggtgagcctcttagcagcagtctactcttcccagtgtgatttacctgtcactgatgggctcaccagcatccaaccaaagaggacccaggtgcagtcagcacgggaggaaattgtgtcctttgtgtcttgagctttaattttaaatttttgtattttaagtgcaagttaactgcatggagcttcttaatttgatattttaaattctcaagacca

SEQ ID NO: 49724 - DNA, 3037 bp, Homo sapiens
ataaggcaggctggtacggtccgggatttaggatggccgagccccgcgggccgccgccgccaccgccgccatgaagaagcagttcaaccgcatgaagcagctggctaaccagaccgtgggcagagctgagaaaacagaagtccttagtgaagatctattacagattgagagacgcctggacacggtgcggtcaatatgccaccattcccataagcgcttggtggcatgtttccagggccagcatggcaccgatgccgagaggagacacaaaaaactgcctctgacagctcttgctcaaaatatgcaagaagcatcgactcagctggaagactctctcctggggaagatgctggagacgtgtggagatgctgagaatcagctggctctcgagctctcccagcacgaagtctttgttgagaaggagatcgtggaccctctgtacggcatagctgaggtggagattcccaacatccagaagcagaggaagcagcttgcaagattggtgttagactgggattcagtcagagccaggtggaaccaagctcacaaatcctcaggaaccaactttcaggggcttccatcaaaaatagatactctaaaggaagagatggatgaagctggaaataaagtagaacagtgcaaggatcaacttgcagcagacatgtacaactttatggccaaagaaggggagtatggcaaattctttgttacgttattagaagcccaagcagattaccatagaaaagcattagcagtcttagaaaagaccctccccgaaatgcgagcccatcaagataagtgggcggaaaaaccagcctttgggactcccctagaagaacacctgaagaggagcgggcgcgagattgcgctgcccattgaagcctgtgtcatgctgcttctggagacaggcatgaaggaggagggccttttccgaattggggctggggcctccaagttaaagaagctgaaagctgctttggactgttctacttctcacctggatgagttctattcagacccccatgctgtagcaggtgctttaaaatcctatttacgggaattgcctgaacctttgatgacttttaatctgtatgaagaatggacacaagttgcaagtgtgcaggatcaagacaaaaaacttcaagacttgtggagaacatgtcagaagttgccaccacaaaattttgttaactttagatatttgatcaagttccttgcaaagcttgctcagaccagcgatgtgaataaaatgactcccagcaacattgcgattgtgttaggccctaacttgttatgggccagaaatgaaggaacacttgctgaaatggcagcagccacatccgtccatgtggttgcagtgattgaacccatcattcagcatgccgactggttcttccctgaagaggtggaatttaatgtatcagaagcatttgtacctctcaccaccccgagttctaatcactcattccacactggaaacgactctgactcggggaccctggagaggaagcggcctgctagcatggcggtgatggaaggagacttggtgaagaaggaaagctttggtgtgaagcttatggacttccaggcccaccggcggggtggcactctaaatagaaagcacatatcccccgctttccagccgccacttccgcccacagatggcagcaccgtggtgcccgctggcccagagccccctccccagagctctagggctgaaagcagctctgggggtgggactgtcccctcttccgcgggcatactggagcaggggccgagcccaggcgacggcagtcctcccaaaccgaaggaccctgtatctgcagctgtgccagcaccagggagaaacaacagtcagatagcatctggccaaaatcagccccaggcagctgctggctcccaccagctctccatgggccaacctcacaatgctgcagggcccagcccgcatacactgcgccgagctgttaaaaaacccgctccagcacccccgaaaccgggcaacccacctcctggccaccccgggggccagagttcttcaggaacatctcagcatccacccagtctgtcaccaaagccacccacccgaagcccctctcctcccacccagcacacgggccagcctccaggccagccctccgccccctcccagctctcagcaccccggaggtactccagcagcttgtctccaatccaagctcccaatcacccaccgccgcagccccctacgcaggccacgccactgatgcacaccaaacccaatagccagggccctcccaaccccatggcattgcccagtgagcatggacttgagcagccatctcacacccctccccagactccaacgccccccagtactccgcccctaggaaaacagaaccccagtctgccagctcctcagaccctggcagggggtaaccctgaaactgcacagccacatgctggaaccttaccgagaccgagaccagtaccaaagccaaggaaccggcccagcgtgcccccacccccccaacctcctggtgtccactcagctggggacagcagcctcaccaacacagcaccaacagcttccaagatagtaacaggtaagtaggacatcaatgcccgtatttcctcgtctgctctacattgcttttgtactactacattttatttaagctttgatttatgccaggtgtcagcaaactacacccgcaagccaaaccaaacctgtcctgcagccagtttttgtcattaaagttttattggaacacagctacacccatttgttaacatattgtctgtggctgcattggtgctgaaacagcagagctgggtagtcgtgaccaaagatcctgtggcccacaaagttggaaacatttactgcctggtcctttaagtttgccgacccctgacttatagttgcttgtgtgtttaagacctatgtacgtttacatttttctcaacataatggcttttattccaggtggaaggtattttacaacacgagcatgaactttatttcttagtgaattcctcattaaaatgcttaaacagt

SEQ ID NO: 49725 - DNA, 1854 bp, Homo sapiens
cgccgtttgggccgggaagcgatgtagtagctgccaggctgtcccccgccctgcccggcccgagccccgcgggccgccgccgccaccgccgccatgaagaagcagttcaaccgcatgaagcagctggctaaccagaccgtgggcagagctgagaaaacagaagtccttagtgaagatctattacagattgagagacgcctggacacggtgcggtcaatatgccaccattcccataagcgcttggtggcatgtttccagggccagcatggcaccgatgccgagaggagacacaaaaaactgcctctgacagctcttgctcaaaatatgcaagaagcatcgactcagctggaagactctctcctggggaagatgctggagacgtgtggagatgctgagaatcagctggctctcgagctctcccagcacgaagtctttgttgagaaggagatcgtggaccctctgtacggcatagctgaggtggagattcccaacatccagaagcagaggaagcagcttgcaagattggtgttagactgggattcagtcagagccaggtggaaccaagctcacaaatcctcaggaaccaactttcaggggcttccatcaaaaatagatactctaaaggaagagatggatgaagctggaaataaagtagaacagtgcaaggatcaacttgcagcagacatgtacaactttatggccaaagaaggggagtatggcaaattctttgttacgataagtgggcggaaaaaccagcctttgggactcccctagaagaacacctgaagaggagcgggcgcgagattgcgctgcccattgaagcctgtgtcatgctgcttctggagacaggcatgaaggaggagggccttttccgaattggggctggggcctccaagttaaagaagctgaaagctgctttggactgttctacttctcacctggatgagttctattcagacccccatgctgtagcaggtgctttaaaatcctatttacgggaattgcctgaacctttgatgacttttaatctgtatgaagaatggacacaagttgcaagtgtgcaggatcaagacaaaaaacttcaagacttgtggagaacatgtcagaagttgccaccacaaaattttgttaactttagatatttgatcaagttccttgcaaagcttgctcagaccagcgatgtgaataaaatgactcccagcaacattgcgattgtgttaggccctaacttgttatgggccagaaatgaaggaacacttgctgaaatggcagcagccacatccgtccatgtggttgcagtgattgaacccatcattcagcatgccgactggttcttccctgaagaggtggaatttaatgtatcagaagcatttgtacctctcaccaccccgagttctaatcactcattccacactggaaacgactctgactcggggaccctggagaggaagcggcctgctagcatggcggtgatggaaggagacttggtgaagaaggaaagtcctcccaaaccgaaggaccctgtatctgcagctgtgccagcaccagggagaaacaacagtcagatagcatctggccaaaatcagccccaggcagctgctggctcccaccagctctccatgggccaacctcacaatgctgcagggcccagcccgcatacactgcgccgagctgttaaaaaacccgctccagcacccccgaaaccgggcaacccacctcctggccaccccgggggccagagttcttcaggaacatctcagcatccacccagtctgtcaccaaagctgcttcctgtccgtctcattccccgcaccctgccctcccccgcaaccttcagctcctctcgccacgaga

SEQ ID NO: 49726 - DNA, 473 bp, Homo sapiens
ggggccttgggtgtaccagcccccccccggattacgggtggcgggcagcacctacagcaacttggaatgagtaagaagcagtgcgttaactatctatttaataaaatgcgctcattatgcaagtcgcctactctctgctacctggacgttcattcttatgtattaggagggaggctgcgctccttcagacttgctgcagaatcattttgtatcatgtatggtctgtgtctccccagtcccctcagaaccatgcccatggatggtgactgctggctctgtcacctcatcaaactggatgtgacccatgccgcctcgttggattgtcggaatgtagacagaaatgtactgttcttttttttttttttaaacaatgtaattgctacttgataaggaccgaacattattctagtttcatgtttaatttgaattaaatatattctgtggtttataaaaacttcataaaataggaggta

SEQ ID NO: 49727 - DNA, 1568 bp, Homo sapiens
cgccgtttgggccgggaagcgatgtagtagctgccaggctgtcccccgccctgcccggcccgagccccgcgggccgccgccgccaccgccgccatgaagaagcagttcaaccgcatgaagcagctggctaaccagaccgtgggcagagctgagaaaacagaagtccttagtgaagatctattacagattgagagacgcctggacacggtgcggtcaatatgccaccattcccataagcgcttggtggcatgtttccagggccagcatggcaccgatgccgagaggagacacaaaaaactgcctctgacagctcttgctcaaaatatgcaagaagcatcgactcagctggaagactctctcctggggaagatgctggagacgtgtggagatgctgagaatcagctggctctcgagctctcccagcacgaagtctttgttgagaaggagatcgtggaccctctgtacggcatagctgaggtggagattcccaacatccagaagcagaggaagcagcttgcaagattggtgttagactgggattcagtcagagccaggtggaaccaagctcacaaatcctcaggaaccaactttcaggggcttccatcaaaaatagatactctaaaggaagagatggatgaagctggaaataaagtagaacagtgcaaggatcaacttgcagcagacatgtacaactttatggccaaagaaggggagtatggcaaattctttgttacgataagtgggcggaaaaaccagcctttgggactcccctagaagaacacctgaagaggagcgggcgcgagattgcgctgcccattgaagcctgtgtcatgctgcttctggagacaggcatgaaggaggagggccttttccgaattggggctggggcctccaagttaaagaagctgaaagctgctttggactgttctacttctcacctggatgagttctattcagacccccatgctgtagcaggtgctttaaaatcctatttacgggaattgcctgaacctttgatgacttttaatctgtatgaagaatggacacaagttgcaagtgtgcaggatcaagacaaaaaacttcaagacttgtggagaacatgtcagaagttgccaccacaaaattttgttaactttaggtatgtatgattgagctacaatgactctggagtgaagataagtttaatgcccagcagagaagtcatttaattcaggcatacttggcacattaaaaaacaacaacaacaacaaaaaaaaccacatcactttggagagtaacttggggctactgggaatgggatttcatgtatattatgatgaatttgaagcatcagtatcatgcctgacattaatacgtaagttggcttatcattttcccactacagctattagcaataaatttcttgtgaaaagtttgagtgactgtatgttgggtttggagtccaaatcatccagtatgttaaaaggcaaaattaatcaataattgtacattctgtaatgtcttttatatatgctacttaatttaaagtataaatcatcttactaaataaaatttcaaagaatggagat

SEQ ID NO: 49728 - DNA, 2338 bp, Homo sapiens
ataaggcaggctggtacggtccgggatttaggatggccgagccccgcgggccgccgccgccaccgccgccatgaagaagcagttcaaccgcatgaagcagctggctaaccagaccgtgggcagagctgagaaaacagaagtccttagtgaagatctattacagattgagagacgcctggacacggtgcggtcaatatgccaccattcccataagcgcttggtggcatgtttccagggccagcatggcaccgatgccgagaggagacacaaaaaactgcctctgacagctcttgctcaaaatatgcaagaagcatcgactcagctggaagactctctcctggggaagatgctggagacgtgtggagatgctgagaatcagctggctctcgagctctcccagcacgaagtctttgttgagaaggagatcgtggaccctctgtacggcatagctgaggtggagattcccaacatccagaagcagaggaagcagcttgcaagattggtgttagactgggattcagtcagagccaggtggaaccaagctcacaaatcctcaggaaccaactttcaggggcttccatcaaaaatagatactctaaaggaagagatggatgaagctggaaataaagtagaacagtgcaaggatcaacttgcagcagacatgtacaactttatggccaaagaaggggagtatggcaaattctttgttacgttattagaagcccaagcagattaccatagaaaagcattagcagtcttagaaaagaccctccccgaaatgcgagcccatcaagataagtgggcggaaaaaccagcctttgggactcccctagaagaacacctgaagaggagcgggcgcgagattgcgctgcccattgaagcctgtgtcatgctgcttctggagacaggcatgaaggaggagggccttttccgaattggggctggggcctccaagttaaagaagctgaaagctgctttggactgttctacttctcacctggatgagttctattcagacccccatgctgtagcaggtgctttaaaatcctatttacgggaattgcctgaacctttgatgacttttaatctgtatgaagaatggacacaagttgcaagtgtgcaggatcaagacaaaaaacttcaagacttgtggagaacatgtcagaagttgccaccacaaaattttgttaactttagatatttgatcaagttccttgcaaagcttgctcagaccagcgatgtgaataaaatgactcccagcaacattgcgattgtgttaggccctaacttgttatgggccagaaatgaaggaacacttgctgaaatggcagcagccacatccgtccatgtggttgcagtgattgaacccatcattcagcatgccgactggttcttccctgaagaggtggaatttaatgtatcagaagcatttgtacctctcaccaccccgagttctaatcactcattccacactggaaacgactctgactcggggaccctggagaggaagcggcctgctagcatggcggtgatggaaggagacttggtgaagaaggaaagctttggtgtgaagcttatggacttccaggcccaccggcggggtggcactctaaatagaaagcacatatcccccgctttccagccgccacttccgcccacagatggcagcaccgtggtgcccgctggcccagagccccctccccagagctctagggctgaaagcagctctgggggtgggactgtcccctcttccgcgggcatactggagcaggggccgagcccaggcgacggcaggtaaggaggctgacttctgctggcagtggaggctggacgccccagccttcttgcaggtggtggcctttgagcacggcatccatgcccaaagaactgctccagcatggagtgaacagatttactttcactcctctggttggcaaaagatggaaaaaaagactatgaatggctcgcttctttttatgttttccaaagaaagcaacattggtttgcattctttgccacactgctttggtgctggaaaccggaagccagtggatgtctcatagtgtgatgagcctctgtcacctgttggatgtatactgtcagcattcatgtaccttctgttcattgtcatccagtgtgctaaccaggaagcatttgagtgtggcaagttagttaaattttcgtattcctggcatttattcacccattcgttgattgattcagtgaaacagatttactgagtcactgatatgtgctaggcacatgaggtgactaagactccactccacacccccagatttcagtcttgtagggcagttgatccatgagtccaaggtgg

SEQ ID NO: 49729 - DNA, 1091 bp, Homo sapiens
cgccgtttgggccgggaagcgatgtagtagctgccaggctgtcccccgccctgcccggcccgagccccgcgggccgccgccgccaccgccgccatgaagaagcagttcaaccgcatgaagcagctggctaaccagaccgtgggcagagctgagaaaacagaagtccttagtgaagatctattacagattgagagacgcctggacacggtgcggtcaatatgccaccattcccataagcgcttggtggcatgtttccagggccagcatggcaccgatgccgagaggagacacaaaaaactgcctctgacagctcttgctcaaaatatgcaagaagcatcgactcagctggaagactctctcctggggaagatgctggagacgtgtggagatgctgagaatcagctggctctcgagctctcccagcacgaagtctttgttgagaaggagatcgtggaccctctgtacggcatagctgaggtggagattcccaacatccagaagcagaggaagcagcttgcaagattggtgttagactgggattcagtcagagccaggtggaaccaagctcacaaatcctcaggaaccaactttcaggggcttccatcaaaaatagatactctaaaggaagagatggatgaagctggaaataaagtagaacagtgcaaggatcaacttgcagcagacatgtacaactttatggccaaagaaggggagtatggcaaattctttgttacgataagtgggcggaaaaaccagcctttgggactcccctagaagaacacctgaagaggagcgggcgcgagattgcgctgcccattgaagcctgtgtcatgctgcttctggagacaggcatgaaggaggaggtgaggggagcttcgtgatcctgtgcaccaagtctccatgccccttgttgtacccagagcaccatgctccccgccagccccctgtccacccctgcttagttatacagccattgtccgttttgtgtagaacagtggctttcaagcttttgtcaccatgatccatattttaaattgcaaccctgttccctatgatacctatctgtctatgaatgaaacaaaggttttaca

SEQ ID NO: 49730 - DNA, 339 bp, Homo sapiens
catgagccacgatgccaagctgatttttctttattattataattgatttattttttagagataggttcttgccctgttgcccaggctggagtgctgtggcatgatcatagcttactgtagcttcaaattcttgggctcaagtgatcctcctgcttcagccactcgagtagttaggactacaggcacccaccaccatacccagctaattaaaaaaaaattgttgaccgggtgcggtggctcacatctgtaatcccagcactttgggaggctgaggtgggcggatcatgaggtcaggagatcgagaccatcctggctaacacggtgaaatcccgtctctac

SEQ ID NO: 49731 - DNA, 278 bp, Homo sapiens
agagtgaaggacacagcttttaacatcaggtagagaattttgttgagtctttagtaggtcagcctttggaaaatacttctctaaatttctatacattcgggctaactcattagaggtcaggcctggaagatgagatcatctgtttcttcaagaggaggacctctgcttctgtcaaaacagctgagtcaacagggcgtggtgtctcatgcctgcaatcccagcactttgggaggctgagatgggagggtcacttgagctcaggagtttgagaccagcat

SEQ ID NO: 49732 - DNA, 421 bp, Homo sapiens
atttttttgtgaccagaagtatgctgtaggaacttaactattgtttatatcagttagcctatgctaaaattggttttgttacatgtcattttgctttaactcttagtttccaagaacccatggttgacgttaagacttagtgtatattcatgtatgttatattcaataaaaagttttctgttaatatacttgatttgatataaacatgagtaaaatagttaaattccattaaaaatagtaaatgagtctatttcttctatgtagatggagtaccacttacagaaactgttgaaaagtggcttcacaaataacatcattgtcataattataatttttgatttgcttagcaaatcatgtggcaccccactaccaccactgctgcgttgtatgtctgtgtgtgtatacattgctaagagattct

SEQ ID NO: 49733 - DNA, 419 bp, Homo sapiens
ttaagggctattgactgacaaacacacccaacttggcgctgccgcccaggaggtggacactgggtttctggatagatggttagcaacctctgtcaccagctgggcctctttttttctatactgaattaatcacatttgtttaacctgtctgttccatagttcccttgcacatcttgggtatttgaggagttgggtgggtggcagtggcaactggggccaccatcctgtttaattattttaaagccctgactgtcctggattgaccctaagctccccctggtctccaaaattcatcagaaactgagttcacttgaaggcctcttccccacccttttctccaccccttgcatctacttctaaagcagctgttcaacagaaacagaatgggagccacacacataattctacattttctagtt

SEQ ID NO: 49734 - DNA, 404 bp, Homo sapiens
agctggtctgggtccagggtcccagtgctgatattcttccaagaccataggccataagggcctcagtcactgggagggagtagactaaggcaccatggaggcagcagtggaactttatttttgaaagtttatgtaaaggccggttgccgtagctcacacctataatcccagcactttgggaggcagaagtgggcagattgcttgaacccaggagttaagcatcctgggcaacatggtgaaaccctgtctctaccaaaaatacaaaaatgagctaggcatgatggcctgtgcctgtagtcccagctactcgggaggattgcttgagcccagtaagtcgaggctgcagtgagccatgattgcaccactgagctccagcctgtgcgacagagtgaaactgtctcaag

SEQ ID NO: 49735 - DNA, 449 bp, Homo sapiens
aaattgacaaatactaaacctcccgaaaacctctttggaaagatagtcacagatgtgtctgtggctttgtttttccccggcaggtcctacagctggcttagtaaacctcaatgactgagacttatgcctgagtcactcattttggttgtcaagtattaggaaatactaagaaataactggtattttgttcagtgtgataatagtattgtggttttgaaagaaaatatttttattttaaaatatatttagcaaagcattttgaggtgaaaagacataattacaggaatttgctttagaattgtaactaaaaaaacagtgatagatgaattaaataggctaaacagtgttaattattgaatttgggatatcagtatatagagttcattttactattctctctacttctatatatgtttgaaaactttgataataaaatgtaacaaactaca

SEQ ID NO: 49736 - DNA, 607 bp, Homo sapiens
tccccacgggtggaccaaacacctccaaagagatttgggttttatcaagagtatagcaacgtatttattttttatttttattttattctttgagatggagtctcgctctgttgcccaggctggagtgcagtggcgtgatctccgctcaccgcaatctctgcctcccaggttcaagtgattctcctgcctcagcctctgaagtagctgggattacaggcgtgtaccaccacgcccagctaatttatgtatttttagtagaaatggtgtttcaccatgttggccaggctggtattgaattcctgggctcaagtgattcacccacctcggcctcccaaagtgctgggattacaggcgtgagccaccgcgccaggcctttattttatttttttaacatattgtaatgtagaaatgcccgggcccagaacactacagggaaaaacaagaatcctctcaaatttccacaatgcccccagggcactcacccagagaatggatctgattctgttactctcttccctcatctctttccattttcttcaatttttttaaatataaagagcttgtattatttttaaacaaagaataaagttattttttaaacgttggg

SEQ ID NO: 49737 - DNA, 810 bp, Homo sapiens
gcatgactcatcagggcactttgtgaagagtgaggcgatcttgagggcatgttcatcttcatcaaacatggagataatcagcagtttctggtcaataccaactgtgctgtcgtcgtgttgctgtattacatccgcagtaaagtaaagttgcctaaaacaagtgaggagcttagggaggggactaatggccaaaggtcagaaggagttgggtcatctctaacccccaagccctcctcctggcaagaagggagttcctcatatccttagagcttcctccaacccattttgtataggatcactggccccttttgctcccactctctttccttagctgccccaattaccctgtgatctccctccagacaccatcgatttgtgtgaacaaacggggaaaatgaagatgcttttcctgatgaagcccaatcatgcagagtatgccagcaaataccttacagctcgaagcacctactacgtttgtaaggtggaacgtgggccaccaggaaccaggctggagaatgcttacagagcttttgtgcctctcctcaagaatccggagccttggctgcttgttgcactgcgcatacaatgtgatgccctggagaggagacgaattcagatgcttaaaatgaaagaagccaagaaggtcgttataattgaaccccctgcgagtgtcccgtccaagcaatcaggacgatcagacaaaaagaagtccactcgcaagtctccgacctttaggaacagaccagacttcaggaagaataaaggtcgccaactcaataaaaccaccaagcaaaagaagtaaaaataggt

SEQ ID NO: 49738 - DNA, 608 bp, Homo sapiens
gcatgactcatcagggcactttgtgaagagtgaggcgatcttgagggcatgttcatcttcatcaaacatggagataatcagcagtttctggtcaataccaactgtgctgtcgtcgtgttgctgtattacatccgcagtaaagtaaagttgcctaaaacaaacaccatcgatttgtgtgaacaaacggggaaaatgaagatgcttttcctgatgaagcccaatcatgcagagtatgccagcaaataccttacagctcgaagcacctactacgtttgtaaggtggaacgtgggccaccaggaaccaggctggagaatgcttacagagcttttgtgcctctcctcaagaatccggagccttggctgcttgttgcactgcgcatacaatgtgatgccctggagaggagacgaattcagatgcttaaaatgaaagaagccaagaaggtcgttataattgaaccccctgcgagtgtcccgtccaagcaatcaggacgatcagacaaaaagaagtccactcgcaagtctccgacctttaggaacagaccagacttcaggaagaataaaggtcgccaactcaataaaaccaccaagcaaaagaagtaaaaataggt

SEQ ID NO: 49739 - DNA, 358 bp, Homo sapiens
caactatcaacagctctctcctgcctgtccagcctgggcatcctcagcctatgaaatccatctgcctctctagtccaccaaccctataggcctatttgccccacacaaggcctctagaacaccctccttctgcatgactcatcagggcactttgtgaagagtgaggcgatcttgagggcatgttcatcttcatcaaacatggaggtgaggggcagcacagaactagagtctgtggatgggggtggagggatctgagggcagtggagatcacagaaatgggcccatgtgtcccatcctatctcttctcagataatcagcagtttctggtcaataccaactgtgctgtcgtcgtgttgct

SEQ ID NO: 49740 - DNA, 333 bp, Homo sapiens
  misc_feature (24)..(24): n is a, c, g, or t
cccctgcgcaaggatgacacgcanattcgtgaagcgttccatatttttgtctctagttctcagaggtgcaggtgccttttccttgttcttagttgcactgcgcatacaatgtgatgccctggagaggagacgaattcagatgcttaaaatgaaagaagccaagaaggtcgttataattgaaccccctgcgagtgtcccgtccaagcaatcaggacgatcagacaaaaagaagtccactcgcaagtctccgacctttaggaacagaccagacttcaggaagaataaaggtcgccaactcaataaaaccaccaagcaaaagaagtaaaaataggt

SEQ ID NO: 49741 - DNA, 799 bp, Homo sapiens
ggagagttaattctgcagatctcagtttgctattgttttggctgttctaaggcactgctctcgatcactgaattgtcagcccttccatactgggtagcttaatttctagaccacttcagcatcctatctctcacccctggtaactcgtaagtaatgccttttttggtgaatggactttatttttatacgtaacctgctccagctttccttggttgtttcccattgttcatttctctcccataacactgaaaacagggtttttttttgttttttttttttgccttttggtacacaaaagccagtcctgatcgagacaagctctattttgttttttaaatacattttattgtgtatatttgaggtttacaacatggtagtttgggatgcatagaaataataaaatggttactgtagggaagcagatttacatatctatcattctcacacaactactttttgtgacaaaagcagctaaaatctacttagttaacaaaatccctaatacaattttattaaccttagtcctcatgttatacattaactctctacacttgttcattctgcatatctgctattttgtatcctttgacctatatctctgtttcctcctcctgttccctaccatggtcgccatgttttattctctgtgtttttgagctttttcttttatatatattctacatataagtgaaatcacttttctttctgtgtctggcttatatcatctagtataaggtcttccaggtccatccatgttgtgacaaatagtaggatatcgttttttaaggctgaataatat

SEQ ID NO: 49742 - DNA, 283 bp, Homo sapiens
ggaatattaaaagtagatccagtcacctaatgtaataacccaaatatccaggtttcaatgaaaaaaacctctcataccaagaagcaggaaagtgtcagctcaaattagaaaagacagttaatacatgctgacactgaaataacacagatactagaattatttgacaagaatttttttattgtactttaagttttgggatacatgtgcagaatgtgcaggtttgttacataggtatacacgtggcatggtggtttgctgcacccatcatcccgtcatctacatt

SEQ ID NO: 49743 - DNA, 409 bp, Homo sapiens
tctgcaaggtgttatttaccaaagaggtttgtaaaccagatgtctcttctcttgaacactaatgaataaaatcttgtattttttggctttctcagctaatcattacttaaaccttcagcttaaaaactggggaattgaaatccctgtggctggctagtcctctgaaggctttgtgatgatgtcactctcagatcgggacagaagcattcaagagagggataatactcttgcttatgtgacagctgtatgtgtccaagagcatttggctacattcagtgatttgatggccttgttctgattacagagctctttgctatcttcttcctttgcattgaattttgtcaaatttcccaggtattctctgaagaaagttcctctttagttgtcaatcaccacctgtccatcagag

SEQ ID NO: 49744 - DNA, 426 bp, Homo sapiens
gagaatttggtttctgggatttcgtgtaattgttttctgttatatacaatttttatatagttgtcactagtttgcacataattatttcctatttgacatattaacatgtgtcacatggaccatatacttgcatgatacattcatttccttaattattccagttgtatttgcattctagttttccacttacttaggatctgactttccattagaccttcagttcctcagaggcagagaccatgattgtattctttatgatgtccctgggcattgttggtatctggggtcattgcagaagaagaattaatgtatgctattaaagtcagctctctgtatccatgggattccacatctgtgggattcaaccagcctcaaattgcaaatattaaaaattgcatttgtactgaacatgtagagtattttttc

SEQ ID NO: 49745 - DNA, 799 bp, Homo sapiens
ggcaggcgttgcccagtccccatcttgtgttttacgaagccacagtgaacatcagggccatttctttattgctaggctgcatgtatgtttccagcccaaccagcttcaaatccctgtattcactgtggctgtttgtctaacgccgcagacgtccagacctctcatctttctggtgcacgcgtgaagctggagaccgtgctgcacatgtgtcattctcgcccagcctgtcacccgccagctcaccgccaacctgagggccccgtgttcaggcctttgtgttacaaccttgtgctcatttgctaattactgagacagggagccagtacttgtttattcctttgaaaagtttcttaggacacagtgcttcattgaaaaaaagagggcatgaagcgtttataccggcaggtgcttcattgaaaaaaagagggcatgaagcatttataccggcagacctgtttgctgctttttagctgtgttaaaacttggtctacaaaatattctatataacatgaggaaggaaatgacattcccctttttcatttaagaaggaaatattgggcattaattctcagtattctttatgaagtgaaaactttaaaatgaaatcacaatagaggcttttttttgttttttgtctttctcctttcagcatttctgtaccaagcgaggcttggggcgtgacctcgtcctccctgcatcgtcctggctggtacaatccacgctgggacccggggagagggccctacttggagagggttctcattcctcctgtgccatgtaaaatctgctttcccatctg

SEQ ID NO: 49746 - DNA, 405 bp, Homo sapiens
ttgaaaagaactttgaagagagagttcaagagggcatgaagcatttataccggcagacctgtttgctgctttttagctgtgttaaaacttggtctacaaaatattctatataacatgaggaaggaaatgacattcccctttttcatttaagaaggaaatattgggcattaattctcagtattctttatgaagtgaaaactttaaaatgaaatcacaatagaggcttttttttgttttttgtctttctcctttcagcatttctgtaccaagcgaggcttggggcgtgacctcgtcctccctgcatcgtcctggctggtacaatccacgctgggacccggggagagggccctacttggagagggttctcattcctcctgtgccatgtaaaatctgctttcccatctg

SEQ ID NO: 49747 - DNA, 533 bp, Homo sapiens
ttttttttaggggagacggggtttcaccgtgttagccaggatggtctcgatctcctgaccttgtgatccacccgccttggcctcccaaagtgctgggattacaggcgtgagccactgcacccggccaagctttacaactttatttttagggacagggtctcacttttttgcccactactgcagcttccaggagaaaaagttattcgcctctgccgtggaatattctatagcctaatccacgtgagcaaaagacacaactctaccaagatataaaatgtgtactacatatacagtcgtgagcactaggctgtgacctcgaatgccaacaactatggccaaattactgacagacataagcctgagaactaagccagacactcaacagaaacaagcctcccttttcagagacattttctaaaaccataaaaataagagacaaaaattaggacatattcaggtaacaagagcttccttcccccagataatttctgttgtataaaacccagagattaaaaacaacgatattggattag

SEQ ID NO: 49748 - DNA, 419 bp, Homo sapiens
aaaagatggtatagcaacataaaatttacaagaacattatagctggactgtataggaagagcttgactgatttctttccacaatgcattttcatcaaaactcatacatattcagagatacaaatagcataccagtgaattcaatgaactgccactgaaaccaaaacattatttcctagcatctgtttgtgggaattatgtaaaatacttaatgcaatgtgttttcattgcaatcctatttttgtttcccaagcagtgaattttcatttaaaccaatatgtttacctgagacccacacacatgcatttattggaactgaaatacagctacagatacaggcaacacgtctgaggccaaaccaatgcattttgatgcaactcagccaattttccacaacatgtgttctgattctctagggat

SEQ ID NO: 49749 - DNA, 538 bp, Homo sapiens
  misc_feature (530)..(534): n is a, c, g, or t
  misc_feature (536)..(538): n is a, c, g, or t
gcgccctggcagtcccggaagacaccaggaaaacaagcagaaaccgtagctaggactggggtggccaggcccaggaaatccatgaaggggacagacagcgggtcctgctgccgccgccgatgcgactttggctgctgctgtcgcgcgtcccgccgggctcactacacgccttaccggtccggggacgcgacgcgaacccctcagtccccacggcagaccccgagccgggaaagacggcgcccggagccagccgggagctgagcagcagcggccgaggaggaagaagcagctgcggcggccacaccctggatgagagctggagccctgcctgatggctggatggaggccatgcaggacaagttccttctaaaatcaatcctttgctttggcctggaagaccgaacatattaggctcaattttcttcgtgtagcagcggtaacataaaaatctgtcatacatacgatttttgggagaagagatagattgtgctgcaggccttttagaaataaacatgtcctcatcacagcannnnnannn

SEQ ID NO: 49750 - DNA, 504 bp, Homo sapiens
aaaagtataaaatgttgccttaagaactagatcctgctttgacaccagtcccaaatatcatcctctagatagaaaatcaccgaatctttctgctggatatcaggaaaaataattagaaataccaattaatcccaaagaagtgtagaaacatctgcattaaaacaaaaagatcgttctgtgtctctttctcctccatgacaggtaactgaatggttcacatcaggtaagcagaacatccatgtcccagacagcagggcggggaggagccctcaccaggaagagtgtctctcagctgtgatcccagcactggggctgaggatggaatcactgctgactcactagcaagcaccaagctgctggctgagctatcatttcctataactcattcatctgacactgcagaaagcaatttctccccatgccccaccccctaccactctaatcctcccaaaataaagccctaccactaactgcttcctgtctctgcataaagctgtatttctg

SEQ ID NO: 49751 - DNA, 1794 bp, Homo sapiens
gcgggtcctcctgggagtctcggaggggaccggctgtgcagacgccatggagttggtgctggtcttcctctgcagcctgctggcccccatggtcctggccagtgcagctgaaaaggagaaggaaatggacccttttcattatgattaccagaccctgaggattgggggactggtgttcgctgtggtcctcttctcggttgggatcctccttatcctaagtcgcaggtgcaagtgcagtttcaatcagaagccccgggccccaggagatgaggaagcccaggtggagaacctcatcaccgccaatgcaacagagccccagaaagcagagaactgaagtgcagccatcaggtggaagcctctggaacctgaggcggctgcttgaacctttggatgcaaatgtcgatgcttaagaaaaccggccacttcagcaacagccctttccccaggagaagccaagaacttgtgtgtcccccaccctatcccctctaacaccattcctccacctgatgatgcaactaacacttgcctccccactgcagcctgcggtcctgcccacctcccgtgatgtgtgtgtgtgtgtgtgtgtgtgtgactgtgtgtgtttgctaactgtggtctttgtggctacttgtttgtggatggtattgtgtttgttagtgaactgtggactcgctttcccaggcaggggctgagccacatggccatctgctcctccctgcccccgtggccctccatcaccttctgctcctaggaggctgcttgttgcccgagaccagccccctcccctgatttagggatgcgtagggtaagagcacgggcagtggtcttcagtcgtcttgggacctgggaaggtttgcagcactttgtcatcattcttcatggactcctttcactcctttaacaaaaaccttgcttccttatcccacctgatcccagtctgaaggtctcttagcaactggagatacaaagcaaggagctggtgagcccagcgttgacgtcaggcaggctatgcccttccgtggttaatttcttcccaggggcttccacgaggagtccccatctgccccgccccttcacagagcgcccggggattccaggcccagggcttctactctgcccctggggaatgtgtcccctgcatatcttctcagcaataactccatgggctctgggaccctaccccttccaaccttccctgcttctgagacttcaatctacagcccagctcatccagatgcagactacagtccctgcaattgggtctctggcaggcaatagttgaaggactcctgttccgttggggccagcacaccgggatggatggagggagagcagaggcctttgcttctctgcctacgtccccttagatgggcagcagaggcaactcccgcatcctttgctctgcctgtcagtggtcagagcggtgagcgaggtgggttggagactcagcaggctccgtgcagcccttgggaacagtgagaggttgaaggtcataacgagagtgggaactcaacccagatcccgcccctcctgtcctctgtgttcccgcggaaaccaaccaaaccgtgcgctgtgacccattgctgttctctgtatcgtgatctatcctcaacaacaacagaaaaaaggaataaaatatcctttgtttcctaaaaaaaaccacaccaacatccaccacacacaaaccctgcgaggcctttatgccgggcggcgcaaacaagaggctctcccacccgcccccgggcccatacactgttcccgtaacccccgttccggtccccccagggggacccc

SEQ ID NO: 49752 - DNA, 587 bp, Homo sapiens
ttaaaaaaaaattatttgtttagggtctgtccctcccagtaaactgtagcttctaagacagactttgtttttgttctctgctatattgctctattcccacgtcctaaaacagcgtctgaaccatagaagtcactcaataattttctttttcttttttagtaattctagtgacccgactcaataaatttttttaaataaatgcatgagaaattgacaaattgtaacaagtccagaagaacaatagcaggttactgaactgccacatcaaataaggaacccttgaagaaagtaagatgtttaatctggagaagaaaagattgctgggcacggtggttcacagcctgtaatcccagcactttgggatgctgaggtaggtggatcatgaggtcaagagatcgagaccatcctggccaacatggtgaaaccctgtctctactaaaaatatgaaaattagctgggcctggtggtacgtgcctgtagtcccaactactcaggaggctgaggcaggagaatcactttaactgaggaggcagacattgcagtgggccgagatcacaccactgcactccagcctggcgacggagcga

SEQ ID NO: 49753 - DNA, 446 bp, Homo sapiens
taaaaatgctagattgaaaataaaccaaggctggttagacaaagctggttacagagttatgatagcagggctgtcatactagttttgaaaatgtatagtgcactgagatcaaaaagatgtccttgaataatattggtaacaggctaacctttcttcatctgtggtatcaggaaattacagggagttacagggaactgaacactctgccatatttaataaacattaaatataaatttggtagtatatttattattctttcccaaatctttacaaaattgttgtgagtagattttcctttagtaagaaagatttctccaattaaagttttagtaacaccttgctaattggtaaggcttattggtaagactaattcgtgaaaaattaaattctagagtgtgttgaccaaaatgtagtttttaattttgaaattgtgataaaataagtcc

SEQ ID NO: 49754 - DNA, 178 bp, Homo sapiens
caatcaacttatagggaattcaaaggctttttcagccaaactaaaatttaaactgctcctttaatttgaactgactctaaaaatgaaaatagtatttttccctttgtgaacaaattttacaaggagcagcctatttaataaacactagctttaaacaaagtataggcttttcagctga

SEQ ID NO: 49755 - DNA, 528 bp, Homo sapiens
gaaattgttgaaagctgcatgctggcttggcagaacaaataaactttcatgagagtgagtgctgtttaagcatcgatgcagctctgagcttcctattagaagagcaggtacctaccattccttcagatagaagtgctatttaccagcacgccacaacttctccctggagactctgtgtggcggacaccatataacacagtgaacagtgtcctcaatttgagttttcaagaaatgcagaggccacttaccaatagctatttcttccaacagcctctagtaaaacccagaagcataatatgatgctgtgtctcaggggcagtctttctgccagagaataagctaacaggggctggcgattcagtgtgtaggactccaaaccatcagtatgaatttttttcctgagctttgagaagggcagcattatcctcagcccctggggaatggaggttgagtagtaagtggggatgccatgctgggatattaggactaattgtaaaagcagccttgtattgacccagccctgggaag

SEQ ID NO: 49756 - DNA, 436 bp, Homo sapiens
tggtagaagtttttgagagctattcttgagagctggtgctgcctaaaaggtctcaattggattttaagttctaattttgtaagtctgtcaagctccaccacccatgaagaggaaggccagtgaacactgaaatattatcaacagcagtgtttatttaccatgctcctagaaggttaacaaaatacatagccacagggccgggcgcggtggctcatgcccgtaatcccagcactttcgaaggccgaggtgagcggatcacttcaggtcaggagttctagactagcctggccaacatggtgaaactccgtctctactaaaaatgcaaaaaagttagccaggcgtggtggtgggcacctgtaatcccagctacttggaaggccgaggcaggagaattacttgaggaggatggaggttgcagtgaggtgagtgagactct

SEQ ID NO: 49757 - DNA, 437 bp, Homo sapiens
tctcaaaaaaaaaaaaaaaaaaaaaaaaaaaggatttgatgtaaaccacacgaagaatcaacacaagtataatcataatgattgttgcagctaataattcattagagaagtgattatgttaacaacagaaacgtcacagttgattgactactgattgcattcacatgaaggtccagtacttttgttggtgtaatattgccctctgatcttttacaaaatctgggatctgaatcattcacatcttgagctgtacccaggaagttacatgctacattcacatttccaatggttaaaaaaaaaaaaaaaaaaaaaaaaggtatcttctagccacatctttccctcttttaagacagttcccgaagttcttattgtcatttgcatttcatttccatggcttttagtaagcttagtatttttgtttcttgtttatccgtcag

SEQ ID NO: 49758 - DNA, 327 bp, Homo sapiens
agtatatcacaaaaaaaagggcacgtgggtataaaaaaaaccccccctccccccccccaaaagagccccgttttttgaaaacaacggaaaagagttcaacggctggcgccacatccctcagaaaatgcgcggcaaaaagggggaaaaaaaaaaaaaaaagagcccccggggtcccaaaaaaaaaaaaaaaaaaaaaaaaaaaaaaggtatcttctagccacatctttccctcttttaagacagttcccgaagttcttattgtcatttgcatttcatttccatggcttttagtaagcttagtatttttgtttcttgtttatccgtcag

SEQ ID NO: 49759 - DNA, 253 bp, Homo sapiens
gttatttgtagctgccacaaaacacagatcacaccaagtttagtgtccactgatatctggaagactttaagggtattacattttaagtgctattaggatcttgagtaatcatcaaataagaaaatgggtattaaaatgctttgtaaactgtaagttaagataaaagtggtattcctgatgttaaccactctcaactgagcttagatttctagtatataccagcttgggtgacatagtgagacctggtctctac

SEQ ID NO: 49760 - DNA, 725 bp, Homo sapiens
gctttattcatgtgttagtcaagatcgagtgaagtaagaataaaacactctagataaattgaacaggaaaggatcgaatatagggaattacctgcttacacactgttcgagaaatttgggagtcaaagtcaaggatacttttgttggtatcaagaactcagaaagtgcagcaaaggcaagaaatgactacctaatatcttagcaacctagaacacttaatggggtcattctcaggaagatgcttggaagacaccaacaaaacactacatatatattaatgcccaaacgtccgactccagctgctgccagtgaataatgtcttctctttctcttcccctaccagggtttctgtcagtgatggtcattgggcagaatatgaatgcaaaccctacttgctaaagaggagctggggaaatgtttccagactttcagccctagtgatactggggagagttttgaagggcaaggacagaactgaatacaagagatgctgtcctgcttactcagcttaattcctttccttcaaaacaaaaacaaaagcacttgcttctcagaaggattctgttaatctatttatttacaccaaggtattatggaccaacaataccttcaaatgcatttttttcccccaggacaatttgtactttcacaagaacaaagatttgatttaaagaagcgaatccatctaattgacaactggttggaacagggactcactgacaaca

SEQ ID NO: 49761 - DNA, 399 bp, Homo sapiens
gtttaatctcataacacatactgcaaaagactggcaagtatgatagtaaaagtgattctctgaaaattagtgggcatttcaaactaaaaattattttttaaagtgtactggagataaaactggagaaataaagtactgaaactttattggaaagtgcatttaacatgagtaaaaatacatggttaatactaaagcatccaattatgttggatacttttttgtaaaactagtaactaccctagagaaaagaaagacatttttaactgtaaaatacattcattttttctttgatccaataaatatttattgagtgtctactatatgcaaagcattgacaaaaacacactgcttaacctcatggagtttatagacttttaaggaagacagttgtctaaaaag

SEQ ID NO: 49762 - DNA, 310 bp, Homo sapiens
aaaactggatgtttgatattacaagaaactttcttgtgactccaaaatggatttttttaaaacagtagaataaggagagaagtctcatatagctagtagtatggattataacatttttttaaacaaacaaatctttcctaaaagcagtttcccctcaatatctctaaatcctgaacgcggcatctgtgattctgcacccccggctgggatactttcatgaaggactgttttagacagggattttgtcatcaagagaagaaagaacaggacaacatcagcattacagccgaaacgcaaaccatctcaaaac

SEQ ID NO: 49763 - DNA, 840 bp, Homo sapiens
tacttttccacaggctcggcttgtgcttgtacatctgattccaagatgtgttgcacatcttttcagatgaccttcagcaaaatccattttattttcttgtctttctggagtgtgactttgtaagaggatgtgattcctgtgttttcagagtcaagattcctttttgcagagaaatgtgatgttgtgaagatccaggaacagactgtctcacccactttgttctttgtctctttccttttgtgtttatatcttccctttcgcaactcacaaatccttggccactgactctttagtgcctgtctctgtgtctcgtaccttcgctgtcagcagaggggactctctggcaggctccccagtaaaccggtccccttctcgctgcagtgggttgaatcgctctgagtctccaaaccgagagcgcagtgactttgggggcagcaacacccagctgtacagcagcagcaacaacctctacatgcctgactactcagtccacatcctcagcgatgtgcagtttgtgaaggtaactcccccaggaaggttatcctctccctcccagtgggcagtgttggctggctgagcgggacaagaagactacccccatttctagaagggatgtgtgcaccattcccctgtgttccaatacagtgctgggtggtaactgctactggctgtataaaggctgttttcagtaagctttaggacggttcattatttgtcactcttttaacatctcctgacccccttttttcatgtggggaaatgaggcacaaagcaatagattagcttgcctgacacaaattgctgccagaaccatttcctttgcatcccctaccattggca

SEQ ID NO: 49764 - DNA, 3855 bp, Homo sapiens
tacttttccacaggctcggcttgtgcttgtacatctgattccaagatgtgttgcacatcttttcagatgaccttcagcaaaatccattttattttcttgtctttctggagtgtgactttgtaagaggatgtgattcctgtgttttcagagtcaagattcctttttgcagagaaatgtgatgttgtgaagatccaggaacagactgtctcacccactttgttctttgtctctttccttttgtgtttatatcttccctttcgcaactcacaaatccttggccactgactctttagtgcctgtctctgtgtctcgtaccttcgctgtcagcagaggggactctctggcaggctccccagtaaaccggtccccttctcgctgcagtgggttgaatcgctctgagtctccaaaccgagagcgcagtgactttgggggcagcaacacccagctgtacagcagcagcaacaacctctacatgcctgactactcagtccacatcctcagcgatgtgcagtttgtgaagatcacacggcagcaatatcagaacgcactcactgcctgccacatggacagctcacctcagtcccctgacatggaggccttcacagacggggactccactaaggcccccacaacccggggcacaccccagacccctaaggatgaccccgccatcacgctcctcaacaacaggaacagcctgccgtgcagccgctcagacgggctgagaagccccagcgaggtagtgtacctgaggatggaggagctggccttcacccaggaagaaatgactgacttcgaggagcacagcacacagcagctcacgctgtctcctgcagccgttcccacgagagcagcatcagatagtgaatgttgtaacatcaacctggatacagagaccagcccctgcagtagcgattttgaggaaaacgtgggcaagaagctgctgagaaccttgagtggccaaaaaaggaagaggtcaccagaaggagagagaacctctgaggacaactccaatttaacacctctgatcacatgacagggcaaagccagcattcactgggtgtgtgaaattccagagctttgggggagaatccaccctcccatcatctgcttcccccaaggcctcccacaggtgacagaatgttctgccttcccttccatctcttcacccctagctgtcagtttggcagattttccctcgttacctccagttcgactcagaaccttgacatggccataacagaaggaggtgcctctgatagaacatgctagaaatggtcttttccacagcatagtctgggactggaaaagagatgtctgactgcaagctgacaatgccactctgggacccctgatgctcttctttgttctttgggtcccctgatgccataggagacctatcgtcttggaacttgccattctttcctccagaacaaaatgttaactttctaacacatttcatgcatagcttggctcagaaggtgccattggcagacaggcacatgggaggctggagtaggaggtctgaagattagttcaggggatggaccaagaatttcccccagagctttaaagaagtgggactcagccatgttggcgcgtgattgacattacagcacagaaaactgttagtgactggtttcctgttagataagggttccagcagcctggggcagtatgtctcagctggaatggaaagaatgtgagatggaacctcaagtcactgtttttaccagggacacatctgttttggctcccaatcagcagtcttcaatcgatcaataattctgctctggaagagaaggaacagggagcagagagacccaactgggagccagagatggaacttcaggtcttaagtgcaaatcaaagcaaaaaacaaacaaaacttacatggaaaaactgtaagtgctgaaagcaagtttagccatgacaaaccaaagagtgcccaggtcagccaagaaagatacataatctcatgggacttcagtgggagttacacaggaatgttgaagaatcattcttctttttcatgcatttgtccttctcccacccccttactacaccctagcagatcagctgagtgtactttattccaagaacttactggatctctggtttttctcctgaagttggggcaggtgcaattccaagcataaccaccagatggcagagtgaccgcgcatacctgcttccaagaataaaacagttctgaaaagcaaccgcaaagccgggcgcggtggctcacacctgtaatcccaacagtttggaagaccgaggcgggtggatcacttgaagtcaggagtttgagaccagcctggccaacatggtgaaacccccatctctcctgggcatgtagtcccagctactcgggaggctgaggcaggagaatcgcttgaacctgggaggcagaggttgcagtgagctgagatcacaccactgcacttcatcctaggcaacagagcgagactctgtctcccccctcaaaaaaaaaaaagaaagaaagaaagagaaaagaaaagaaaagcaaccacagccagccttagggaaaacttggaagtaagtgaaatttgtcttcagaataactatctccctttctgatctgtctcctactctttagatgttctcagtcaagtactcactgaactcattgatcgagtgctgtctgctaaatctccaaaccattcccaaacctttccccgtagtataccatccagcttccctccccttcctccaaaaccctccctcccacctccccacacccattgagtcattcacaggcaggagggagactgatcattcctctgggttatctgcatctcaaaagaaaatgcttacccacaggaactgttaactcaggggttcttaacttggggtccatcaccccagggggtccatagttggacttcagagggtctatgaaacccctaaaactgtcagtatttaatgtatttattcttgtatgttttttccagagcattaaagctttcataaggttctcaaaggtctcagacctacaaagagttaaaacaaacagacaaacaaaaaaaaacactactattttaaatagtggaactttcagcccagcgtttctgcaatgcagagtgaagtggatactgggcagttcgagacaggtttttaatcataagtggtcttttcaaatgtccatcaattgatggggaaggctggcacccaccaagaagtggaagtcctcagaaattctcggcacaccctagagtattgtacaaccaacacccccacataactttgtcccctcttccccaacaacccagagcaggtgttgcagacaggagggccacagcgtgtggaagtaaagactttggagctagagatgccttttccagcaatgattattgacttcaccacaccccttgcctggcctggcctgaggctcagcagtgcatgacttctcgtagataacttcacagtcatccagtcccaacacctgctcttgcctggtaggaacaggcgaagtgtcagccctcaatgttgggtacttagacccaaaccaataaatggtgagttttgaacaagaactaccatcatgcaggcttcttgcccagctgaccactggccccggggtgcctgcctggctggtcttcatcacctgaggccaccaggctcaagccactgctgttgcattacacccatccctttgcaaaatccctatggagcctgtcaccactcccctccctatatacccccaccccacaaagattttcttcaggttaaaaaaaaagtttaaaaaaaagattttaaaataaagcatttatgaaggcttaataaattgtaaataatttttaaataaaatgaaaatgcctttcctggaatgtg

SEQ ID NO: 49765 - DNA, 4787 bp, Homo sapiens
ctggctggctggctgtacacctcgctgccgccgggcttcgggggcaccggggaagactacagcgaagaggggatccacttcccgtggctgccggcgctcgtgtgcaccggcgcggtattcctgggcgccgaaatctgcccctactcagtgtgttcgcggcacgggctggccatcgcctcgcacagcgtgtgcctgacccggcttctgatggcagccgccttccccgtgtgctacccgctgggccgcctgctggactgggcgctgcgccaggagataagcaccttctacacgcgggagaagttgctggagacgttgcgggccgcagacccctacagtgacctggtgaaggaggagctcaacatcatacagggtgccctggagctgcgcaccaaagtggtggaggaggtgctgacccccctgggagactgcttcatgctgcgctcagacgcggtgctcgacttcgccactgtctccgagatcctgcgcagcggctacactcgcatcccagtgtacgagggtgaccagcggcacaacattgtggacattttatttgtcaaggacttggccttcgtggaccccgacgactgcaccccgctcctcactgtcacccgcttctacaaccggcccctgcattgtgttttcaatgacacccgactggacacggttctggaggagtttaagaagggaaaatctcacctggccattgtccagcgggtgaataatgagggagaaggggaccctttctatgaggtgatgggcattgtcacgctggaggatatcatagaggagattatcaagtcggagatcctggatgaaactgatctctacactgacaatcggaaaaagcagagggtcccgcaacgggagcggaagcggcatgacttctccttgtttaagctttcggacacggagatgcgggtgaagatctcaccacagcttctgctagccacacaccgcttcatggccacagaagtggagccctttaagtctctgtacctttcggagaagatcctgctccggctcctgaaacatcccaacgtgatccaggagctgaagtttgatgagaagaacaagaaggccccggaacactacctctaccagcgcaaccgccctgtggactactttgtgctgcttctacagggtaaagtggaggtggaggttggtaaggaaggccttcgctttgaaaatggagcctttacttactatggcgtcccagccatcatgaccactgcttgctcagataatgacgtgcggaaggttggaagtctggctggatcttctgtctttctaaaccggtccccttctcgctgcagtgggttgaatcgctctgagtctccaaaccgagagcgcagtgactttgggggcagcaacacccagctgtacagcagcagcaacaacctctacatgcctgactactcagtccacatcctcagcgatgtgcagtttgtgaagatcacacggcagcaatatcagaacgcactcactgcctgccacatggacagctcacctcagtcccctgacatggaggccttcacagacggggactccactaaggcccccacaacccggggcacaccccagacccctaaggatgaccccgccatcacgctcctcaacaacaggaacagcctgccgtgcagccgctcagacgggctgagaagccccagcgaggtagtgtacctgaggatggaggagctggccttcacccaggaagaaatgactgacttcgaggagcacagcacacagcagctcacgctgtctcctgcagccgttcccacgagagcagcatcagatagtgaatgttgtaacatcaacctggatacagagaccagcccctgcagtagcgattttgaggaaaacgtgggcaagaagctgctgagaaccttgagtggccaaaaaaggaagaggtcaccagaaggagagagaacctctgaggacaactccaatttaacacctctgatcacatgacagggcaaagccagcattcactgggtgtgtgaaattccagagctttgggggagaatccaccctcccatcatctgcttcccccaaggcctcccacaggtgacagaatgttctgccttcccttccatctcttcacccctagctgtcagtttggcagattttccctcgttacctccagttcgactcagaaccttgacatggccataacagaaggaggtgcctctgatagaacatgctagaaatggtcttttccacagcatagtctgggactggaaaagagatgtctgactgcaagctgacaatgccactctgggacccctgatgctcttctttgttctttgggtcccctgatgccataggagacctatcgtcttggaacttgccattctttcctccagaacaaaatgttaactttctaacacatttcatgcatagcttggctcagaaggtgccattggcagacaggcacatgggaggctggagtaggaggtctgaagattagttcaggggatggaccaagaatttcccccagagctttaaagaagtgggactcagccatgttggcgcgtgattgacattacagcacagaaaactgttagtgactggtttcctgttagataagggttccagcagcctggggcagtatgtctcagctggaatggaaagaatgtgagatggaacctcaagtcactgtttttaccagggacacatctgttttggctcccaatcagcagtcttcaatcgatcaataattctgctctggaagagaaggaacagggagcagagagacccaactgggagccagagatggaacttcaggtcttaagtgcaaatcaaagcaaaaaacaaacaaaacttacatggaaaaactgtaagtgctgaaagcaagtttagccatgacaaaccaaagagtgcccaggtcagccaagaaagatacataatctcatgggacttcagtgggagttacacaggaatgttgaagaatcattcttctttttcatgcatttgtccttctcccacccccttactacaccctagcagatcagctgagtgtactttattccaagaacttactggatctctggtttttctcctgaagttggggcaggtgcaattccaagcataaccaccagatggcagagtgaccgcgcatacctgcttccaagaataaaacagttctgaaaagcaaccgcaaagccgggcgcggtggctcacacctgtaatcccaacagtttggaagaccgaggcgggtggatcacttgaagtcaggagtttgagaccagcctggccaacatggtgaaacccccatctctcctgggcatgtagtcccagctactcgggaggctgaggcaggagaatcgcttgaacctgggaggcagaggttgcagtgagctgagatcacaccactgcacttcatcctaggcaacagagcgagactctgtctcccccctcaaaaaaaaaaaagaaagaaagaaagagaaaagaaaagaaaagcaaccacagccagccttagggaaaacttggaagtaagtgaaatttgtcttcagaataactatctccctttctgatctgtctcctactctttagatgttctcagtcaagtactcactgaactcattgatcgagtgctgtctgctaaatctccaaaccattcccaaacctttccccgtagtataccatccagcttccctccccttcctccaaaaccctccctcccacctccccacacccattgagtcattcacaggcaggagggagactgatcattcctctgggttatctgcatctcaaaagaaaatgcttacccacaggaactgttaactcaggggttcttaacttggggtccatcaccccagggggtccatagttggacttcagagggtctatgaaacccctaaaactgtcagtatttaatgtatttattcttgtatgttttttccagagcattaaagctttcataaggttctcaaaggtctcagacctacaaagagttaaaacaaacagacaaacaaaaaaaaacactactattttaaatagtggaactttcagcccagcgtttctgcaatgcagagtgaagtggatactgggcagttcgagacaggtttttaatcataagtggtcttttcaaatgtccatcaattgatggggaaggctggcacccaccaagaagtggaagtcctcagaaattctcggcacaccctagagtattgtacaaccaacacccccacataactttgtcccctcttccccaacaacccagagcaggtgttgcagacaggagggccacagcgtgtggaagtaaagactttggagctagagatgccttttccagcaatgattattgacttcaccacaccccttgcctggcctggcctgaggctcagcagtgcatgacttctcgtagataacttcacagtcatccagtcccaacacctgctcttgcctggtaggaacaggcgaagtgtcagccctcaatgttgggtacttagacccaaaccaataaatggtgagttttgaacaagaactaccatcatgcaggcttcttgcccagctgaccactggccccggggtgcctgcctggctggtcttcatcacctgaggccaccaggctcaagccactgctgttgcattacacccatccctttgcaaaatccctatggagcctgtcaccactcccctccctatatacccccaccccacaaagattttcttcaggttaaaaaaaaagtttaaaaaaaagattttaaaataaagcatttatgaaggcttaataaattgtaaataatttttaaataaaatgaaaatgcctttcctggaatgtg

SEQ ID NO: 49766 - DNA, 2720 bp, Homo sapiens
atggaaagcgcctcggaagggcaggaggcgcaccgagaagtggcggggggcgcggcggtagggctgagccccccggctccagccccttttcccctggagccgggggacgccgcgaccgctgccgccagggtgagcggagaggaaggggcagtggcggcggcggcggccggagcggcggcggatcaggtacaactccactcggaacttctgggcaggcaccaccacgccgccgccgccgccgcgcagaccccgctggccttctcgcccgaccacgtcgcctgcgtgtgcgaggcactgcagcaggggggcaacctggaccgcctggcccggttcctgtggtccctgccccagagcgacctgctacgtggcaacgagagcctgctgaaggcgcgggcgctcgtggccttccaccagggcatctaccccgagctctacagcatcctcgagagccacagcttcgagtcggccaaccacccgctgctgcagcagctctggtacaaggcgcgctacaccgaggccgagcgagcccgcggccggccgctgggagccgtagacaagtaccggctgcgcaggaaattccccctgccccgcaccatctgggacggcgaggagacggtgtattgtttcaaggagaagtcgcgcaacgcgctcaaggagctctacaagcagaatcgctacccttcgcccgccgagaagcggcacctggccaagatcaccggcctctccctcacccaggtcagcaactggttcaagaaccgccggcagcgcgacaggaacccctccgagacccagtccaaaagtgagtcagatggcaaccccagcactgaagatgaatccagcaagggacatgaggatttatctcctcacccactctccagttcatctgatggcatcaccaacctcagcctttccagtcatatggagccagtatatatgcaacaaattggaaatgctaagatatcattaagctcttctggagttctgttgaatggaagcttggtacctgcaagtacttcacctgtcttccttaatggaaattcttttattcagggacccagtggagttatccttaatggattaaatgtgggaaatacacaggcagtggcattgaacccaccaaaaatgtcatcaaacattgtgagcaatggtatatccatgactgacatactggggtctacttcccaggacgtgaaggaattcaaagtcctccagagttctgctaactcagcaaccaccacgtcctacagccccagtgtccctgtctcattcccaggcctgatacccagcactgaggtgaaaagagaaggcattcaaacagtggcttcccaagatggagggtctgtagtgacttttactacaccagtgcaaattaaccagtatggcattgtccagatccccaattccggagcaaacagccagttccttaatgggagcattggattctctccactgcagctgccccctgtgtcagtggcagcttcacaaggtaatatctcagtaagctcaagcacttcagatggaagcacatttacaagtgagtctaccacagtccagcaaggaaaggttttcttgagctctcttgctcccagtgcagtggtatacacggttcctaatacaggccagactataggatctgtgaaacaggaaggcttggaaaggagcctggtattttctcagttgatgcctgtcaatcagaatgcacaagtaaatgcaaacctgtcttctgaaaacatctcggggagtggcctgcctccactggcctcctcattagttaatgtatctccaactcacaatttttctctcagtccctctacactactaaatcccactgagctaaaccgcgacattgccgatagccaaccaatgtctgcaccggtggcaagcaaatctactgtgacatctgtcagcaacactaactatgcaactcttcagaactgctcccttattactggtcaagacctattgtcagtccctatgactcaggctgcccttggggaaatagttcctacagctgaagatcaggtaggtcacccctccccagcagtacatcaggattttgtccaagaacatcgtttggttctgcaatcggtagctaacatgaaagagaatttcttatcaaattctgagagcaaagcaacaagtagcttaatgatgctggactctaaatccaagtatgtcttagatggcatggttgatactgtctgtgaagacctggaaacagacaaaaaagagcttgccaagctccagactgtccagctggatgaagatatgcaagacttatgaactttatttcctcctcacctctttttggcatcagcggcaaatcttttcatgaagccccaaggacacaaaacattttcccatttaaaggaaaacactctagttttgcaagtatatgcatacaagagactttagattgatctgcatgaagatcacagttaagtatacaggagtagaactgcattattgcagcctttttgttcacttataaatttctcttttaaatagatggagacaaaggacaaggtgaaatgtatcaagtcaaagtgaatcatttagttgactctataattctaaggtcaaaatggaacttgatagttttttaaattaaaaaatgtatacacctaacatagaaaattaaagatagctgcagaccattagaaaaaatacaattgtttttgtttacttttactccatgggcattgaaaaggttaagaaac

SEQ ID NO: 49767 - DNA, 379 bp, Homo sapiens
tatggatgaggaaacacagaatgaataatttgccaaaggtcattcagctgactagaatttaaacctgtctaggccgggcgcagtggctcatgcctgtaatcccagcattcgggaggccgaggtgggcaaatcatctgaggttggcagatcatctgaggtcaggagttcaagaccacgctggccaacatggtgaaccgacatctctacaaaaatacaaaaattagccgggcatgatggtgggtgcctgtaatctcagctactcaggaggctgagacatgagaatcgcttgaacccaggaggcggaggttgtagtgagccgagattgcaccattgcactccagcctgggcaacagagtgagactccatctccaaaaaaaaa

SEQ ID NO: 49768 - DNA, 499 bp, Homo sapiens
ttagcagcttaacaataatcgtgatctctcctgatttctgtgggtcaggaatttgagagtggcttagttggacatgtgtggtgtggggtctgtggtttgggctgtagtcagatgttggctggggctgccatcatctgaagactggattggagctttcaaggtggtgccctcacatggttatcaagttcgtacttttccacgtggcctttccactagactgcttgagtgtccttacaacatggtggctgccttccccaagtgaacggtctgagagaaagaggcaggtggaggatatgccttttctatgacttggtctcagaagccacatgctgtcacttgcatggtattctgttggtcacataggtcaatctattgtgttttgagagcatgtgtacataaggtatgaatacaaggaggtgaagtttatttggagacacctcagaggctgactactgtgtatcctctttctgcaataattgcttcttcaccagtcccctct

SEQ ID NO: 49769 - DNA, 237 bp, Homo sapiens
aaaatatactaaaacaagagaattaggacaagaaatgatttaaagtagataaaggactatataaaacataattagatttttaaagtttgatggcaatgagaattacataagaaaaacaaggaaaggtatgtaggaagtgtcacaagtggggctagtagaaaacagccatctctgcgccatgtccaccgtggacaggccacttgtgctctccggctgcccctgagcccatctgcccct

SEQ ID NO: 49770 - DNA, 2930 bp, Homo sapiens
gggatctttgcctcatgtccttgggctcctgccctggctggcccgtcccccaccgccatgaggtgtcagattgtgtttccggctgcctcttcccgttgaccccctcctcccccaacacctgtcccctctcccgcccaccctcattccacagccctgtagacaggaggggcagatgcacgtcccagtcagagggatgggatggaggggccagtgctgacactggggctgctggctgccctggcggtgtgtggcagctgggggctgaacgaggaggagcggctgatccggcacctgtttcaagagaagggctacaacaaggagctccggcccgtggcacacaaagaggagagtgtggacgttgccctggccctcacactctccaacctcatctccctgaaagaagttgaggagaccctcactaccaatgtgtggatagagcacggctggacagacaaccggctgaagtggaatgctgaagaatttggaaacatcagtgtcctgcgcctccccccggacatggtgtggctcccagagattgtgctggagaacaacaatgacggctccttccagatctcctactcctgcaacgtgcttgtctaccactacggcttcgtgtactggctgccacctgccatcttccgctcctcctgccccatctctgtcacctatttccccttcgactggcagaactgctccctcaagttcagttccctcaagtatacggccaaagagatcaccctgagcctgaaacaggatgccaaggagaaccgcacctaccccgtggagtggatcatcattgatcctgaaggcttcacagagaacggggagtgggagatagtccaccggccggccagggtcaacgtggaccccagagcccctctggacagccccagccgccaggacatcaccttctacctcatcatccgccgcaagcccctcttctacatcatcaacatcctggtgccctgcgtgctcatctccttcatggtcaacctggtcttctacctaccggctgacagtggtgagaagacatcagtggccatctcggtgctcctggctcagtctgtcttcctgctgctcatctccaagcgtctgcctgccacatccatggccatcccccttatcggcaagttcctgctcttcggcatggtgctggtcaccatggttgtggtgatctgtgtcatcgtgctcaacatccacttccgaacacccagcacccatgtgctgtctgagggggtcaagaagctcttcctggagaccctgccggagctcctgcacatgtcccgcccagcagaggatggacccagccctggggccctggtgcggaggagcagctccctgggatacatctccaaggccgaggagtacttcctgctcaagtcccgcagtgacctcatgttcgagaagcagtcagagcggcatgggctggccaggcgcctcaccactgcacgccggcccccagcaagctctgagcaggcccagcaggaactcttcaatgagctgaagccagctgtggatggggcaaacttcattgttaaccacatgagggaccagaacaattacaatgaggagaaagacagctggaaccgagtggcccgcacagtggaccgcctctgcctgtttgtggtgacgcctgtcatggtggtgggcacagcctggatcttcctgcagggcgtttacaaccagccaccaccccagccttttcctggggacccctactcctacaacgtgcaggacaagcgcttcatctagggtgggcctgttggggagccaggagacagcagggtctgagagaggagccacagtccctaatgacacccactcctagccctgaggctcgtgcccctcagactggggaagagtccaaggaagggagggagcagccactcctcaatgctcaatggctcccctgaaatcaagacaggggccacccgagatggtctgagggtggacatcggctacagtgggtgggcaggacctccctcttcctacctacccttcaacctcaggcttctgaggcctcacctgggactgaggttgaggacacctccctccctccagaccccagagtatcctttcctagctctttctgccttgacctctctgcctaggtccctttgggaagttgaggactggagtggaaaggtcaggatcgacatccacaaagacttggggtcagcctgaggttgcacacacaatcctagaggaccagaacgcagcacctctccccaaagggtccctgccccccagcacctactcctctccaaattagggttgtcatgcattatttggggcatacatattctaaaaaatcattcgttgtttctctgaaatttgtcccctatttttatttgctaaatctagcaaccctatcccaaaggcagcctccactcaatcttatcctgagggccaaaggccaaggctgcaggaattgggagacaagggtctgtttgtatggtggtccacctccaagatggccccagtgatgcccagtattcacacccttgtgcagtcccctcactctgtaccagggtgggtctgggtaaccaatagaatgaggcagaagtgatggtacctcacttcccagatttggttaggaaagacactatggcctctttcttgctcattagccctcattctcacatcagttggatctctcactttggggaagccagctggcatgttaaggagccctatggagaggcccacatggcaaggaactaaggcctcctgccaacagccacgtgagtgaatgtggaagtggatcctctgccccagtagggccttcggatgagatcacagcccagtagacatcttatgtgcagccccatgaaagtccctaagccagaaccaccagctaagtgactcctggattcctgacccccagaaactgtgtgagataataaatgtgtgttgttttaagtgaaaaa

SEQ ID NO: 49771 - DNA, 2619 bp, Homo sapiens
gggatctttgcctcatgtccttgggctcctgccctggctggcccgtcccccaccgccatgaggtgtcagattgtgtttccggctgcctcttcccgttgaccccctcctcccccaacacctgtcccctctcccgcccaccctcattccacagccctgtagacaggaggggcagatgcacgtcccagtcagagggatgggatggaggggccagtgctgacactggggctgctggctgccctggcggtgtgtggcagctgggggctgaacgaggaggagcggctgatccggcacctgtttcaagagaagggctacaacaaggagctccggcccgtggcacacaaagaggagagtgtggacgttgccctggccctcacactctccaacctcatctccctgaaagaagttgaggagaccctcactaccaatgtgtggatagagcacggctggacagacaaccggctgaagtggaatgctgaagaatttggaaacatcagtgtcctgcgcctccccccggacatggtgtggctcccagagattgtgctggagaacaacaatgacggctccttccagatctcctactcctgcaacgtgcttgtctaccactacggcttcgtgtactggctgccacctgccatcttccgctcctcctgccccatctctgtcacctatttccccttcgactggcagaactgctccctcaagttcaggtggtgagaagacatcagtggccatctcggtgctcctggctcagtctgtcttcctgctgctcatctccaagcgtctgcctgccacatccatggccatcccccttatcggcaagttcctgctcttcggcatggtgctggtcaccatggttgtggtgatctgtgtcatcgtgctcaacatccacttccgaacacccagcacccatgtgctgtctgagggggtcaagaagctcttcctggagaccctgccggagctcctgcacatgtcccgcccagcagaggatggacccagccctggggccctggtgcggaggagcagctccctgggatacatctccaaggccgaggagtacttcctgctcaagtcccgcagtgacctcatgttcgagaagcagtcagagcggcatgggctggccaggcgcctcaccactgcacgccggcccccagcaagctctgagcaggcccagcaggaactcttcaatgagctgaagccagctgtggatggggcaaacttcattgttaaccacatgagggaccagaacaattacaatgaggagaaagacagctggaaccgagtggcccgcacagtggaccgcctctgcctgtttgtggtgacgcctgtcatggtggtgggcacagcctggatcttcctgcagggcgtttacaaccagccaccaccccagccttttcctggggacccctactcctacaacgtgcaggacaagcgcttcatctagggtgggcctgttggggagccaggagacagcagggtctgagagaggagccacagtccctaatgacacccactcctagccctgaggctcgtgcccctcagactggggaagagtccaaggaagggagggagcagccactcctcaatgctcaatggctcccctgaaatcaagacaggggccacccgagatggtctgagggtggacatcggctacagtgggtgggcaggacctccctcttcctacctacccttcaacctcaggcttctgaggcctcacctgggactgaggttgaggacacctccctccctccagaccccagagtatcctttcctagctctttctgccttgacctctctgcctaggtccctttgggaagttgaggactggagtggaaaggtcaggatcgacatccacaaagacttggggtcagcctgaggttgcacacacaatcctagaggaccagaacgcagcacctctccccaaagggtccctgccccccagcacctactcctctccaaattagggttgtcatgcattatttggggcatacatattctaaaaaatcattcgttgtttctctgaaatttgtcccctatttttatttgctaaatctagcaaccctatcccaaaggcagcctccactcaatcttatcctgagggccaaaggccaaggctgcaggaattgggagacaagggtctgtttgtatggtggtccacctccaagatggccccagtgatgcccagtattcacacccttgtgcagtcccctcactctgtaccagggtgggtctgggtaaccaatagaatgaggcagaagtgatggtacctcacttcccagatttggttaggaaagacactatggcctctttcttgctcattagccctcattctcacatcagttggatctctcactttggggaagccagctggcatgttaaggagccctatggagaggcccacatggcaaggaactaaggcctcctgccaacagccacgtgagtgaatgtggaagtggatcctctgccccagtagggccttcggatgagatcacagcccagtagacatcttatgtgcagccccatgaaagtccctaagccagaaccaccagctaagtgactcctggattcctgacccccagaaactgtgtgagataataaatgtgtgttgttttaagtgaaaaa

SEQ ID NO: 49772 - DNA, 2820 bp, Homo sapiens
gggatctttgcctcatgtccttgggctcctgccctggctggcccgtcccccaccgccatgaggtgtcagattgtgtttccggctgcctcttcccgttgaccccctcctcccccaacacctgtcccctctcccgcccaccctcattccacagccctgtagacaggaggggcagatgcacgtcccagtcagagggatgggatggaggggccagtgctgacactggggctgctggctgccctggcggtgtgtggcagctgggggctgaacgaggaggagcggctgatccggcacctgtttcaagagaagggctacaacaaggagctccggcccgtggcacacaaagaggagagtgtggacgttgccctggccctcacactctccaacctcatctccctgaaagaagttgaggagaccctcactaccaatgtgtggatagagcacggctggacagacaaccggctgaagtggaatgctgaagaatttggaaacatcagtgtcctgcgcctccccccggacatggtgtggctcccagagattgtgctggagaacaacaatgacggctccttccagatctcctactcctgcaacgtgcttgtctaccactacggcttcgtgtactggctgccacctgccatcttccgctcctcctgccccatctctgtcacctatttccccttcgactggcagaactgctccctcaagttcagagaacggggagtgggagatagtccaccggccggccagggtcaacgtggaccccagagcccctctggacagccccagccgccaggacatcaccttctacctcatcatccgccgcaagcccctcttctacatcatcaacatcctggtgccctgcgtgctcatctccttcatggtcaacctggtcttctacctaccggctgacagtggtgagaagacatcagtggccatctcggtgctcctggctcagtctgtcttcctgctgctcatctccaagcgtctgcctgccacatccatggccatcccccttatcggcaagttcctgctcttcggcatggtgctggtcaccatggttgtggtgatctgtgtcatcgtgctcaacatccacttccgaacacccagcacccatgtgctgtctgagggggtcaagaagctcttcctggagaccctgccggagctcctgcacatgtcccgcccagcagaggatggacccagccctggggccctggtgcggaggagcagctccctgggatacatctccaaggccgaggagtacttcctgctcaagtcccgcagtgacctcatgttcgagaagcagtcagagcggcatgggctggccaggcgcctcaccactgcacgccggcccccagcaagctctgagcaggcccagcaggaactcttcaatgagctgaagccagctgtggatggggcaaacttcattgttaaccacatgagggaccagaacaattacaatgaggagaaagacagctggaaccgagtggcccgcacagtggaccgcctctgcctgtttgtggtgacgcctgtcatggtggtgggcacagcctggatcttcctgcagggcgtttacaaccagccaccaccccagccttttcctggggacccctactcctacaacgtgcaggacaagcgcttcatctagggtgggcctgttggggagccaggagacagcagggtctgagagaggagccacagtccctaatgacacccactcctagccctgaggctcgtgcccctcagactggggaagagtccaaggaagggagggagcagccactcctcaatgctcaatggctcccctgaaatcaagacaggggccacccgagatggtctgagggtggacatcggctacagtgggtgggcaggacctccctcttcctacctacccttcaacctcaggcttctgaggcctcacctgggactgaggttgaggacacctccctccctccagaccccagagtatcctttcctagctctttctgccttgacctctctgcctaggtccctttgggaagttgaggactggagtggaaaggtcaggatcgacatccacaaagacttggggtcagcctgaggttgcacacacaatcctagaggaccagaacgcagcacctctccccaaagggtccctgccccccagcacctactcctctccaaattagggttgtcatgcattatttggggcatacatattctaaaaaatcattcgttgtttctctgaaatttgtcccctatttttatttgctaaatctagcaaccctatcccaaaggcagcctccactcaatcttatcctgagggccaaaggccaaggctgcaggaattgggagacaagggtctgtttgtatggtggtccacctccaagatggccccagtgatgcccagtattcacacccttgtgcagtcccctcactctgtaccagggtgggtctgggtaaccaatagaatgaggcagaagtgatggtacctcacttcccagatttggttaggaaagacactatggcctctttcttgctcattagccctcattctcacatcagttggatctctcactttggggaagccagctggcatgttaaggagccctatggagaggcccacatggcaaggaactaaggcctcctgccaacagccacgtgagtgaatgtggaagtggatcctctgccccagtagggccttcggatgagatcacagcccagtagacatcttatgtgcagccccatgaaagtccctaagccagaaccaccagctaagtgactcctggattcctgacccccagaaactgtgtgagataataaatgtgtgttgttttaagtgaaaaa

SEQ ID NO: 49773 - DNA, 449 bp, Homo sapiens
gtcaagctttttttttgttttaaacttcagtgcttaaaggcaataccagtactcctacccatggaggttcttgacattatcatggctacttgaaggatagttgctaacactctggctcttaatccctcaatgataagctcaaacactcccatctctgcagcaaaaatctctttttgacactgcaatactactagactttctagtttcttgagaagtcattttcatagccagtttcatagccagtcagctgggatgctagtagaatgaccctcctgatgaaatataagacttttactggttagaagccactttgcccttgagaaatctctgtttaacagacacttcctgggtcacacagacctaattacactctgatggtgcactttcattctttctgtagctattcaacaaatgccaccaaatgtaaatggagctaaattataaatggg

SEQ ID NO: 49774 - DNA, 427 bp, Homo sapiens
cctcctgtagctgtgaattaatattcattctggagttccaggtactcttccagtcacttaccacaataactgtatgctatatgggttctttttttattccagtttgatgtatgagaatacttaggcatagtgagttgcaaagctagaaagtagaatacgtggtataagaactcaggtaattgagccccagaaccgaaactcttaaattactcttacatttcttttgattttaaggtttatgttactgagatattttaaaaatagtcttttacagtacaacattcagagagaaagagcagaataatgatctaacctgctgttgccagtgaacctcatcgctatcccattgagcacatcattcagttttggcttaaaatatccttctgtctgcttaatgtttgagagtttctaggctgatattttcaaa

SEQ ID NO: 49775 - DNA, 501 bp, Homo sapiens
  misc_feature (498)..(500): n is a, c, g, or t
gttttgtactttctacttgcatatgctggttttataataataaaaggttattttaaaaagaaaatcactattttccgctgagcccagatacagcttctgaatcaccatcaacatgagactggtacattccagcatgggaggctgccagggcatcagtccagctggttacttcttcgaagaagtaactactgatttccttttgcctattgatttccattgcctatgcatcttacctgtggctcaagattaccttggcactaaatccaattagccttttcactttggcagcccttaccaattggcaacttctttgtctcttggtttgcttttgggcaaaaattaccttcttctttagtttttgagtcattatatcctcttggttttcttcctacctttctgacttctcagtctcctttgaaagtttacagcttctttaatttcccccacaattccatactcagccttctctcttcactctatatctttttcccaaaaaannna

SEQ ID NO: 49776 - DNA, 446 bp, Homo sapiens
ctcgggctactgctgcttcttggtggcaagcccctgtgcaccctgctccttgcctctggcggggcagcctgtcgtgcctgcttcctgccctgtgaacagcaggtccgtgcttcctggagccaaggaagactttggggtttccctgtgaaaggccctgtctccccaagcctggcgtcctctgaggctttggagagcccgggagagacggcacattgtccaagcacacagagatcacgtgcttcttccaaatggacaggactcagttattttctgtcaaacacaaagatgcagtatgctcactataaaaggcccaagcaatagacaagcgcagaaaatggaaagtgtgtcaggagaccattcccattgagcccacttcccagataatcgttaatgacaatttgatgcacgtggtggttccagtctcaagcatatgtgcatctataaac

SEQ ID NO: 49777 - DNA, 479 bp, Homo sapiens
caaaaggtggctaaagagcctaagtggagatctgcttgtattcttcattgatgaagtctaaatatgaagctagaactgaagacattccatcagattgactgttacagggtagggagctgcagcacaagcacagagaagccagcagcttcatcacatcacaccagctctgcagcgccaaggcagacacaccagctctgcggcaccgaggcagacacaccagctctgcggtgccgaggcagagcctgcgccctctgatgctctgtgtcgtgttttttcccacttcgccatgctgcattttccttagggctctgacatctccttctgacactgattttttttttttgacactgaatttttaaataattatttttcaaggtgcaacattttgacgtcaaaattcagctagtgagatttccaaagtccctttcttctaatttcttatttccaagtattttttttaattgcagcttaatttatga

SEQ ID NO: 49778 - DNA, 633 bp, Homo sapiens
tcacattgagtaggccgagaaggaagagaaagaaaaggagtcagtcttactgtctcagggttatcacaggtgggaggaaatccacatataagtatcacaggtgggaggaaatccacatataagtagaccttaacaattcatacccatgttgctcaagggtcaactataatgtccttggcttgctacagataaacatcctcaggacaggattctacacctgggcagtgctagggcataaactgccctggcttccagggagctgactgccagtagtctgcccgtgtttgcccagatgcacttattgtttctccagcaccacagccccatagcaggaccacatggaggaataggcaaagccacccttttcccaatgcccagggaagctgggatcagagagactaagagaactctcacaccaggaatatcagcagtaaccagggcagaagcaggaaacagagaacacaattctattgtcaaactcatcccataagcactagagggcataggtgatggtggttttaaattgcacaaaggaacacattcctatacttgatagagttaaaagcagagcttattaacataattctcctacattttaattttgaaaatcccatttaaagctacatctgattt

SEQ ID NO: 49779 - DNA, 564 bp, Homo sapiens
tccaaggggtaaagtgtgaaccccccgatgctttattctctctctctccccattacctggcccagatatggatgcagttgtgggaagcgtgtggctagagaaccagaaaaggggagacccaggaaactagaaagtactggggggattgccagagaggaggagctcaggaaggtaacccctttaaggtgttaatgaactcccagacttcctcgtcatgttgtgggtacccagatctgacgctgagtagcttacgtagacttggagaactcatctctgggatagaccaccatgcagttccctaactggccactggatggtgcacaggcaggatggatccaaaaagcgcttcaaaggctttgaaaacagctgacttgggaaccacaactcacagaaggctggctggaacttgtgtgtggaatctaactgcataaattgcttactaagataaaaacgtcaacattctcccaagggttgagagaaaattcagagtttcttaacacaatattgaaaatgtctagaatgcagttcaaaattaattggcttaagaactagaatcatctttaa

SEQ ID NO: 49780 - DNA, 154 bp, Homo sapiens
tgcaggcccagagaaggaagaggaaggcatgtaaacagataaacggcaggcagtgcggagtgatgaatgatgggtgctccagcagaagagacagtagaagtggcatctgagccaggcctcaacacgcagggagtacgggcatcctaggcaaagg

SEQ ID NO: 49781 - DNA, 168 bp, Homo sapiens
ctaggagaacttcacaggaagaagccgagaagttgtggaagctgctgtttctcatgaaaagccagggctggcttcctcaggaaggaagtgtgcggcgaatcctgtgtgcagacccctgctgccaaatctgcaatgttatggctctggagattaagcaattgctggcag

SEQ ID NO: 49782 - DNA, 306 bp, Homo sapiens
acacaacttagcaattatgctatgtaatcaatcacatattgtaacagtccaatatttcttagtctattcatacttactagaatattcctcaagctttattttgataattcaaaatttcctgacttattctgaatttctacatctatgaaagacatacccatgtggtgcttaccattcatgtttaaatatttaacttgatgataagataattaatacttaatatttgctatgattaacttactctgacaattaaatgatttataaaaggttcttttaacaacatatcatttgtcataggcttggaaa

SEQ ID NO: 49783 - DNA, 291 bp, Homo sapiens
cagggccctaaggccccgtcagacaatccctctgtcctcggcagttttcagtgagctaagagtccttgactgctttggtgtgtaaatcggtaggatactgaggaaactgacaccttcctctctggcctctctggggatctttgtatcaatgtgggcccaggtgcccagtgtgttgggaggtatgagaggagcagagaaccgggatgtgactctcaggagcttatagcctgctggggaaggcaaggctgttgcactcagacaattggctgttcattaaatgcccagacacat

SEQ ID NO: 49784 - DNA, 467 bp, Homo sapiens
acattccaatacgtaccatttttctactacaaagtgaaaaaaatgaaaggaaatacgacaagccctatggaaaagtacttcaaaagtgtcttctacaaaaataccattactcgtagcatattaaattttacatctactaaaaattatcagctatctgaaagtactaatcaaaactaaatatttaaaaaaattaaataccccatttccattattttggtcccatgagaatatttctacttttatatgccaatacattctaaaaagagtccccttcaaaaatgtattttgtagacatctgtattgatttttatatggtatagggtaacatttcacaataataaaaatattttctaggcgtggtggctcacatctgtaatgccagcactctgggagcctgaggagggaggaacacttgagcccaggagttcaagaccagcctgggcaacatagggagaccttgtatctac

SEQ ID NO: 49785 - DNA, 635 bp, Homo sapiens
gatgaacccagtacctcagatggaaatgcagaaatcacccgtcttctgtgttgcttactctgggagctgtagaccggagctgttcctattcggccatcttggctgccagcttctttgtgtagtttcattaccacttgagatgcaattaaatttgttttagttttcagtttgagggaatttgtttttctttttagttcaactttagtttttgagtatgtataattttaagcagcattaatagagtataatcttttcaacactgcccaaaacatgacacatctagaataatctgtttacttctttttgccatattttaggaatggccagcccagtatcaagggtgggatgatacgagtggtttatcctggatctggatggcaataaggggatatattgtctatgtctgtaaagaatttcaaaactataataaaactaacaagattttgtctgggtttttattctcaccatgcaccagcaattctcaatactaccagtgagaaagtacttctccctccactgagtgtgttgctaagaagcttattaagcagtttgagtatccaaaggagagtaataagactgacgaggaatctgaaaaccatagcccatgagagatgaacagattttaatatcaatca

SEQ ID NO: 49786 - DNA, 377 bp, Homo sapiens
gcctgtaaggaggtgatgataaaggttaaataagataaggttggggcctaatccaatagggctggttcctttataagaagaggaagacaccagatcttttttctacactgtgggaagacacagcaacaacatggccatctgtaagccacgaagagagctctcaccaggaactgatggatagcacctggatcttggactgctcagataggtttatacgatctagtctgtggtattcagtagcccaagctgactaatataatggctgtgtgtgtacaaatagcttttcaagattttttacaattcttttatacagtgggaaaactgtattctatttatacccagaaatagaattgctagaacatgtagtagttctattt

SEQ ID NO: 49787 - DNA, 738 bp, Homo sapiens
caaaagagaaagccactttcctagtctttgttgaatggtaaatgttccttcaagagttgcaggaagagcatgccttgcttgcgccatggggtggggctgcaccatcttgcttgctgcgtgtgcttgtattgttcatcatacacaattcatggtttcttttcaggaatttttgaagtcgcttgtccattctatgaaggttagtttggttaaaattaaagcattttaactgagtacttacaaactgtagtagacccagataggctgaaagcaaaagtaggatggagggcttggcttcggtgaggaccaagcctcttctgtcagccactcctgtgcgactgttcaggcccaggggatccactcagggaaggtacctgtgtcaacctcaatattaactgttatcaaagcttcctgtctcttttattttagcccagaagcaatacttttaatggattcccttcccacgtcccaaatggatcatgtgtacccctcccgggcacccaccggaagactctgggtattgtgtgcgttgtccgcctcagtgacgaggatcttcataactttccttcctgcaaaaaggaacattagttttcagtgtttccaacaattatccagcaataccatctaaacaccattttctgtattctaggagcaagctgaagaggaaaagaagcccaaggatagcacaacccctttgagtcacggtaattatcaccaatatttacagtggtagttcacagt

SEQ ID NO: 49788 - DNA, 7606 bp, Homo sapiens
gttctttgtgacacatcacacagaattggagtgctgtccttctggagagtggtggagaaccaagatacagttcagaaccaaaggaatagagaagggctttgatttctttttggctttagattggggatttgggaggcttagcaggaaagatgtccactgaaaatgtggaagggaagcccagtaaccttggggagagaggaagagcccggagctccactttcctcagggttgtccagccaatgtttaaccacagtattttcacttctgcagtctctcctgctgcagaacgcatccgattcatcttgggagaggaggatgacagcccagctccccctcagctcttcacggaactggatgagctgctggccgtggatgggcaggagatggagtggaaggaaacagccaggtggatcaagtttgaagaaaaagtggaacagggtggggaaagatggagcaagccccatgtggccacattgtcccttcatagtttatttgagctgaggacatgtatggagaaaggatccatcatgcttgatcgggaggcttcttctctcccacagttggtggagatgattgttgaccatcagattgagacaggcctattgaaacctgaacttaaggataaggtgacctatactttgctccggaagcaccggcatcaaaccaagaaatccaaccttcggtccctggctgacattgggaagacagtctccagtgcaagtaggatgtttaccaaccctgataatggtagcccagccatgacccataggaatctgacttcctccagtctgaatgacatttctgataaaccggagaaggaccagctgaagaataagttcatgaaaaaattgccacgtgatgcagaagcttccaacgtgcttgttggggaggttgactttttggatactcctttcattgcctttgttaggctacagcaggctgtcatgctgggtgccctgactgaagttcctgtgcccacaaggttcttgttcattctcttaggtcctaaggggaaagccaagtcctaccacgagattggcagagccattgccaccctgatgtctgatgaggtgttccatgacattgcttataaagcaaaagacaggcacgacctgattgctggtattgatgagttcctagatgaagtcatcgtccttccacctggggaatgggatccagcaattaggatagagcctcctaagagtcttccatcctctgacaaaagaaagaatatgtactcaggtggagagaatgttcagatgaatggggatacgccccatgatggaggtcacggaggaggaggacatggggattgtgaagaattgcagcgaactggacggttctgtggtggactaattaaagacataaagaggaaagcgccattttttgccagtgatttttatgatgctttaaatattcaagctctttcggcaattctcttcatttatctggcaactgtaactaatgctatcacttttggaggactgcttggggatgccactgacaacatgcagggcgtgttggagagtttcctgggcactgctgtctctggagccatcttttgcctttttgctggtcaaccactcactattctgagcagcaccggacctgtcctagtttttgagaggcttctatttaatttcagcaaggacaataattttgactatttggagtttcgcctttggattggcctgtggtccgccttcctatgtctcattttggtagccactgatgccagcttcttggttcaatacttcacacgtttcacggaggagggcttttcctctctgattagcttcatctttatctatgatgctttcaagaagatgatcaagcttgcagattactaccccatcaactccaacttcaaagtgggctacaacactctcttttcctgtacctgtgtgccacctgacccagctaatatctcaatatctaatgacaccacactggccccagagtatttgccaactatgtcttctactgacatgtaccataatactacctttgactgggcatttttgtcgaagaaggagtgttcaaaatacggaggaaacctcgtcgggaacaactgtaattttgttcctgatatcacactcatgtcttttatcctcttcttgggaacctacacctcttccatggctctgaaaaaattcaaaactagtccttattttccaaccacagcaagaaaactgatcagtgattttgccattatcttgtccattctcatcttttgtgtaatagatgccctagtaggcgtggacaccccaaaactaattgtgccaagtgagttcaagccaacaagtccaaaccgaggttggttcgttccaccgtttggagaaaacccctggtgggtgtgccttgctgctgctatcccggctttgttggtcactatactgattttcatggaccaacaaattacagctgtgattgtaaacaggaaagaacataaactcaagaaaggagcagggtatcacttggatctcttttgggtggccatcctcatggttatatgctccctcatggctcttccgtggtatgtagctgctacggtcatctccattgctcacatcgacagtttgaagatggagacagagacttctgcacctggagaacaaccaaagtttctaggagtgagggaacaaagagtcactggaacccttgtgtttattctgactggtctgtcagtctttatggctcccatcttgaagtttatacccatgcctgtactctatggtgtgttcctgtatatgggagtagcatcccttaatggtgtgcagttcatggatcgtctgaagctgcttctgatgcctctgaagcatcagcctgacttcatctacctgcgtcatgttcctctgcgcagagtccacctgttcactttcctgcaggtgttgtgtctggccctgctttggatcctcaagtcaacggtggctgctatcatttttccagtaatgatcttggcacttgtagctgtcagaaaaggcatggactacctcttctcccagcatgacctcagcttcctggatgatgtcattccagaaaaggacaagaaaaagaaggaggatgagaagaaaaagaaaaagaagaagggaagtctggacagtgacaatgatgattctgactgcccatactcagaaaaagttccaagtattaaaattccaatggacatcatggaacagcaacctttcctaagcgatagcaaaccttctgacagagaaagatcaccaacattccttgaacgccacacatcatgctgataaaattcctttccttcagtcactcggtatgccaagtcctcctagaactccagtaaaagttgtgcctcaaattagaatagaacttgaacctgaagacaatgattatttctggaggagcaagggaacagaaactacattgtaacctgtttgtctttcttaaaactgacatttgttgttaatgtcatttgtttttgtttggctgtttgtttattttttaacttttatttcgtctcagtttttggtcacaggccaaataatacagcgctctctctgcttctctcttgcatagatacaatcaagacaatagtgcaccgttccttaaaaacagcatctgaggaatcccccttttgttcttaaactttcagatgtgtcctttgataaccaaattctgtcactcaagacacagacacccacagaccctgtcctttgcctctattaagcagaggatggaagtattaaggattttgtaacaccttttatgaaaatgttgaaggaacttaaaactttagctttggagctgtgcttactggcttgtctttgtctggtagaacaaaccttgacctccagacagagtcccttctcacttatagagctctccaggactggaaaaagtgctgctattttaacttgctcttgcttgtaaatcctaatcttagagttatcaaaagaagaaaaaactgaaggtactttactccctatagagaaaccattgccatcattgtagcaagtgctggaatgtcccttttttcctatgcaactttttttaaccctttaatgaacttatctgttgagtacattgaagaatatttttcttcctagattttgttgtttaaattatggggcctaacctgccacttattttttgtcaatttttaaaacttttttttaattactgtaaagaaaatgaattttttcctgcagcaggaaacatagttttgagtagttctacctcttatttgtagctgccaggctttctgtaaaaattgtattgtatataatgtgatttttacacatacatacacacacaaatacacaatctctagggtaagccagaaggcaagatcagattaaaaacaccatgtttctaagcatccatttttccctttctttaaaagaaacttaactgttctatgaaggagattgagggagaagagacaaactcctatgtcatgagaataaccgatgttctgataatagtagcatctaggtacagatgctggttgtattaccacgtcaatgtcctatgcagtattgttagacattttctcattttgaaatatttgtgtgtttgtgtatgtgctctgtgccatggctggtgtatatatgtgcaatgttagaaggcaaaagagtgatggtaggcagagggcaaagtcattgaatctcttatgccagttttcataaaacccaaaccacatatgaaaaaatccattaagggtccaagaagtctgtccatatgaaaatgagggtaaatatagtttatttcccaggtatcagtcattataattgatataatagctctaacatgcaatataaaattcataggagtattaatagcccatttacacatctataaaatgtaatgggattgcagagctgcagagtacagtgtaacagtactctcatgcaatttttttcaggatgcaaaggcaattattctttgtaagcgggacatttagaatatatttgtgtacatattatatgtatgtatatttcaaagtaccacactgaaaattagacatttattaaccaaatttaacgtggtatttaaaggtaatatttttaatatgatacattacatattgtgaatgtatactaaaaaaacattttaaatgttaaaattataatttcagattcatataaccacaactgtgatatatcctaactataaccagttgttgaggggtatactagaagcagaatgaaaccacattttttggtttgataatatgcacttattgactcccactcattgttatgttaattaagttattattctgtctccttgtaattttgattacaaaaattttattatcctgagttagctgttacttttacagtacctgatactcctaaaacttttaacttatacaaattagtcaataatgaccccaattttttcattaaaataatagtggtgaattatatgttattgtgttaaaacctcacttgccaaattctggcttcacatttgtatttagggctatccttaaaatgatgagtctatattatctagctttctattaccctaatataaactggtataagaagactttccttttttctttatgcatggaagcatcaataaattgtttaaaaaccatgtatagtaaattcagcttaacccgtgatcttcttaagttaaaggtacttttgttttataaaagctctagataaaactttcttttctgatcatgaatcaagtatctgtggtttcatgcccctctctatacctttcaaagaactcctgaagcaacttaactcatcatttcagcctctgagtagaggtaaaacctatgtgtacttctgtttatgatccatattgatatttatgacatgaacacagaatagtaccttacatttgctaaacagacagttaatatcaaatcctttcaatattctgggaacccagggaagtttttaaaaatgtcattactttcaaaggaacagaagtagttaaccaaactaacaagcaaaacctgaggtttacctagtgacaccaaattatcggtattttaactgaatttacccattgactaagaatgaaccggatttggtggtggttttgtttctatgcaaactggacacaaattacaacagtaaatttttttataagtgcttctcccttctccatgatgtgacttccggagataaaggattcaaaagataaagacaaagtacgctcagagttgttaaccagaaagtcctggctgtggttgcagaaacactgttggaagaaaagagatgactaagtcaagtgtctgccttatcaaaagagcaaaaatgcctctggttttgtgtttgggagaaaaatatcttggacgcactgttttccttgataaaagtcatcttctctactgtgtgaaatgaatacttggaattctaattgttttgtgtgccaggggcagtaatgtccctgcctcttctcccaatcaaggttgaggagtggggctggggagaggacttaactgacttaagaagtaggaaaacaaaaacctctctcctcagccttccacctccaagagaggaggaaaaacagttgtctgctgtctgtaattcagtttgcgtgtattttatgctcatgcaccaacccatacagagtaaatcttttatcaactatatactggtgtttaatagagaatgattgtcttccgagttttttggttccttttttaactgtgttaaagtacttgaaatgtattgactgctgactatattttaaaaacaaaatgaaataatttgagttgtattacagaggttgacattgttcagggatgggacaaagccttcttcaatccttttcatactacttaatgattttggtgcaggaacctgagattttctgatttatatttcatgatatttcacatttgctcttcacagcatgagcatgaagcccagtggcaccaaatggctgggtacaatcaagtgatattttgtagcacctcactatctgaaaggccatgagttttcagatgatttcattgagcttcattgcagcctgaaattttaaaaaagttgtgtaatacgccaaccagtcaagttgtgttttggccagagatttagatatgtccaatttcctggctcatttcattgtgctctatgggtacgtataaaaagcaagaattctgtttcctaggcaaacattgcaactcagggctaaagtcatccagtgaaacttttagagccagaagtaactttgtcccagtcctacaatgtgaaaagagtgaatagttgcctctttttagccattttcatggctggtacatattcgtacgcattacttttcagaatcaatacgcactttcagatattcttatttttattctcttaagtctttattaactttggagagagaaatgatgcatctttttattttaaatgaagtagatcaacatggtggaacaaaatgataaagaacagaaaacatttcaatatattactaataactttttccaatataaatcctaaaattcctataacatagtattttacagttttatgaagctttctattgtgacttttatggaattaagagatgaagaagatgagatattttagcatttatatttttcaaaattatatgtatacttaaaaataaagtaactttatgcatttatgactgtcaaaaa

SEQ ID NO: 49789 - DNA, 397 bp, Homo sapiens
gcggcggcggccgcggtggcagcgaaggcggcggcggcggcggcagtggcagtggccgctgcagccccacactccgccgccaaactggaggagcgacggaagccagaccccaggaggatggaggatgaagctgtcctggacagaggggcttccttcctcaagcatgtgtgtgatgaagaagaagtagaaggccaccataccatttacatcggagtccatgtgccgaagagttacaggagaaggagacgtcacaagagaaagacagggcacaaagaaaagaaggaaaaggagagaatctctgagaactactctgacaaatcagatattgaaaatgctgatgaatccagcagcagcatcctaaaacctctcagtgagtactctctgagcgttggtgcct

SEQ ID NO: 49790 - DNA, 7706 bp, Homo sapiens
gcggcggcggccgcggtggcagcgaaggcggcggcggcggcggcagtggcagtggccgctgcagccccacactccgccgccaaactggaggagcgacggaagccagaccccaggaggatggaggatgaagctgtcctggacagaggggcttccttcctcaagcatgtgtgtgatgaagaagaagtagaaggccaccataccatttacatcggagtccatgtgccgaagagttacaggagaaggagacgtcacaagagaaagacagggcacaaagaaaagaaggaaaaggagagaatctctgagaactactctgacaaatcagatattgaaaatgctgatgaatccagcagcagcatcctaaaacctctcatctctcctgctgcagaacgcatccgattcatcttgggagaggaggatgacagcccagctccccctcagctcttcacggaactggatgagctgctggccgtggatgggcaggagatggagtggaaggaaacagccaggtggatcaagtttgaagaaaaagtggaacagggtggggaaagatggagcaagccccatgtggccacattgtcccttcatagtttatttgagctgaggacatgtatggagaaaggatccatcatgcttgatcgggaggcttcttctctcccacagttggtggagatgattgttgaccatcagattgagacaggcctattgaaacctgaacttaaggataaggtgacctatactttgctccggaagcaccggcatcaaaccaagaaatccaaccttcggtccctggctgacattgggaagacagtctccagtgcaagtaggatgtttaccaaccctgataatggtagcccagccatgacccataggaatctgacttcctccagtctgaatgacatttctgataaaccggagaaggaccagctgaagaataagttcatgaaaaaattgccacgtgatgcagaagcttccaacgtgcttgttggggaggttgactttttggatactcctttcattgcctttgttaggctacagcaggctgtcatgctgggtgccctgactgaagttcctgtgcccacaaggttcttgttcattctcttaggtcctaaggggaaagccaagtcctaccacgagattggcagagccattgccaccctgatgtctgatgaggtgttccatgacattgcttataaagcaaaagacaggcacgacctgattgctggtattgatgagttcctagatgaagtcatcgtccttccacctggggaatgggatccagcaattaggatagagcctcctaagagtcttccatcctctgacaaaagaaagaatatgtactcaggtggagagaatgttcagatgaatggggatacgccccatgatggaggtcacggaggaggaggacatggggattgtgaagaattgcagcgaactggacggttctgtggtggactaattaaagacataaagaggaaagcgccattttttgccagtgatttttatgatgctttaaatattcaagctctttcggcaattctcttcatttatctggcaactgtaactaatgctatcacttttggaggactgcttggggatgccactgacaacatgcagggcgtgttggagagtttcctgggcactgctgtctctggagccatcttttgcctttttgctggtcaaccactcactattctgagcagcaccggacctgtcctagtttttgagaggcttctatttaatttcagcaaggacaataattttgactatttggagtttcgcctttggattggcctgtggtccgccttcctatgtctcattttggtagccactgatgccagcttcttggttcaatacttcacacgtttcacggaggagggcttttcctctctgattagcttcatctttatctatgatgctttcaagaagatgatcaagcttgcagattactaccccatcaactccaacttcaaagtgggctacaacactctcttttcctgtacctgtgtgccacctgacccagctaatatctcaatatctaatgacaccacactggccccagagtatttgccaactatgtcttctactgacatgtaccataatactacctttgactgggcatttttgtcgaagaaggagtgttcaaaatacggaggaaacctcgtcgggaacaactgtaattttgttcctgatatcacactcatgtcttttatcctcttcttgggaacctacacctcttccatggctctgaaaaaattcaaaactagtccttattttccaaccacagcaagaaaactgatcagtgattttgccattatcttgtccattctcatcttttgtgtaatagatgccctagtaggcgtggacaccccaaaactaattgtgccaagtgagttcaagccaacaagtccaaaccgaggttggttcgttccaccgtttggagaaaacccctggtgggtgtgccttgctgctgctatcccggctttgttggtcactatactgattttcatggaccaacaaattacagctgtgattgtaaacaggaaagaacataaactcaagaaaggagcagggtatcacttggatctcttttgggtggccatcctcatggttatatgctccctcatggctcttccgtggtatgtagctgctacggtcatctccattgctcacatcgacagtttgaagatggagacagagacttctgcacctggagaacaaccaaagtttctaggagtgagggaacaaagagtcactggaacccttgtgtttattctgactggtctgtcagtctttatggctcccatcttgaagtttatacccatgcctgtactctatggtgtgttcctgtatatgggagtagcatcccttaatggtgtgcagttcatggatcgtctgaagctgcttctgatgcctctgaagcatcagcctgacttcatctacctgcgtcatgttcctctgcgcagagtccacctgttcactttcctgcaggtgttgtgtctggccctgctttggatcctcaagtcaacggtggctgctatcatttttccagtaatgatcttggcacttgtagctgtcagaaaaggcatggactacctcttctcccagcatgacctcagcttcctggatgatgtcattccagaaaaggacaagaaaaagaaggaggatgagaagaaaaagaaaaagaagaagggaagtctggacagtgacaatgatgattctgactgcccatactcagaaaaagttccaagtattaaaattccaatggacatcatggaacagcaacctttcctaagcgatagcaaaccttctgacagagaaagatcaccaacattccttgaacgccacacatcatgctgataaaattcctttccttcagtcactcggtatgccaagtcctcctagaactccagtaaaagttgtgcctcaaattagaatagaacttgaacctgaagacaatgattatttctggaggagcaagggaacagaaactacattgtaacctgtttgtctttcttaaaactgacatttgttgttaatgtcatttgtttttgtttggctgtttgtttattttttaacttttatttcgtctcagtttttggtcacaggccaaataatacagcgctctctctgcttctctcttgcatagatacaatcaagacaatagtgcaccgttccttaaaaacagcatctgaggaatcccccttttgttcttaaactttcagatgtgtcctttgataaccaaattctgtcactcaagacacagacacccacagaccctgtcctttgcctctattaagcagaggatggaagtattaaggattttgtaacaccttttatgaaaatgttgaaggaacttaaaactttagctttggagctgtgcttactggcttgtctttgtctggtagaacaaaccttgacctccagacagagtcccttctcacttatagagctctccaggactggaaaaagtgctgctattttaacttgctcttgcttgtaaatcctaatcttagagttatcaaaagaagaaaaaactgaaggtactttactccctatagagaaaccattgccatcattgtagcaagtgctggaatgtcccttttttcctatgcaactttttttaaccctttaatgaacttatctgttgagtacattgaagaatatttttcttcctagattttgttgtttaaattatggggcctaacctgccacttattttttgtcaatttttaaaacttttttttaattactgtaaagaaaatgaattttttcctgcagcaggaaacatagttttgagtagttctacctcttatttgtagctgccaggctttctgtaaaaattgtattgtatataatgtgatttttacacatacatacacacacaaatacacaatctctagggtaagccagaaggcaagatcagattaaaaacaccatgtttctaagcatccatttttccctttctttaaaagaaacttaactgttctatgaaggagattgagggagaagagacaaactcctatgtcatgagaataaccgatgttctgataatagtagcatctaggtacagatgctggttgtattaccacgtcaatgtcctatgcagtattgttagacattttctcattttgaaatatttgtgtgtttgtgtatgtgctctgtgccatggctggtgtatatatgtgcaatgttagaaggcaaaagagtgatggtaggcagagggcaaagtcattgaatctcttatgccagttttcataaaacccaaaccacatatgaaaaaatccattaagggtccaagaagtctgtccatatgaaaatgagggtaaatatagtttatttcccaggtatcagtcattataattgatataatagctctaacatgcaatataaaattcataggagtattaatagcccatttacacatctataaaatgtaatgggattgcagagctgcagagtacagtgtaacagtactctcatgcaatttttttcaggatgcaaaggcaattattctttgtaagcgggacatttagaatatatttgtgtacatattatatgtatgtatatttcaaagtaccacactgaaaattagacatttattaaccaaatttaacgtggtatttaaaggtaatatttttaatatgatacattacatattgtgaatgtatactaaaaaaacattttaaatgttaaaattataatttcagattcatataaccacaactgtgatatatcctaactataaccagttgttgaggggtatactagaagcagaatgaaaccacattttttggtttgataatatgcacttattgactcccactcattgttatgttaattaagttattattctgtctccttgtaattttgattacaaaaattttattatcctgagttagctgttacttttacagtacctgatactcctaaaacttttaacttatacaaattagtcaataatgaccccaattttttcattaaaataatagtggtgaattatatgttattgtgttaaaacctcacttgccaaattctggcttcacatttgtatttagggctatccttaaaatgatgagtctatattatctagctttctattaccctaatataaactggtataagaagactttccttttttctttatgcatggaagcatcaataaattgtttaaaaaccatgtatagtaaattcagcttaacccgtgatcttcttaagttaaaggtacttttgttttataaaagctctagataaaactttcttttctgatcatgaatcaagtatctgtggtttcatgcccctctctatacctttcaaagaactcctgaagcaacttaactcatcatttcagcctctgagtagaggtaaaacctatgtgtacttctgtttatgatccatattgatatttatgacatgaacacagaatagtaccttacatttgctaaacagacagttaatatcaaatcctttcaatattctgggaacccagggaagtttttaaaaatgtcattactttcaaaggaacagaagtagttaaccaaactaacaagcaaaacctgaggtttacctagtgacaccaaattatcggtattttaactgaatttacccattgactaagaatgaaccggatttggtggtggttttgtttctatgcaaactggacacaaattacaacagtaaatttttttataagtgcttctcccttctccatgatgtgacttccggagataaaggattcaaaagataaagacaaagtacgctcagagttgttaaccagaaagtcctggctgtggttgcagaaacactgttggaagaaaagagatgactaagtcaagtgtctgccttatcaaaagagcaaaaatgcctctggttttgtgtttgggagaaaaatatcttggacgcactgttttccttgataaaagtcatcttctctactgtgtgaaatgaatacttggaattctaattgttttgtgtgccaggggcagtaatgtccctgcctcttctcccaatcaaggttgaggagtggggctggggagaggacttaactgacttaagaagtaggaaaacaaaaacctctctcctcagccttccacctccaagagaggaggaaaaacagttgtctgctgtctgtaattcagtttgcgtgtattttatgctcatgcaccaacccatacagagtaaatcttttatcaactatatactggtgtttaatagagaatgattgtcttccgagttttttggttccttttttaactgtgttaaagtacttgaaatgtattgactgctgactatattttaaaaacaaaatgaaataatttgagttgtattacagaggttgacattgttcagggatgggacaaagccttcttcaatccttttcatactacttaatgattttggtgcaggaacctgagattttctgatttatatttcatgatatttcacatttgctcttcacagcatgagcatgaagcccagtggcaccaaatggctgggtacaatcaagtgatattttgtagcacctcactatctgaaaggccatgagttttcagatgatttcattgagcttcattgcagcctgaaattttaaaaaagttgtgtaatacgccaaccagtcaagttgtgttttggccagagatttagatatgtccaatttcctggctcatttcattgtgctctatgggtacgtataaaaagcaagaattctgtttcctaggcaaacattgcaactcagggctaaagtcatccagtgaaacttttagagccagaagtaactttgtcccagtcctacaatgtgaaaagagtgaatagttgcctctttttagccattttcatggctggtacatattcgtacgcattacttttcagaatcaatacgcactttcagatattcttatttttattctcttaagtctttattaactttggagagagaaatgatgcatctttttattttaaatgaagtagatcaacatggtggaacaaaatgataaagaacagaaaacatttcaatatattactaataactttttccaatataaatcctaaaattcctataacatagtattttacagttttatgaagctttctattgtgacttttatggaattaagagatgaagaagatgagatattttagcatttatatttttcaaaattatatgtatacttaaaaataaagtaactttatgcatttatgactgtcaaaaa

SEQ ID NO: 49791 - DNA, 6461 bp, Homo sapiens
gcggcggcggccgcggtggcagcgaaggcggcggcggcggcggcagtggcagtggccgctgcagccccacactccgccgccaaactggaggagcgacggaagccagaccccaggaggatggaggatgaagctgtcctggacagaggggcttccttcctcaagcatgtgtgtgatgaagaagaagtagaaggccaccataccatttacatcggagtccatgtgccgaagagttacaggagaaggagacgtcacaagagaaagacagggcacaaagaaaagaaggaaaaggagagaatctctgagaactactctgacaaatcagatattgaaaatgctgatgaatccagcagcagcatcctaaaacctctcatctctcctgctgcagaacgcatccgattcatcttgggagaggaggatgacagcccagctccccctcagctcttcacggaactggatgagctgctggccgtggatgggcaggagatggagtggaaggaaacagccaggtggatcaagtttgaagaaaaagtggaacagggtggggaaagatggagcaagccccatgtggccacattgtcccttcatagtttatttgagctgaggacatgtatggagaaaggatccatcatgcttgatcgggaggcttcttctctcccacagttggtggagatgattgttgaccatcagattgagacaggcctattgaaacctgaacttaaggataaggtgacctatactttgctccggaagcaccggcatcaaaccaagaaatccaaccttcggtccctggctgacattgggaagacagtctccagtgcaagtaggatgtttaccaaccctgataatggtagcccagccatgacccataggaatctgacttcctccagtctgaatgacatttctgataaaccggagaaggaccagctgaagaataagttcatgaaaaaattgccacgtgatgcagaagcttccaacgtgcttgttggggaggttgactttttggatactcctttcattgcctttgttaggctacagcaggctgtcatgctgggtgccctgactgaagttcctgtgcccacaaggttcttgttcattctcttaggtcctaaggggaaagccaagtcctaccacgagattggcagagccattgccaccctgatgtctgatgaggtgttccatgacattgcttataaagcaaaagacaggcacgacctgattgctggtattgatgagttcctagatgaagtcatcgtccttccacctggggaatgggatccagcaattaggatagagcctcctaagagtcttccatcctctgacaaaagaaagaatatgtactcaggtggagagaatgttcagatgaatggggatacgccccatgatggaggtcacggaggaggaggacatggggattgtgaagaattgcagcgaactggacggttctgtggtggactaattaaagacataaagaggaaagcgccattttttgccagtgatttttatgatgctttaaatattcaagctctttcggcaattctcttcatttatctggcaactgtaactaatgctatcacttttggaggactgcttggggatgccactgacaacatgcagggcgtgttggagagtttcctgggcactgctgtctctggagccatcttttgcctttttgctggtcaaccactcactattctgagcagcaccggacctgtcctagtttttgagaggcttctatttaatttcagcaaggacaataattttgactatttggagtttcgcctttggattggcctgtggtccgccttcctatgtctcattttggtagccactgatgccagcttcttggttcaatacttcacacgtttcacggaggagggcttttcctctctgattagcttcatctttatctatgatgctttcaagaagatgatcaagcttgcagattactaccccatcaactccaacttcaaagtgggctacaacactctcttttcctgtacctgtgtgccacctgacccagctaatatctcaatatctaatgacaccacactggccccagagtatttgccaactatgtcttctactgacatgtaccataatactacctttgactgggcatttttgtcgaagaaggagtgttcaaaatacggaggaaacctcgtcgggaacaactgtaattttgttcctgatatcacactcatgtcttttatcctcttcttgggaacctacacctcttccatggctctgaaaaaattcaaaactagtccttattttccaaccacagcaagaaaactgatcagtgattttgccattatcttgtccattctcatcttttgtgtaatagatgccctagtaggcgtggacaccccaaaactaattgtgccaagtgagttcaagccaacaagtccaaaccgaggttggttcgttccaccgtttggagaaaacccctggtgggtgtgccttgctgctgctatcccggctttgttggtcactatactgattttcatggaccaacaaattacagctgtgattgtaaacaggaaagaacataaactcaagaaaggagcagggtatcacttggatctcttttgggtggccatcctcatggttatatgctccctcatggctcttccgtggtatgtagctgctacggtcatctccattgctcacatcgacagtttgaagatggagacagagacttctgcacctggagaacaaccaaagtttctaggagtgagggaacaaagagtcactggaacccttgtgtttattctgactggtctgtcagtctttatggctcccatcttgaagtttatacccatgcctgtactctatggtgtgttcctgtatatgggagtagcatcccttaatggtgtgcagttcatggatcgtctgaagctgcttctgatgcctctgaagcatcagcctgacttcatctacctgcgtcatgttcctctgcgcagagtccacctgttcactttcctgcaggtgttgtgtctggccctgctttggatcctcaagtcaacggtggctgctatcatttttccagtaatgatcttggcacttgtagctgtcagaaaaggcatggactacctcttctcccagcatgacctcagcttcctggatgatgtcattccagaaaaggacaagaaaaagaaggaggatgagaagaaaaagaaaaagaagaagggaagtctggacagtgacaatgatgattctgactgcccatactcagaaaaagttccaagtattaaaattccaatggacatcatggaacagcaacctttcctaagcgatagcaaaccttctgacagagaaagatcaccaacattccttgaacgccacacatcatgctgataaaattcctttccttcagtcactcggtatgccaagtcctcctagaactccagtaaaagttgtgcctcaaattagaatagaacttgaacctgaagacaatgattatttctggaggagcaagggaacagaaactacattgtaacctgtttgtctttcttaaaactgacatttgttgttaatgtcatttgtttttgtttggctgtttgtttattttttaacttttatttcgtctcagtttttggtcacaggccaaataatacagcgctctctctgcttctctcttgcatagatacaatcaagacaatagtgcaccgttccttaaaaacagcatctgaggaatcccccttttgttcttaaactttcagatgtgtcctttgataaccaaattctgtcactcaagacacagacacccacagaccctgtcctttgcctctattaagcagaggatggaagtattaaggattttgtaacaccttttatgaaaatgttgaaggaacttaaaactttagctttggagctgtgcttactggcttgtctttgtctggtagaacaaaccttgacctccagacagagtcccttctcacttatagagctctccaggactggaaaaagtgctgctattttaacttgctcttgcttgtaaatcctaatcttagagttatcaaaagaagaaaaaactgaaggtactttactccctatagagaaaccattgccatcattgtagcaagtgctggaatgtcccttttttcctatgcaactttttttaaccctttaatgaacttatctgttgagtacattgaagaatatttttcttcctagattttgttgtttaaattatggggcctaacctgccacttattttttgtcaatttttaaaacttttttttaattactgtaaagaaaatgaattttttcctgcagcaggaaacatagttttgagtagttctacctcttatttgtagctgccaggctttctgtaaaaattgtattgtatataatgtgatttttacacatacatacacacacaaatacacaatctctagggtaagccagaaggcaagatcagattaaaaacaccatgtttctaagcatccatttttccctttctttaaaagaaacttaactgttctatgaaggagattgagggagaagagacaaactcctatgtcatgagaataaccgatgttctgataatagtagcatctaggtacagatgctggttgtattaccacgtcaatgtcctatgcagtattgttagacattttctcattttgaaatatttgtgtgtttgtgtatgtgctctgtgccatggctggtgtatatatgtgcaatgttagaaggcaaaagagtgatggtaggcagagggcaaagtcattgaatctcttatgccagttttcataaaacccaaaccacatatgaaaaaatccattaagggtccaagaagtctgtccatatgaaaatgagggtaaatatagtttatttcccaggtatcagtcattataattgatataatagctctaacatgcaatataaaattcataggagtattaatagcccatttacacatctataaaatgtaatgggattgcagagctgcagagtacagtgtaacagtactctcatgcaatttttttcaggatgcaaaggcaattattctttgtaagcgggacatttagaatatatttgtgtacatattatatgtatgtatatttcaaagtaccacactgaaaattagacatttattaaccaaatttaacgtggtatttaaaggtaatatttttaatatgatacattacatattgtgaatgtatactaaaaaaacattttaaatgttaaaattataatttcagattcatataaccacaactgtgatatatcctaactataaccagttgttgaggggtatactagaagcagaatgaaaccacattttttggtttgataatatgcacttattgactcccactcattgttatgttaattaagttattattctgtctccttgtaattttgattacaaaaattttattatcctgagttagctgttacttttacagtacctgatactcctaaaacttttaacttatacaaattagtcaataatgaccccaattttttcattaaaataatagtggtgaattatatgttattgtgttaaaacctcacttgccaaattctggcttcacatttgtatttagggctatccttaaaatgatgagtctatattatctagctttctattaccctaatataaactggtataagaagactttccttttttctttatgcatggaagcatcaataaattgtttaaaaaccatgtatagtaaattcagcttaacccgtgatcttcttaagttaaaggtacttttgttttataaaagctctagataaaactttcttttctgatcatgaatcaagtatctgtggtttcatgcccctctctatacctttcaaagaactcctgaagcaacttaactcatcatttcagcctctgagtagaggtaaaacctatgtgtacttctgtttatgatccatattgatatttatgacatgaacacagaatagtaccttacatttgctaaacagacagttaatatcaaatcctttcaatattctgggaacccagggaagtttttaaaaatgtcattactttcaaaggaacagaagtagttaaccaaactaacaagcaaaacctgaggtttacctagtgacaccaaattatcggtattttaactgaatttacccattgactaagaatgaaccggatttggtggtggttttgtttctatgcaaactggacacaaattacaacagtaaatttttttataagtgcttctcccttctccatgatgtgacttccggagataaaggattcaaaagataaagacaaagtacgctcagagttgttaaccagaaagtcctggctgtggttgcagaaacactgttggaagaaaagagatgactaagtcaagtgtctgccttatcaaaagagcaaaaatgcctctggttttgtgtttgggagaaaaatatcttggacgcactgttttccttgatggtgccaggggcagaaatggccctggctcttttccaatcaaaggtga

SEQ ID NO: 49792 - DNA, 5053 bp, Homo sapiens
cagaagtctctgtctccatcttcaaactgtcgatgtgagcaatggagatgaccgtagcagctacataccacggaagagccatgagggaacaaagagtcactggaacccttgtgtttattctgactggtctgtcagtctttatggctcccatcttgaagtttatacccatgcctgtactctatggtgtgttcctgtatatgggagtagcatcccttaatggtgtgcagttcatggatcgtctgaagctgcttctgatgcctctgaagcatcagcctgacttcatctacctgcgtcatgttcctctgcgcagagtccacctgttcactttcctgcaggtgttgtgtctggccctgctttggatcctcaagtcaacggtggctgctatcatttttccagtaatgatcttggcacttgtagctgtcagaaaaggcatggactacctcttctcccagcatgacctcagcttcctggatgatgtcattccagaaaaggacaagaaaaagaaggaggatgagaagaaaaagaaaaagaagaagggaagtctggacagtgacaatgatgattctgactgcccatactcagaaaaagttccaagtattaaaattccaatggacatcatggaacagcaacctttcctaagcgatagcaaaccttctgacagagaaagatcaccaacattccttgaacgccacacatcatgctgataaaattcctttccttcagtcactcggtatgccaagtcctcctagaactccagtaaaagttgtgcctcaaattagaatagaacttgaacctgaagacaatgattatttctggaggagcaagggaacagaaactacattgtaacctgtttgtctttcttaaaactgacatttgttgttaatgtcatttgtttttgtttggctgtttgtttattttttaacttttatttcgtctcagtttttggtcacaggccaaataatacagcgctctctctgcttctctcttgcatagatacaatcaagacaatagtgcaccgttccttaaaaacagcatctgaggaatcccccttttgttcttaaactttcagatgtgtcctttgataaccaaattctgtcactcaagacacagacacccacagaccctgtcctttgcctctattaagcagaggatggaagtattaaggattttgtaacaccttttatgaaaatgttgaaggaacttaaaactttagctttggagctgtgcttactggcttgtctttgtctggtagaacaaaccttgacctccagacagagtcccttctcacttatagagctctccaggactggaaaaagtgctgctattttaacttgctcttgcttgtaaatcctaatcttagagttatcaaaagaagaaaaaactgaaggtactttactccctatagagaaaccattgccatcattgtagcaagtgctggaatgtcccttttttcctatgcaactttttttaaccctttaatgaacttatctgttgagtacattgaagaatatttttcttcctagattttgttgtttaaattatggggcctaacctgccacttattttttgtcaatttttaaaacttttttttaattactgtaaagaaaatgaattttttcctgcagcaggaaacatagttttgagtagttctacctcttatttgtagctgccaggctttctgtaaaaattgtattgtatataatgtgatttttacacatacatacacacacaaatacacaatctctagggtaagccagaaggcaagatcagattaaaaacaccatgtttctaagcatccatttttccctttctttaaaagaaacttaactgttctatgaaggagattgagggagaagagacaaactcctatgtcatgagaataaccgatgttctgataatagtagcatctaggtacagatgctggttgtattaccacgtcaatgtcctatgcagtattgttagacattttctcattttgaaatatttgtgtgtttgtgtatgtgctctgtgccatggctggtgtatatatgtgcaatgttagaaggcaaaagagtgatggtaggcagagggcaaagtcattgaatctcttatgccagttttcataaaacccaaaccacatatgaaaaaatccattaagggtccaagaagtctgtccatatgaaaatgagggtaaatatagtttatttcccaggtatcagtcattataattgatataatagctctaacatgcaatataaaattcataggagtattaatagcccatttacacatctataaaatgtaatgggattgcagagctgcagagtacagtgtaacagtactctcatgcaatttttttcaggatgcaaaggcaattattctttgtaagcgggacatttagaatatatttgtgtacatattatatgtatgtatatttcaaagtaccacactgaaaattagacatttattaaccaaatttaacgtggtatttaaaggtaatatttttaatatgatacattacatattgtgaatgtatactaaaaaaacattttaaatgttaaaattataatttcagattcatataaccacaactgtgatatatcctaactataaccagttgttgaggggtatactagaagcagaatgaaaccacattttttggtttgataatatgcacttattgactcccactcattgttatgttaattaagttattattctgtctccttgtaattttgattacaaaaattttattatcctgagttagctgttacttttacagtacctgatactcctaaaacttttaacttatacaaattagtcaataatgaccccaattttttcattaaaataatagtggtgaattatatgttattgtgttaaaacctcacttgccaaattctggcttcacatttgtatttagggctatccttaaaatgatgagtctatattatctagctttctattaccctaatataaactggtataagaagactttccttttttctttatgcatggaagcatcaataaattgtttaaaaaccatgtatagtaaattcagcttaacccgtgatcttcttaagttaaaggtacttttgttttataaaagctctagataaaactttcttttctgatcatgaatcaagtatctgtggtttcatgcccctctctatacctttcaaagaactcctgaagcaacttaactcatcatttcagcctctgagtagaggtaaaacctatgtgtacttctgtttatgatccatattgatatttatgacatgaacacagaatagtaccttacatttgctaaacagacagttaatatcaaatcctttcaatattctgggaacccagggaagtttttaaaaatgtcattactttcaaaggaacagaagtagttaaccaaactaacaagcaaaacctgaggtttacctagtgacaccaaattatcggtattttaactgaatttacccattgactaagaatgaaccggatttggtggtggttttgtttctatgcaaactggacacaaattacaacagtaaatttttttataagtgcttctcccttctccatgatgtgacttccggagataaaggattcaaaagataaagacaaagtacgctcagagttgttaaccagaaagtcctggctgtggttgcagaaacactgttggaagaaaagagatgactaagtcaagtgtctgccttatcaaaagagcaaaaatgcctctggttttgtgtttgggagaaaaatatcttggacgcactgttttccttgataaaagtcatcttctctactgtgtgaaatgaatacttggaattctaattgttttgtgtgccaggggcagtaatgtccctgcctcttctcccaatcaaggttgaggagtggggctggggagaggacttaactgacttaagaagtaggaaaacaaaaacctctctcctcagccttccacctccaagagaggaggaaaaacagttgtctgctgtctgtaattcagtttgcgtgtattttatgctcatgcaccaacccatacagagtaaatcttttatcaactatatactggtgtttaatagagaatgattgtcttccgagttttttggttccttttttaactgtgttaaagtacttgaaatgtattgactgctgactatattttaaaaacaaaatgaaataatttgagttgtattacagaggttgacattgttcagggatgggacaaagccttcttcaatccttttcatactacttaatgattttggtgcaggaacctgagattttctgatttatatttcatgatatttcacatttgctcttcacagcatgagcatgaagcccagtggcaccaaatggctgggtacaatcaagtgatattttgtagcacctcactatctgaaaggccatgagttttcagatgatttcattgagcttcattgcagcctgaaattttaaaaaagttgtgtaatacgccaaccagtcaagttgtgttttggccagagatttagatatgtccaatttcctggctcatttcattgtgctctatgggtacgtataaaaagcaagaattctgtttcctaggcaaacattgcaactcagggctaaagtcatccagtgaaacttttagagccagaagtaactttgtcccagtcctacaatgtgaaaagagtgaatagttgcctctttttagccattttcatggctggtacatattcgtacgcattacttttcagaatcaatacgcactttcagatattcttatttttattctcttaagtctttattaactttggagagagaaatgatgcatctttttattttaaatgaagtagatcaacatggtggaacaaaatgataaagaacagaaaacatttcaatatattactaataactttttccaatataaatcctaaaattcctataacatagtattttacagttttatgaagctttctattgtgacttttatggaattaagagatgaagaagatgagatattttagcatttatatttttcaaaattatatgtatacttaaaaataaagtaactttatgcatttatgactgtcaaaaa

SEQ ID NO: 49793 - DNA, 3585 bp, Homo sapiens
gcggcggcggccgcggtggcagcgaaggcggcggcggcggcggcagtggcagtggccgctgcagccccacactccgccgccaaactggaggagcgacggaagccagaccccaggaggatggaggatgaagctgtcctggacagaggggcttccttcctcaagcatgtgtgtgatgaagaagaagtagaaggccaccataccatttacatcggagtccatgtgccgaagagttacaggagaaggagacgtcacaagagaaagacagggcacaaagaaaagaaggaaaaggagagaatctctgagaactactctgacaaatcagatattgaaaatgctgatgaatccagcagcagcatcctaaaacctctcatctctcctgctgcagaacgcatccgattcatcttgggagaggaggatgacagcccagctccccctcagctcttcacggaactggatgagctgctggccgtggatgggcaggagatggagtggaaggaaacagccaggtggatcaagtttgaagaaaaagtggaacagggtggggaaagatggagcaagccccatgtggccacattgtcccttcatagtttatttgagctgaggacatgtatggagaaaggatccatcatgcttgatcgggaggcttcttctctcccacagttggtggagatgattgttgaccatcagattgagacaggcctattgaaacctgaacttaaggataaggtgacctatactttgctccggaagcaccggcatcaaaccaagaaatccaaccttcggtccctggctgacattgggaagacagtctccagtgcaagtaggatgtttaccaaccctgataatggtagcccagccatgacccataggaatctgacttcctccagtctgaatgacatttctgataaaccggagaaggaccagctgaagaataagttcatgaaaaaattgccacgtgatgcagaagcttccaacgtgcttgttggggaggttgactttttggatactcctttcattgcctttgttaggctacagcaggctgtcatgctgggtgccctgactgaagttcctgtgcccacaaggttcttgttcattctcttaggtcctaaggggaaagccaagtcctaccacgagattggcagagccattgccaccctgatgtctgatgaggtgttccatgacattgcttataaagcaaaagacaggcacgacctgattgctggtattgatgagttcctagatgaagtcatcgtccttccacctggggaatgggatccagcaattaggatagagcctcctaagagtcttccatcctctgacaaaagaaagaatatgtactcaggtggagagaatgttcagatgaatggggatacgccccatgatggaggtcacggaggaggaggacatggggattgtgaagaattgcagcgaactggacggttctgtggtggactaattaaagacataaagaggaaagcgccattttttgccagtgatttttatgatgctttaaatattcaagctctttcggcaattctcttcatttatctggcaactgtaactaatgctatcacttttggaggactgcttggggatgccactgacaacatgcagggcgtgttggagagtttcctgggcactgctgtctctggagccatcttttgcctttttgctggtcaaccactcactattctgagcagcaccggacctgtcctagtttttgagaggcttctatttaatttcagcaaggacaataattttgactatttggagtttcgcctttggattggcctgtggtccgccttcctatgtctcattttggtagccactgatgccagcttcttggttcaatacttcacacgtttcacggaggagggcttttcctctctgattagcttcatctttatctatgatgctttcaagaagatgatcaagcttgcagattactaccccatcaactccaacttcaaagtgggctacaacactctcttttcctgtacctgtgtgccacctgacccagctaatatctcaatatctaatgacaccacactggccccagagtatttgccaactatgtcttctactgacatgtaccataatactacctttgactgggcatttttgtcgaagaaggagtgttcaaaatacggaggaaacctcgtcgggaacaactgtaattttgttcctgatatcacactcatgtcttttatcctcttcttgggaacctacacctcttccatggctctgaaaaaattcaaaactagtccttattttccaaccacagcaagaaaactgatcagtgattttgccattatcttgtccattctcatcttttgtgtaatagatgccctagtaggcgtggacaccccaaaactaattgtgccaagtgagttcaagccaacaagtccaaaccgaggttggttcgttccaccgtttggagaaaacccctggtgggtgtgccttgctgctgctatcccggctttgttggtcactatactgattttcatggaccaacaaattacagctgtgattgtaaacaggaaagaacataaactcaagaaaggagcagggtatcacttggatctcttttgggtggccatcctcatggttatatgctccctcatggctcttccgtggtatgtagctgctacggtcatctccattgctcacatcgacagtttgaagatggagacagagacttctgcacctggagaacaaccaaagtttctaggagtgagggaacaaagagtcactggaacccttgtgtttattctgactggtctgtcagtctttatggctcccatcttgaagtttatacccatgcctgtactctatggtgtgttcctgtatatgggagtagcatcccttaatggtgtgcagttcatggatcgtctgaagctgcttctgatgcctctgaagcatcagcctgacttcatctacctgcgtcatgttcctctgcgcagagtccacctgttcactttcctgcaggtgttgtgtctggccctgctttggatcctcaagtcaacggtggctgctatcatttttccagtaatgatcttggcacttgtagctgtcagaaaaggcatggactacctcttctcccagcatgacctcagcttcctggatgatgtcattccagaaaaggacaagaaaaagaaggaggatgagaagaaaaagaaaaagaagaagggaagtctggacagtgacaatgatgattctgactgcccatactcagaaaaagttccaagtattaaaattccaatggacatcatggaacagcaacctttcctaagcgatagcaaaccttctgacagagaaagatcaccaacattccttgaacgccacacatcatgctgataaaattcctttccttcagtcactcggtatgccaagtactaataactttttccaatataaatcctaaaattcctataacatagtattttacagttttatgaagctttctattgtgacttttatggaattaagagatgaagaagatgagatattttagcatttatatttttcaaaattatatgtatacttaaaaataaagtaactttatgcatttatgactgtcaaaaa

SEQ ID NO: 49794 - DNA, 603 bp, Homo sapiens
gtgaattcaaatcacatattgcagtcactttaagagatttttttatagttacgttgggtttatacgctatccttgaggtattatttacatgatatcaacacctttgttgttttagccaaacattgattttgtcaatgtgtagtttttttgaaggtgaaaagacaagagcatgtttatgaagacaagaggtagattggtaatcttttgatttggtttcagggaacaaagagtcactggaacccttgtgtttattctgactggtctgtcagtctttatggctcccatcttgaaggtaaatatgtgaaacattcacctcttccttctcagaacactgacatataattggacatgtgaagagtgaaattcctcatgagatatttgcgagattctcatcagttctgtaacacactgaagcaggggtcaagtagaaagagagctttaaatagcttttgtcttgatttccttctcactctttcatcccctcccttatccttagttttgcagttatttgattgaactatattaaattaacaatatccaaactttctgatctgtgaaaatagtagtttcatgcaattgaatcagactgatcttctccccctc

SEQ ID NO: 49795 - DNA, 200 bp, Homo sapiens
gcggcggcggccgcggtggcagcgaaggcggcggcggcggcggcagtggcagtggccgctgcagccccacactccgccgccaaactggaggagcgacggaagccagaccccaggagggtttagaggaagagtttgggtggtctgcttctccctcactgctaagtcccctgcgcgcaactgggcgtctttacgaggactgc

SEQ ID NO: 49796 - DNA, 7633 bp, Homo sapiens
aggagaagtctgagcattctttttttcttttttattactataggatggaggatgaagctgtcctggacagaggggcttccttcctcaagcatgtgtgtgatgaagaagaagtagaaggccaccataccatttacatcggagtccatgtgccgaagagttacaggagaaggagacgtcacaagagaaagacagggcacaaagaaaagaaggaaaaggagagaatctctgagaactactctgacaaatcagatattgaaaatgctgatgaatccagcagcagcatcctaaaacctctcatctctcctgctgcagaacgcatccgattcatcttgggagaggaggatgacagcccagctccccctcagctcttcacggaactggatgagctgctggccgtggatgggcaggagatggagtggaaggaaacagccaggtggatcaagtttgaagaaaaagtggaacagggtggggaaagatggagcaagccccatgtggccacattgtcccttcatagtttatttgagctgaggacatgtatggagaaaggatccatcatgcttgatcgggaggcttcttctctcccacagttggtggagatgattgttgaccatcagattgagacaggcctattgaaacctgaacttaaggataaggtgacctatactttgctccggaagcaccggcatcaaaccaagaaatccaaccttcggtccctggctgacattgggaagacagtctccagtgcaagtaggatgtttaccaaccctgataatggtagcccagccatgacccataggaatctgacttcctccagtctgaatgacatttctgataaaccggagaaggaccagctgaagaataagttcatgaaaaaattgccacgtgatgcagaagcttccaacgtgcttgttggggaggttgactttttggatactcctttcattgcctttgttaggctacagcaggctgtcatgctgggtgccctgactgaagttcctgtgcccacaaggttcttgttcattctcttaggtcctaaggggaaagccaagtcctaccacgagattggcagagccattgccaccctgatgtctgatgaggtgttccatgacattgcttataaagcaaaagacaggcacgacctgattgctggtattgatgagttcctagatgaagtcatcgtccttccacctggggaatgggatccagcaattaggatagagcctcctaagagtcttccatcctctgacaaaagaaagaatatgtactcaggtggagagaatgttcagatgaatggggatacgccccatgatggaggtcacggaggaggaggacatggggattgtgaagaattgcagcgaactggacggttctgtggtggactaattaaagacataaagaggaaagcgccattttttgccagtgatttttatgatgctttaaatattcaagctctttcggcaattctcttcatttatctggcaactgtaactaatgctatcacttttggaggactgcttggggatgccactgacaacatgcagggcgtgttggagagtttcctgggcactgctgtctctggagccatcttttgcctttttgctggtcaaccactcactattctgagcagcaccggacctgtcctagtttttgagaggcttctatttaatttcagcaaggacaataattttgactatttggagtttcgcctttggattggcctgtggtccgccttcctatgtctcattttggtagccactgatgccagcttcttggttcaatacttcacacgtttcacggaggagggcttttcctctctgattagcttcatctttatctatgatgctttcaagaagatgatcaagcttgcagattactaccccatcaactccaacttcaaagtgggctacaacactctcttttcctgtacctgtgtgccacctgacccagctaatatctcaatatctaatgacaccacactggccccagagtatttgccaactatgtcttctactgacatgtaccataatactacctttgactgggcatttttgtcgaagaaggagtgttcaaaatacggaggaaacctcgtcgggaacaactgtaattttgttcctgatatcacactcatgtcttttatcctcttcttgggaacctacacctcttccatggctctgaaaaaattcaaaactagtccttattttccaaccacagcaagaaaactgatcagtgattttgccattatcttgtccattctcatcttttgtgtaatagatgccctagtaggcgtggacaccccaaaactaattgtgccaagtgagttcaagccaacaagtccaaaccgaggttggttcgttccaccgtttggagaaaacccctggtgggtgtgccttgctgctgctatcccggctttgttggtcactatactgattttcatggaccaacaaattacagctgtgattgtaaacaggaaagaacataaactcaagaaaggagcagggtatcacttggatctcttttgggtggccatcctcatggttatatgctccctcatggctcttccgtggtatgtagctgctacggtcatctccattgctcacatcgacagtttgaagatggagacagagacttctgcacctggagaacaaccaaagtttctaggagtgagggaacaaagagtcactggaacccttgtgtttattctgactggtctgtcagtctttatggctcccatcttgaagtttatacccatgcctgtactctatggtgtgttcctgtatatgggagtagcatcccttaatggtgtgcagttcatggatcgtctgaagctgcttctgatgcctctgaagcatcagcctgacttcatctacctgcgtcatgttcctctgcgcagagtccacctgttcactttcctgcaggtgttgtgtctggccctgctttggatcctcaagtcaacggtggctgctatcatttttccagtaatgatcttggcacttgtagctgtcagaaaaggcatggactacctcttctcccagcatgacctcagcttcctggatgatgtcattccagaaaaggacaagaaaaagaaggaggatgagaagaaaaagaaaaagaagaagggaagtctggacagtgacaatgatgattctgactgcccatactcagaaaaagttccaagtattaaaattccaatggacatcatggaacagcaacctttcctaagcgatagcaaaccttctgacagagaaagatcaccaacattccttgaacgccacacatcatgctgataaaattcctttccttcagtcactcggtatgccaagtcctcctagaactccagtaaaagttgtgcctcaaattagaatagaacttgaacctgaagacaatgattatttctggaggagcaagggaacagaaactacattgtaacctgtttgtctttcttaaaactgacatttgttgttaatgtcatttgtttttgtttggctgtttgtttattttttaacttttatttcgtctcagtttttggtcacaggccaaataatacagcgctctctctgcttctctcttgcatagatacaatcaagacaatagtgcaccgttccttaaaaacagcatctgaggaatcccccttttgttcttaaactttcagatgtgtcctttgataaccaaattctgtcactcaagacacagacacccacagaccctgtcctttgcctctattaagcagaggatggaagtattaaggattttgtaacaccttttatgaaaatgttgaaggaacttaaaactttagctttggagctgtgcttactggcttgtctttgtctggtagaacaaaccttgacctccagacagagtcccttctcacttatagagctctccaggactggaaaaagtgctgctattttaacttgctcttgcttgtaaatcctaatcttagagttatcaaaagaagaaaaaactgaaggtactttactccctatagagaaaccattgccatcattgtagcaagtgctggaatgtcccttttttcctatgcaactttttttaaccctttaatgaacttatctgttgagtacattgaagaatatttttcttcctagattttgttgtttaaattatggggcctaacctgccacttattttttgtcaatttttaaaacttttttttaattactgtaaagaaaatgaattttttcctgcagcaggaaacatagttttgagtagttctacctcttatttgtagctgccaggctttctgtaaaaattgtattgtatataatgtgatttttacacatacatacacacacaaatacacaatctctagggtaagccagaaggcaagatcagattaaaaacaccatgtttctaagcatccatttttccctttctttaaaagaaacttaactgttctatgaaggagattgagggagaagagacaaactcctatgtcatgagaataaccgatgttctgataatagtagcatctaggtacagatgctggttgtattaccacgtcaatgtcctatgcagtattgttagacattttctcattttgaaatatttgtgtgtttgtgtatgtgctctgtgccatggctggtgtatatatgtgcaatgttagaaggcaaaagagtgatggtaggcagagggcaaagtcattgaatctcttatgccagttttcataaaacccaaaccacatatgaaaaaatccattaagggtccaagaagtctgtccatatgaaaatgagggtaaatatagtttatttcccaggtatcagtcattataattgatataatagctctaacatgcaatataaaattcataggagtattaatagcccatttacacatctataaaatgtaatgggattgcagagctgcagagtacagtgtaacagtactctcatgcaatttttttcaggatgcaaaggcaattattctttgtaagcgggacatttagaatatatttgtgtacatattatatgtatgtatatttcaaagtaccacactgaaaattagacatttattaaccaaatttaacgtggtatttaaaggtaatatttttaatatgatacattacatattgtgaatgtatactaaaaaaacattttaaatgttaaaattataatttcagattcatataaccacaactgtgatatatcctaactataaccagttgttgaggggtatactagaagcagaatgaaaccacattttttggtttgataatatgcacttattgactcccactcattgttatgttaattaagttattattctgtctccttgtaattttgattacaaaaattttattatcctgagttagctgttacttttacagtacctgatactcctaaaacttttaacttatacaaattagtcaataatgaccccaattttttcattaaaataatagtggtgaattatatgttattgtgttaaaacctcacttgccaaattctggcttcacatttgtatttagggctatccttaaaatgatgagtctatattatctagctttctattaccctaatataaactggtataagaagactttccttttttctttatgcatggaagcatcaataaattgtttaaaaaccatgtatagtaaattcagcttaacccgtgatcttcttaagttaaaggtacttttgttttataaaagctctagataaaactttcttttctgatcatgaatcaagtatctgtggtttcatgcccctctctatacctttcaaagaactcctgaagcaacttaactcatcatttcagcctctgagtagaggtaaaacctatgtgtacttctgtttatgatccatattgatatttatgacatgaacacagaatagtaccttacatttgctaaacagacagttaatatcaaatcctttcaatattctgggaacccagggaagtttttaaaaatgtcattactttcaaaggaacagaagtagttaaccaaactaacaagcaaaacctgaggtttacctagtgacaccaaattatcggtattttaactgaatttacccattgactaagaatgaaccggatttggtggtggttttgtttctatgcaaactggacacaaattacaacagtaaatttttttataagtgcttctcccttctccatgatgtgacttccggagataaaggattcaaaagataaagacaaagtacgctcagagttgttaaccagaaagtcctggctgtggttgcagaaacactgttggaagaaaagagatgactaagtcaagtgtctgccttatcaaaagagcaaaaatgcctctggttttgtgtttgggagaaaaatatcttggacgcactgttttccttgataaaagtcatcttctctactgtgtgaaatgaatacttggaattctaattgttttgtgtgccaggggcagtaatgtccctgcctcttctcccaatcaaggttgaggagtggggctggggagaggacttaactgacttaagaagtaggaaaacaaaaacctctctcctcagccttccacctccaagagaggaggaaaaacagttgtctgctgtctgtaattcagtttgcgtgtattttatgctcatgcaccaacccatacagagtaaatcttttatcaactatatactggtgtttaatagagaatgattgtcttccgagttttttggttccttttttaactgtgttaaagtacttgaaatgtattgactgctgactatattttaaaaacaaaatgaaataatttgagttgtattacagaggttgacattgttcagggatgggacaaagccttcttcaatccttttcatactacttaatgattttggtgcaggaacctgagattttctgatttatatttcatgatatttcacatttgctcttcacagcatgagcatgaagcccagtggcaccaaatggctgggtacaatcaagtgatattttgtagcacctcactatctgaaaggccatgagttttcagatgatttcattgagcttcattgcagcctgaaattttaaaaaagttgtgtaatacgccaaccagtcaagttgtgttttggccagagatttagatatgtccaatttcctggctcatttcattgtgctctatgggtacgtataaaaagcaagaattctgtttcctaggcaaacattgcaactcagggctaaagtcatccagtgaaacttttagagccagaagtaactttgtcccagtcctacaatgtgaaaagagtgaatagttgcctctttttagccattttcatggctggtacatattcgtacgcattacttttcagaatcaatacgcactttcagatattcttatttttattctcttaagtctttattaactttggagagagaaatgatgcatctttttattttaaatgaagtagatcaacatggtggaacaaaatgataaagaacagaaaacatttcaatatattactaataactttttccaatataaatcctaaaattcctataacatagtattttacagttttatgaagctttctattgtgacttttatggaattaagagatgaagaagatgagatattttagcatttatatttttcaaaattatatgtatacttaaaaataaagtaactttatgcatttatgactgtcaaaaa

SEQ ID NO: 49797 - DNA, 7454 bp, Homo sapiens
gcggcggcggccgcggtggcagcgaaggcggcggcggcggcggcagtggcagtggccgctgcagccccacactccgccgccaaactggaggagcgacggaagccagaccccaggaggatggaggatgaagctgtcctggacagaggggcttccttcctcaagcatgtgtgtgatgaagaagaagtagaaggccaccataccatttacatcggagtccatgtgccgaagagttacaggagaaggagacgtcacaagagaaagacagggcacaaagaaaagaaggaaaaggagagaatctctgagaactactctgacaaatcagatattgaaaatgctgatgaatccagcagcagcatcctaaaacctctcatctctcctgctgcagaacgcatccgattcatcttgggagaggaggatgacagcccagctccccctcagctcttcacggaactggatgagctgctggccgtggatgggcaggagatggagtggaaggaaacagccaggtggatcaagtttgaagaaaaagtggaacagggtggggaaagatggagcaagccccatgtggccacattgtcccttcatagtttatttgagctgaggacatgtatggagaaaggatccatcatgcttgatcgggaggcttcttctctcccacagttggtggagatgattgttgaccatcagattgagacaggcctattgaaacctgaacttaaggataaggtgacctatactttgctccggaagcaccggcatcaaaccaagaaatccaaccttcggtccctggctgacattgggaagacagtctccagtgcaagtaggatgtttaccaaccctgataatggtagcccagccatgacccataggaatctgacttcctccagtctgaatgacatttctgataaaccggagaaggaccagctgaagaataagttcatgaaaaaattgccacgtgatgcagaagcttccaacgtgcttgttggggaggttgactttttggatactcctttcattgcctttgttaggctacagcaggctgtcatgctgggtgccctgactgaagttcctgtgcccacaaggttcttgttcattctcttaggtcctaaggggaaagccaagtcctaccacgagattggcagagccattgccaccctgatgtctgatgaggtgttccatgacattgcttataaagcaaaagacaggcacgacctgattgctggtattgatgagttcctagatgaagtcatcgtccttccacctggggaatgggatccagcaattaggatagagcctcctaagagtcttccatcctctgacaaaagaaagaatatgtactcaggtggagagaatgttcagatgaatggggatacgccccatgatggaggtcacggaggaggaggacatggggattgtgaagaattgcagcgaactggacggttctgtggtggactaattaaagacataaagaggaaagcgccattttttgccagtgatttttatgatgctttaaatattcaagctctttcggcaattctcttcatttatctggcaactgtaactaatgctatcacttttggaggactgcttggggatgccactgacaacatgcagggcgtgttggagagtttcctgggcactgctgtctctggagccatcttttgcctttttgctggtcaaccactcactattctgagcagcaccggacctgtcctagtttttgagaggcttctatttaatttcagcaaggacaataattttgactatttggagtttcgcctttggattggcctgtggtccgccttcctatgtctcattttggtagccactgatgccagcttcttggttcaatacttcacacgtttcacggaggagggcttttcctctctgattagcttcatctttatctatgatgctttcaagaagatgatcaagcttgcagattactaccccatcaactccaacttcaaagtgggctacaacactctcttttcctgtacctgtgtgccacctgacccagctaatatctcaatatctaatgacaccacactggccccagagtatttgccaactatgtcttctactgacatgtaccataatactacctttgactgggcatttttgtcgaagaaggagtgttcaaaatacggaggaaacctcgtcgggaacaactgtaattttgttcctgatatcacactcatgtcttttatcctcttcttgggaacctacacctcttccatggctctgaaaaaattcaaaactagtccttattttccaaccacagcaagaaaactgatcagtgattttgccattatcttgtccattctcatcttttgtgtaatagatgccctagtaggcgtggacaccccaaaactaattgtgccaagtgagttcaagccaacaagtccaaaccgaggttggttcgttccaccgtttggagaaaacccctggtgggtgtgccttgctgctgctatcccggctttgttggtcactatactgattttcatggaccaacaaattacagctgtgattgtaaacaggaaagaacataaactcaagtttatacccatgcctgtactctatggtgtgttcctgtatatgggagtagcatcccttaatggtgtgcagttcatggatcgtctgaagctgcttctgatgcctctgaagcatcagcctgacttcatctacctgcgtcatgttcctctgcgcagagtccacctgttcactttcctgcaggtgttgtgtctggccctgctttggatcctcaagtcaacggtggctgctatcatttttccagtaatgatcttggcacttgtagctgtcagaaaaggcatggactacctcttctcccagcatgacctcagcttcctggatgatgtcattccagaaaaggacaagaaaaagaaggaggatgagaagaaaaagaaaaagaagaagggaagtctggacagtgacaatgatgattctgactgcccatactcagaaaaagttccaagtattaaaattccaatggacatcatggaacagcaacctttcctaagcgatagcaaaccttctgacagagaaagatcaccaacattccttgaacgccacacatcatgctgataaaattcctttccttcagtcactcggtatgccaagtcctcctagaactccagtaaaagttgtgcctcaaattagaatagaacttgaacctgaagacaatgattatttctggaggagcaagggaacagaaactacattgtaacctgtttgtctttcttaaaactgacatttgttgttaatgtcatttgtttttgtttggctgtttgtttattttttaacttttatttcgtctcagtttttggtcacaggccaaataatacagcgctctctctgcttctctcttgcatagatacaatcaagacaatagtgcaccgttccttaaaaacagcatctgaggaatcccccttttgttcttaaactttcagatgtgtcctttgataaccaaattctgtcactcaagacacagacacccacagaccctgtcctttgcctctattaagcagaggatggaagtattaaggattttgtaacaccttttatgaaaatgttgaaggaacttaaaactttagctttggagctgtgcttactggcttgtctttgtctggtagaacaaaccttgacctccagacagagtcccttctcacttatagagctctccaggactggaaaaagtgctgctattttaacttgctcttgcttgtaaatcctaatcttagagttatcaaaagaagaaaaaactgaaggtactttactccctatagagaaaccattgccatcattgtagcaagtgctggaatgtcccttttttcctatgcaactttttttaaccctttaatgaacttatctgttgagtacattgaagaatatttttcttcctagattttgttgtttaaattatggggcctaacctgccacttattttttgtcaatttttaaaacttttttttaattactgtaaagaaaatgaattttttcctgcagcaggaaacatagttttgagtagttctacctcttatttgtagctgccaggctttctgtaaaaattgtattgtatataatgtgatttttacacatacatacacacacaaatacacaatctctagggtaagccagaaggcaagatcagattaaaaacaccatgtttctaagcatccatttttccctttctttaaaagaaacttaactgttctatgaaggagattgagggagaagagacaaactcctatgtcatgagaataaccgatgttctgataatagtagcatctaggtacagatgctggttgtattaccacgtcaatgtcctatgcagtattgttagacattttctcattttgaaatatttgtgtgtttgtgtatgtgctctgtgccatggctggtgtatatatgtgcaatgttagaaggcaaaagagtgatggtaggcagagggcaaagtcattgaatctcttatgccagttttcataaaacccaaaccacatatgaaaaaatccattaagggtccaagaagtctgtccatatgaaaatgagggtaaatatagtttatttcccaggtatcagtcattataattgatataatagctctaacatgcaatataaaattcataggagtattaatagcccatttacacatctataaaatgtaatgggattgcagagctgcagagtacagtgtaacagtactctcatgcaatttttttcaggatgcaaaggcaattattctttgtaagcgggacatttagaatatatttgtgtacatattatatgtatgtatatttcaaagtaccacactgaaaattagacatttattaaccaaatttaacgtggtatttaaaggtaatatttttaatatgatacattacatattgtgaatgtatactaaaaaaacattttaaatgttaaaattataatttcagattcatataaccacaactgtgatatatcctaactataaccagttgttgaggggtatactagaagcagaatgaaaccacattttttggtttgataatatgcacttattgactcccactcattgttatgttaattaagttattattctgtctccttgtaattttgattacaaaaattttattatcctgagttagctgttacttttacagtacctgatactcctaaaacttttaacttatacaaattagtcaataatgaccccaattttttcattaaaataatagtggtgaattatatgttattgtgttaaaacctcacttgccaaattctggcttcacatttgtatttagggctatccttaaaatgatgagtctatattatctagctttctattaccctaatataaactggtataagaagactttccttttttctttatgcatggaagcatcaataaattgtttaaaaaccatgtatagtaaattcagcttaacccgtgatcttcttaagttaaaggtacttttgttttataaaagctctagataaaactttcttttctgatcatgaatcaagtatctgtggtttcatgcccctctctatacctttcaaagaactcctgaagcaacttaactcatcatttcagcctctgagtagaggtaaaacctatgtgtacttctgtttatgatccatattgatatttatgacatgaacacagaatagtaccttacatttgctaaacagacagttaatatcaaatcctttcaatattctgggaacccagggaagtttttaaaaatgtcattactttcaaaggaacagaagtagttaaccaaactaacaagcaaaacctgaggtttacctagtgacaccaaattatcggtattttaactgaatttacccattgactaagaatgaaccggatttggtggtggttttgtttctatgcaaactggacacaaattacaacagtaaatttttttataagtgcttctcccttctccatgatgtgacttccggagataaaggattcaaaagataaagacaaagtacgctcagagttgttaaccagaaagtcctggctgtggttgcagaaacactgttggaagaaaagagatgactaagtcaagtgtctgccttatcaaaagagcaaaaatgcctctggttttgtgtttgggagaaaaatatcttggacgcactgttttccttgataaaagtcatcttctctactgtgtgaaatgaatacttggaattctaattgttttgtgtgccaggggcagtaatgtccctgcctcttctcccaatcaaggttgaggagtggggctggggagaggacttaactgacttaagaagtaggaaaacaaaaacctctctcctcagccttccacctccaagagaggaggaaaaacagttgtctgctgtctgtaattcagtttgcgtgtattttatgctcatgcaccaacccatacagagtaaatcttttatcaactatatactggtgtttaatagagaatgattgtcttccgagttttttggttccttttttaactgtgttaaagtacttgaaatgtattgactgctgactatattttaaaaacaaaatgaaataatttgagttgtattacagaggttgacattgttcagggatgggacaaagccttcttcaatccttttcatactacttaatgattttggtgcaggaacctgagattttctgatttatatttcatgatatttcacatttgctcttcacagcatgagcatgaagcccagtggcaccaaatggctgggtacaatcaagtgatattttgtagcacctcactatctgaaaggccatgagttttcagatgatttcattgagcttcattgcagcctgaaattttaaaaaagttgtgtaatacgccaaccagtcaagttgtgttttggccagagatttagatatgtccaatttcctggctcatttcattgtgctctatgggtacgtataaaaagcaagaattctgtttcctaggcaaacattgcaactcagggctaaagtcatccagtgaaacttttagagccagaagtaactttgtcccagtcctacaatgtgaaaagagtgaatagttgcctctttttagccattttcatggctggtacatattcgtacgcattacttttcagaatcaatacgcactttcagatattcttatttttattctcttaagtctttattaactttggagagagaaatgatgcatctttttattttaaatgaagtagatcaacatggtggaacaaaatgataaagaacagaaaacatttcaatatattactaataactttttccaatataaatcctaaaattcctataacatagtattttacagttttatgaagctttctattgtgacttttatggaattaagagatgaagaagatgagatattttagcatttatatttttcaaaattatatgtatacttaaaaataaagtaactttatgcatttatgactgtcaaaaa

SEQ ID NO: 49798 - DNA, 470 bp, Homo sapiens
gacagggagtcttgctctgttgcccaggctaaagtgcagaggtgcgatctcagctcactgcgacctccgtctcctgggctcaagcaatcctcctgcctcagcctcctgagtagctgggactacaggcatgtgccaccacgtctggcagattttagctttttaatattcctggaggacttgttttgagactgtttctcgttaggaaaccaggaatgcttctgaaatattctaaaagtcatgtggagagagtttacctgggaatgtacatttctagtaaccattttatttgttatgaaacaagggattcttatggctttagaaatgtaacaggaagggatttgaagggggcacatggaccaatcttgtcagattggatttagtcccttgaacctgggaggcaggggttgtagtgagctgagattgcaccactgcactccaatctcggtgacagagcgagactccattgttta

SEQ ID NO: 49799 - DNA, 459 bp, Homo sapiens
tactctgatttatgttcatgaggtcaggagatcgcgaccgtgctggctaacagtgaaaccctgtctccactaaaaatacaaaaaattagccgggcgtggtagctgggactacaggcatgtgccaccacgtctggcagattttagctttttaatattcctggaggacttgttttgagactgtttctcgttaggaaaccaggaatgcttctgaaatattctaaaagtcatgtggagagagtttacctgggaatgtacatttctagtaaccattttatttgttatgaaacaagggattcttatggctttagaaatgtaacaggaagggatttgaagggggcacatggaccaatcttgtcagattggatttagtcccttgaacctgggaggcaggggttgtagtgagctgagattgcaccactgcactccaatctcggtgacagagcgagactccattgttta

SEQ ID NO: 49800 - DNA, 479 bp, Homo sapiens
gaatatgagtgttaggaccactgtagtaattgggaagaaagttacattagttaaactctgttgcccaggctggtctctaactcctgggctcaagcaatcctcctgcctcagcctcctgagtagctgggactacaggcatgtgccaccacgtctggcagattttagctttttaatattcctggaggacttgttttgagactgtttctcgttaggaaaccaggaatgcttctgaaatattctaaaagtcatgtggagagagtttacctgggaatgtacatttctagtaaccattttatttgttatgaaacaagggattcttatggctttagaaatgtaacaggaagggatttgaagggggcacatggaccaatcttgtcagattggatttagtcccttgaacctgggaggcaggggttgtagtgagctgagattgcaccactgcactccaatctcggtgacagagcgagactccattgttt

SEQ ID NO: 49801 - DNA, 403 bp, Homo sapiens
cactgaactacctggcatgagtgttatttttgtaactggatcctcactgaatcaccatgtttgacaaatagctacgaatcagaaagattgagcaactgcctaacgtcacacagttgggatgttgtggggctgggttgtagatgtttggctgtgaagcccatctctttccacccagctgcattgtctctcagaaactttccatcaccattctgagtcagctctttagaacttcaccattacagcaacctccactctcagatgaatcttccttaattatacctctggtcatgtgatatatgtggcaattgcaaagggaattcagtatcaactcctcattctagactccaggctttccagcctggcaacagagcgagactccatctcaaaaaaaagaaaaagaaag

SEQ ID NO: 49802 - DNA, 414 bp, Homo sapiens
ctcccgttttcctctgttccaggctttccctctgtcctcatcctgtcagaatagtactgcctgcccttacacacaatatataaaactctgccatcaagtcctgttgtttttaatatgtttattgatgtgaaagggatttagaataaattttctctgaataaagcctgaggtaaactttctgtcctcttctctcttcccccttcctgcatttctgctgtagtacaagcctttcctacacaaacgcatacttttaatagattggaagtggttatgtgcagaacaagtatattaatagcttttgaaaatattcttgtgctgggattacaggcaagagccaccgtgcatggccttaactgtacacttttaaaatgatacaatttatgttacttgttttttttaaagcgtaatttttct

SEQ ID NO: 49803 - DNA, 3910 bp, Homo sapiens
gataaagttgctgttttgacaacatggcggcgcccatggtccgtggcccggcagtgctcgcctaaaggtggagaacgaggagtagaggagccgcaggccagagcctgtgagcagatccagacctacagataaaaaacattatttaatctatctgggatttactccggcttatgatttgagggccttctcaccttctgaagaatggcttctgtttggcagagattgggtttttatgcctctcttctgaaaagacagctaaatggtgggccagatgtcatcaagtgggaaaggagagtaattcccggatgtaccagaagcatctacagtgccacgggaaagtggacaaaagagtatacattgcagacaagaaaggatgttgagaaatggtggcatcaacgaataaaagaacaggcctccaaaatttcagaagctgataaatcgaagccaaaattttacgtgctttccatgttcccttatccttctggtaagctgcacatgggccatgtgcgtgtctacaccatcagcgacaccatagcacggttccagaagatgagagggatgcaggtcatcaaccccatgggatgggatgcttttggattgcctgctgaaaatgccgcagtcgagaggaatctacatccacaaagttggacacaaagtaatattaaacacatgaggaaacagcttgatcgtctgggcctgtgtttcagctgggatagggaaataactacgtgtttgccagattactacaagtggactcagtatctctttattaaactgtatgaggctgggctggcctatcaaaaggaggccctggttaactgggacccagtggatcaaacagtgcttgccaatgagcaggtggatgaacatggctgttcatggcgttctggagcaaaggtggaacagaagtacctcagacaatggtttattaagacaaccgcttatgcaaaggccatgcaggacgcgttggcagaccttccagaatggtatggaataaaaggcatgcaagcccactggattggggactgtgtgggctgccacctggacttcacattaaaggttcatgggcaagccacgggcgaaaagctgactgcctatacggccacccctgaagccatttatggcacctcccacgtggccatctcgcccagccacagactcctacatgggcacagctctctgaaggaagccttgaggatggcccttgtccctggcaaagattgcctcacgcctgtaatggctgtgaacatgcttacccagcaggaggtccctgtcgttattttggccaaagctgacttggaaggctctctggattcaaaaataggaattcccagtactagctcagaggacaccatcttagcccaaaccctgggcctggcctactctgaagtcattgaaactttgccagatggcacagagagactgagcagctctgctgagttcacaggtatgacccggcaggatgcttttctagccctgactcagaaagcccgggggaagagagtgggtggagacgtgacaagtgataaactgaaagactggctgatttcacggcagcggtactggggcacaccaatccccattgtccactgcccagtctgtggccccacacctgtgcccctggaggacttgcctgtgaccctgcccaacatcgcatctttcactggcaagggaggccccccactggccatggcttcagagtgggtgaactgctcctgcccaaggtgcaagggagcagccaagagagagacagacacgatggatacctttgttgattctgcttggtactacttcagatacactgaccctcataatccacacagcccttttaacacagcagtggccgattactggatgcctgtggatttgtacattggagggaaagaacatgccgtcatgcacttgttctatgcaagattctttagtcatttttgccatgatcaaaaaatggttaaacatagggagccttttcataagctgctggcccaaggccttatcaaggggcagacattccgcctaccatctggacagtatctacagagagaggaagtggatctcacaggttccgttcctgttcatgcaaaaacgaaagagaagttagaggtgacgtgggagaagatgagtaagtccaaacacaacggggtggacccagaggaagttgtggagcagtatgggatcgacacgattcggctctacatcctttttgctgcccctcctgagaaggatatcttgtgggatgtgaaaactgatgctctccctggggtgctgagatggcaacaacgactgtggaccttgacaactcggtttattgaggccagggcttctgggaagtctccccagcctcagctgctgagtaacaaggagaaagccgaggccaggaagctctgggagtacaagaactccgtcatctctcaggtgaccacccatttcacagaggacttctcactgaattctgcaatttctcagctgatgggactcagcaatgccctctcgcaagcctctcagagcgtcattctccacagccccgagtttgaggatgctttgtgtgccctgatggtgatggctgctccactggcccctcatgtaacctcagagatctgggcaggcctggcgctggtgccgaggaagctctgtgcccactacacttgggatgccagtgtgctgctccaggcatggcctgctgtggacccggagttcctgcagcagcctgaggttgtccagatggcagttctgatcaacaataaagcttgtggcaaaattcctgtgccccaacaagttgcccgggaccaggacaaagtccacgaatttgttcttcaaagcgagctgggtgtcaggcttttgcaaggacgaagcatcaagaagtccttcctttccccgaggccatctgatcccatgggaagccatcagagacactgctggtgggagcaggaaggagcagtgcccctcgagcagccaggaagcctgcggatctgggaaatggctctgccttaggcgcttctcgggaatttgaggccagcctgaggaactgcaggactcaggtgcaatgtgccagccacttggaactgctaactgagcctccagatggtagtgaatggtctctttgccttcaggctggatgaggaagtcatttaggaaatgttcaaataaccaatatgtggaaatggacacagggatcttctgaagttgctttgaatcaaaaggcaggcagtgctggttcctctgcctgtgtccccaccactccccagctctgtcatgcaggcctgtcctccccaaccccagctggacgtgcctcccaggcctgctgtggttctgacacacaggatcccaggcaaggcaccacttcctcacatgaatgaggagcagcaagtcataaccactcccttgggtatacaatttgctgtgtagtgaagtggaaccaggctcaggctgctggtcccaacctcagagccccaccgcagcccagtagggatgcagcacgccccagagggctcatgtgggccccagatggcaatgccaccattgttgatgtgactccagagccagttattaggaagagcaagctcaccacagaggagtggaactgaggccccccagatgttgcctccggtgtccaagccacagcggtctggctgttgggaagatggccaggaatggactcataccattggcacattaggctaatcctggttttatgtgaagtcagcaattaagtgttcccactagaactgacctaagccactgattaatatttaatgagggaaggtaggggagaatctagccattttataatgccagaaatctatatatgttatctgatgccatttttctgaagtagcctcacatgtggtccccctgcagttcagcagttaacagatgacttttttagtgtaataaaatgtttatcatctat

SEQ ID NO: 49804 - DNA, 2029 bp, Homo sapiens
ggctcggtaccccactttatgcgtggggaatgcataggcaagataggtagcgaatgctgctcagtactttggaatcagctctcagggtagcacaaaggcattccttcaccagcagaacttcagagagatgacccattcaaatcagcagccttgtttttccaaatgcacactttagaatggcttatccatccatctttacagctctgcgtgccatttgtgaaaaacaaaagctacccaacaacctgggattataaaccaggccaaagtggtgagcacccagcagccatggtctggcttcccaccggctcctcacacagctccaagccaggctgtgttgggatggaagctttggtcctgctctcataagcctccctgttcttagagtgaccccacgcttctgtgcctcggcattgcaggcctggcgctggtgccgaggaagctctgtgcccactacacttgggatgccagtgtgctgctccaggcatggcctgctgtggacccggagttcctgcagcagcctgaggttgtccagatggcagttctgatcaacaataaagcttgtggcaaaattcctgtgccccaacaagttgcccgggaccaggacaaagtccacgaatttgttcttcaaagcgagctgggtgtcaggcttttgcaaggacgaagcatcaagaagtccttcctttccccgagaactgccctcatcaacttcctggtgcaagattgacagccaggaggctgcagctaccacgagggcctctgaggaacctccttccaggcctgggatgagggggcgatgtctgctggcccaggggaagggaaaagacaaatgtcttgactgttgacctcggtcctgtggcagactgcagtcaacagtgtgcctctgtagtgtggcctggtgctggggtgaaggtgagctgggcaaaggagaaatatgagctactgaggagggggttggacatcctgcccctcaccccccacccacactgcaggtagaggaggccatctgatcccatgggaagccatcagagacactgctggtgggagcaggaaggagcagtgcccctcgagcagccaggaagcctgcggatctgggaaatggctctgccttaggcgcttctcgggaatttgaggccagcctgaggaactgcaggactcaggtgcaatgtgccagccacttggaactgctaactgagcctccagatggtagtgaatggtctctttgccttcaggctggatgaggaagtcatttaggaaatgttcaaataaccaatatgtggaaatggacacagggatcttctgaagttgctttgaatcaaaaggcaggcagtgctggttcctctgcctgtgtccccaccactccccagctctgtcatgcaggcctgtcctccccaaccccagctggacgtgcctcccaggcctgctgtggttctgacacacaggatcccaggcaaggcaccacttcctcacatgaatgaggagcagcaagtcataaccactcccttgggtatacaatttgctgtgtagtgaagtggaaccaggctcaggctgctggtcccaacctcagagccccaccgcagcccagtagggatgcagcacgccccagagggctcatgtgggccccagatggcaatgccaccattgttgatgtgactccagagccagttattaggaagagcaagctcaccacagaggagtggaactgaggccccccagatgttgcctccggtgtccaagccacagcggtctggctgttgggaagatggccaggaatggactcataccattggcacattaggctaatcctggttttatgtgaagtcagcaattaagtgttcccactagaactgacctaagccactgattaatatttaatgagggaaggtaggggagaatctagccattttataatgccagaaatctatatatgttatctgatgccatttttctgaagtagcctcacatgtggtccccctgcagttcagcagttaacagatgacttttttagtgtaataaaatgtttatcatctat

SEQ ID NO: 49805 - DNA, 1270 bp, Homo sapiens
aaactaggctagtagagccggggttaatcggacgagggttgctggccagtgggaagggaaaagacaaatgtcttgactgttgacctcggtcctgtggcagactgcagtcaacagtgtgcctctgtagtgtggcctggtgctggggtgaaggtgagctgggcaaaggagaaatatgagctactgaggagggggttggacatcctgcccctcaccccccacccacactgcaggtagaggaggccatctgatcccatgggaagccatcagagacactgctggtgggagcaggaaggagcagtgcccctcgagcagccaggaagcctgcggatctgggaaatggctctgccttaggcgcttctcgggaatttgaggccagcctgaggaactgcaggactcaggtgcaatgtgccagccacttggaactgctaactgagcctccagatggtagtgaatggtctctttgccttcaggctggatgaggaagtcatttaggaaatgttcaaataaccaatatgtggaaatggacacagggatcttctgaagttgctttgaatcaaaaggcaggcagtgctggttcctctgcctgtgtccccaccactccccagctctgtcatgcaggcctgtcctccccaaccccagctggacgtgcctcccaggcctgctgtggttctgacacacaggatcccaggcaaggcaccacttcctcacatgaatgaggagcagcaagtcataaccactcccttgggtatacaatttgctgtgtagtgaagtggaaccaggctcaggctgctggtcccaacctcagagccccaccgcagcccagtagggatgcagcacgccccagagggctcatgtgggccccagatggcaatgccaccattgttgatgtgactccagagccagttattaggaagagcaagctcaccacagaggagtggaactgaggccccccagatgttgcctccggtgtccaagccacagcggtctggctgttgggaagatggccaggaatggactcataccattggcacattaggctaatcctggttttatgtgaagtcagcaattaagtgttcccactagaactgacctaagccactgattaatatttaatgagggaaggtaggggagaatctagccattttataatgccagaaatctatatatgttatctgatgccatttttctgaagtagcctcacatgtggtccccctgcagttcagcagttaacagatgacttttttagtgtaataaaatgtttatcatctat

SEQ ID NO: 49806 - DNA, 1309 bp, Homo sapiens
aaacagacaaccccgacaaccccaaccacaccacggccaacaagtcatgtagaggcgggtgggtataggggcgatgtctgctggcccaggggaagggaaaagacaaatgtcttgactgttgacctcggtcctgtggcagactgcagtcaacagtgtgcctctgtagtgtggcctggtgctggggtgaaggtgagctgggcaaaggagaaatatgagctactgaggagggggttggacatcctgcccctcaccccccacccacactgcaggtagaggaggccatctgatcccatgggaagccatcagagacactgctggtgggagcaggaaggagcagtgcccctcgagcagccaggaagcctgcggatctgggaaatggctctgccttaggcgcttctcgggaatttgaggccagcctgaggaactgcaggactcaggtgcaatgtgccagccacttggaactgctaactgagcctccagatggtagtgaatggtctctttgccttcaggctggatgaggaagtcatttaggaaatgttcaaataaccaatatgtggaaatggacacagggatcttctgaagttgctttgaatcaaaaggcaggcagtgctggttcctctgcctgtgtccccaccactccccagctctgtcatgcaggcctgtcctccccaaccccagctggacgtgcctcccaggcctgctgtggttctgacacacaggatcccaggcaaggcaccacttcctcacatgaatgaggagcagcaagtcataaccactcccttgggtatacaatttgctgtgtagtgaagtggaaccaggctcaggctgctggtcccaacctcagagccccaccgcagcccagtagggatgcagcacgccccagagggctcatgtgggccccagatggcaatgccaccattgttgatgtgactccagagccagttattaggaagagcaagctcaccacagaggagtggaactgaggccccccagatgttgcctccggtgtccaagccacagcggtctggctgttgggaagatggccaggaatggactcataccattggcacattaggctaatcctggttttatgtgaagtcagcaattaagtgttcccactagaactgacctaagccactgattaatatttaatgagggaaggtaggggagaatctagccattttataatgccagaaatctatatatgttatctgatgccatttttctgaagtagcctcacatgtggtccccctgcagttcagcagttaacagatgacttttttagtgtaataaaatgtttatcatctat

SEQ ID NO: 49807 - DNA, 2726 bp, Homo sapiens
  misc_feature (2628)..(2628): n is a, c, g, or t
  misc_feature (2684)..(2684): n is a, c, g, or t
  misc_feature (2721)..(2721): n is a, c, g, or t
gataaagttgctgttttgacaacatggcggcgcccatggtccgtggcccggcagtgctcgcctaaaggtggagaacgaggagtagaggagccgcaggccagagcctgtgagcagatccagacctacagataaaaaacattatttaatctatctgggatttactccggcttatgatttgagggccttctcaccttctgaagaatggcttctgtttggcagagattgggtttttatgcctctcttctgaaaagacagctaaatggtgggccagatgtcatcaagtgggaaaggagagtaattcccggatgtaccagaagcatctacagtgccacgggaaagtggacaaaagagtatacattgcagacaagaaaggatgttgagaaatggtggcatcaacgaataaaagaacaggcctccaaaatttcagaagctgataaatcgaagccaaaattttacgtgctttccatgttcccttatccttctggtaagctgcacatgggccatgtgcgtgtctacaccatcagcgacaccatagcacggttccagaagatgagagggatgcaggtcatcaaccccatgggatgggatgcttttggattgcctgctgaaaatgccgcagtcgagaggaatctacatccacaaagttggacacaaagtaatattaaacacatgaggaaacagcttgatcgtctgggcctgtgtttcagctgggatagggaaataactacgtgtttgccagattactacaagtggactcagtatctctttattaaactgtatgaggctgggctggcctatcaaaaggaggccctggttaactgggacccagtggatcaaacagtgcttgccaatgagcaggtggatgaacatggctgttcatggcgttctggagcaaaggtggaacagaagtacctcagacaatggtttattaagacaaccgcttatgcaaaggccatgcaggacgcgttggcagaccttccagaatggtatggaataaaaggcatgcaagcccactggattggggactgtgtgggctgccacctggacttcacattaaaggttcatgggcaagccacgggcgaaaagctgactgcctatacggccacccctgaagccatttatggcacctcccacgtggccatctcgcccagccacagactcctacatgggcacagctctctgaaggaagccttgaggatggcccttgtccctggcaaagattgcctcacgcctgtaatggctgtgaacatgcttacccagcaggaggtccctgtcgttattttggccaaagctgacttggaaggctctctggattcaaaaataggaattcccagtactagctcagaggacaccatcttagcccaaaccctgggcctggcctactctgaagtcattgaaactttgccagatggcacagagagactgagcagctctgctgagttcacaggtatgacccggcaggatgcttttctagccctgactcagaaagcccgggggaagagagtgggtggagacgtgacaagtgataaactgaaagactggctgatttcacggcagcggtactggggcacaccaatccccattgtccactgcccagtctgtggccccacacctgtgcccctggaggacttgcctgtgaccctgcccaacatcgcatctttcactggcaagggaggccccccactggccatggcttcagagtgggtgaactgctcctgcccaaggtgcaagggagcagccaagagagagacagacacgatggatacctttgttgattctgcttggtactacttcagatacactgaccctcataatccacacagcccttttaacacagcagtggccgattactggatgcctgtggatttgtacattggagggaaagaacatgccgtcatgcacttgttctatgcaagattctttagtcatttttgccatgatcaaaaaatggttaaacatagggagccttttcataagctgctggcccaaggccttatcaaggggcagacattccgcctaccatctggacagtatctacagagagaggaagtggatctcacaggttccgttcctgttcatgcaaaaacgaaagagaagttagaggtgacgtgggagaagatgagtaagtccaaacacaacggggtggacccagaggaagttgtggagcagtatgggatcgacacgattcggctctacatcctttttgctgcccctcctgagaaggatatcttgtgggatgtgaaaactgatgctctccctggggtgctgagatggcaacaacgactgtggaccttgacaactcggtttattgaggccagggcttctgggaagtctccccagcctcagctgctgagtaacaaggagaaagccgaggccaggaagctctgggagtacaagaactccgtcatctctcaggtgaccacccatttcacagaggacttctcactgaattctgcaatttctcagctgatgggactcagcaatgccctctcgcaagcctctcagagcgtcattctccacagccccgagtttgaggatgctttgtgtgccctgatggtgatggctgctccactggcccctcatgtaacctcagagatctgggcaggcatcctgtacaactgccatacngaggttttggaaatcttccgctgcaactgggtcacaggacaagccacacaggaccnagcttactaaaagaagtgatgatctctcttctgggancttcg

SEQ ID NO: 49808 - DNA, 4218 bp, Homo sapiens
gataaagttgctgttttgacaacatggcggcgcccatggtccgtggcccggcagtgctcgcctaaaggtggagaacgaggagtagaggagccgcaggccagagcctgtgagcagatccagacctacagataaaaaacattatttaatctatctgggatttactccggcttatgatttgagggccttctcaccttctgaagaatggcttctgtttggcagagattgggtttttatgcctctcttctgaaaagacagctaaatggtgggccagatgtcatcaagtgggaaaggagagtaattcccggatgtaccagaagcatctacagtgccacgggaaagtggacaaaagagtatacattgcagacaagaaaggatgttgagaaatggtggcatcaacgaataaaagaacaggcctccaaaatttcagaagctgataaatcgaagccaaaattttacgtgctttccatgttcccttatccttctggtaagctgcacatgggccatgtgcgtgtctacaccatcagcgacaccatagcacggttccagaagatgagagggatgcaggtcatcaaccccatgggatgggatgcttttggattgcctgctgaaaatgccgcagtcgagaggaatctacatccacaaagttggacacaaagtaatattaaacacatgaggaaacagcttgatcgtctgggcctgtgtttcagctgggatagggaaataactacgtgtttgccagattactacaagtggactcagtatctctttattaaactgtatgaggctgggctggcctatcaaaaggaggccctggttaactgggacccagtggatcaaacagtgcttgccaatgagcaggtggatgaacatggctgttcatggcgttctggagcaaaggtggaacagaagtacctcagacaatggtttattaagacaaccgcttatgcaaaggccatgcaggacgcgttggcagaccttccagaatggtatggaataaaaggcatgcaagcccactggattggggactgtgtgggctgccacctggacttcacattaaaggttcatgggcaagccacgggcgaaaagctgactgcctatacggccacccctgaagccatttatggcacctcccacgtggccatctcgcccagccacagactcctacatgggcacagctctctgaaggaagccttgaggatggcccttgtccctggcaaagattgcctcacgcctgtaatggctgtgaacatgcttacccagcaggaggtccctgtcgttattttggccaaagctgacttggaaggctctctggattcaaaaataggaattcccagtactagctcagaggacaccatcttagcccaaaccctgggcctggcctactctgaagtcattgaaactttgccagatggcacagagagactgagcagctctgctgagttcacaggtatgacccggcaggatgcttttctagccctgactcagaaagcccgggggaagagagtgggtggagacgtgacaagtgataaactgaaagactggctgatttcacggcagcggtactggggcacaccaatccccattgtccactgcccagtctgtggccccacacctgtgcccctggaggacttgcctgtgaccctgcccaacatcgcatctttcactggcaagggaggccccccactggccatggcttcagagtgggtgaactgctcctgcccaaggtgcaagggagcagccaagagagagacagacacgatggatacctttgttgattctgcttggtactacttcagatacactgaccctcataatccacacagcccttttaacacagcagtggccgattactggatgcctgtggatttgtacattggagggaaagaacatgccgtcatgcacttgttctatgcaagattctttagtcatttttgccatgatcaaaaaatggttaaacatagggagccttttcataagctgctggcccaaggccttatcaaggggcagacattccgcctaccatctggacagtatctacagagagaggaagtggatctcacaggttccgttcctgttcatgcaaaaacgaaagagaagttagaggtgacgtgggagaagatgagtaagtccaaacacaacggggtggacccagaggaagttgtggagcagtatgggatcgacacgattcggctctacatcctttttgctgcccctcctgagaaggatatcttgtgggatgtgaaaactgatgctctccctggggtgctgagatggcaacaacgactgtggaccttgacaactcggtttattgaggccagggcttctgggaagtctccccagcctcagctgctgagtaacaaggagaaagccgaggccaggaagctctgggagtacaagaactccgtcatctctcaggtgaccacccatttcacagaggacttctcactgaattctgcaatttctcagctgatgggactcagcaatgccctctcgcaagcctctcagagcgtcattctccacagccccgagtttgaggatgctttgtgtgccctgatggtgatggctgctccactggcccctcatgtaacctcagagatctgggcaggcctggcgctggtgccgaggaagctctgtgcccactacacttgggatgccagtgtgctgctccaggcatggcctgctgtggacccggagttcctgcagcagcctgaggttgtccagatggcagttctgatcaacaataaagcttgtggcaaaattcctgtgccccaacaagttgcccgggaccaggacaaagtccacgaatttgttcttcaaagcgagctgggtgtcaggcttttgcaaggacgaagcatcaagaagtccttcctttccccgagaactgccctcatcaacttcctggtgcaagattgacagccaggaggctgcagctaccacgagggcctctgaggaacctccttccaggcctgggatgagggggcgatgtctgctggcccaggggaagggaaaagacaaatgtcttgactgttgacctcggtcctgtggcagactgcagtcaacagtgtgcctctgtagtgtggcctggtgctggggtgaaggtgagctgggcaaaggagaaatatgagctactgaggagggggttggacatcctgcccctcaccccccacccacactgcaggtagaggaggccatctgatcccatgggaagccatcagagacactgctggtgggagcaggaaggagcagtgcccctcgagcagccaggaagcctgcggatctgggaaatggctctgccttaggcgcttctcgggaatttgaggccagcctgaggaactgcaggactcaggtgcaatgtgccagccacttggaactgctaactgagcctccagatggtagtgaatggtctctttgccttcaggctggatgaggaagtcatttaggaaatgttcaaataaccaatatgtggaaatggacacagggatcttctgaagttgctttgaatcaaaaggcaggcagtgctggttcctctgcctgtgtccccaccactccccagctctgtcatgcaggcctgtcctccccaaccccagctggacgtgcctcccaggcctgctgtggttctgacacacaggatcccaggcaaggcaccacttcctcacatgaatgaggagcagcaagtcataaccactcccttgggtatacaatttgctgtgtagtgaagtggaaccaggctcaggctgctggtcccaacctcagagccccaccgcagcccagtagggatgcagcacgccccagagggctcatgtgggccccagatggcaatgccaccattgttgatgtgactccagagccagttattaggaagagcaagctcaccacagaggagtggaactgaggccccccagatgttgcctccggtgtccaagccacagcggtctggctgttgggaagatggccaggaatggactcataccattggcacattaggctaatcctggttttatgtgaagtcagcaattaagtgttcccactagaactgacctaagccactgattaatatttaatgagggaaggtaggggagaatctagccattttataatgccagaaatctatatatgttatctgatgccatttttctgaagtagcctcacatgtggtccccctgcagttcagcagttaacagatgacttttttagtgtaataaaatgtttatcatctat

SEQ ID NO: 49809 - DNA, 4799 bp, Homo sapiens
gataaagttgctgttttgacaacatggcggcgcccatggtccgtggcccggcagtgctcgcctaaaggtggagaacgaggagtagaggagccgcaggccagagcctgtgagcagatccagacctacagataaaaaacattatttaatctatctgggatttactccggcttatgatttgagggccttctcaccttctgaagaatggcttctgtttggcagagattgggtttttatgcctctcttctgaaaagacagctaaatggtgggccagatgtcatcaagtgggaaaggagagtaattcccggatgtaccagaagcatctacagtgccacgggaaagtggacaaaagagtatacattgcagacaagaaaggatgttgagaaatggtggcatcaacgaataaaagaacaggcctccaaaatttcagaagctgataaatcgaagccaaaattttacgtgctttccatgttcccttatccttctggtaagctgcacatgggccatgtgcgtgtctacaccatcagcgacaccatagcacggttccagaagatgagagggatgcaggtcatcaaccccatgggatgggatgcttttggattgcctgctgaaaatgccgcagtcgagaggaatctacatccacaaagttggacacaaagtaatattaaacacatgaggaaacagcttgatcgtctgggcctgtgtttcagctgggatagggaaataactacgtgtttgccagattactacaagtggactcagtatctctttattaaactgtatgaggctgggctggcctatcaaaaggaggccctggttaactgggacccagtggatcaaacagtgcttgccaatgagcaggtggatgaacatggctgttcatggcgttctggagcaaaggtggaacagaagtacctcagacaatggtttattaagacaaccgcttatgcaaaggccatgcaggacgcgttggcagaccttccagaatggtatggaataaaaggcatgcaagcccactggattggggactgtgtgggctgccacctggacttcacattaaaggttcatgggcaagccacgggcgaaaagctgactgcctatacggccacccctgaagccatttatggcacctcccacgtggccatctcgcccagccacagactcctacatgggcacagctctctgaaggaagccttgaggatggcccttgtccctggcaaagattgcctcacgcctgtaatggctgtgaacatgcttacccagcaggaggtccctgtcgttattttggccaaagctgacttggaaggctctctggattcaaaaataggaattcccagtactagctcagaggacaccatcttagcccaaaccctgggcctggcctactctgaagtcattgaaactttgccagatggcacagagagactgagcagctctgctgagttcacaggtatgacccggcaggatgcttttctagccctgactcagaaagcccgggggaagagagtgggtggagacgtgacaagtgataaactgaaagactggctgatttcacggcagcggtactggggcacaccaatccccattgtccactgcccagtctgtggccccacacctgtgcccctggaggacttgcctgtgaccctgcccaacatcgcatctttcactggcaagggaggccccccactggccatggcttcagagtgggtgaactgctcctgcccaaggtgcaagggagcagccaagagagagacagacacgatggatacctttgttgattctgcttggtactacttcagatacactgaccctcataatccacacagcccttttaacacagcagtggccgattactggatgcctgtggatttgtacattggagggaaagaacatgccgtcatgcacttgttctatgcaagattctttagtcatttttgccatgatcaaaaaatggttaaacatagggagccttttcataagctgctggcccaaggccttatcaaggggcagacattccgcctaccatctggacagtatctacagagagaggaagtggatctcacaggttccgttcctgttcatgcaaaaacgaaagagaagttagaggtgacgtgggagaagatgagtaagtccaaacacaacggggtggacccagaggaagttgtggagcagtatgggatcgacacgattcggctctacatcctttttgctgcccctcctgagaaggatatcttgtgggatgtgaaaactgatgctctccctggggtgctgagatggcaacaacgactgtggaccttgacaactcggtttattgaggccagggcttctgggaagtctccccagcctcagctgctgagtaacaaggagaaagccgaggccaggaagctctgggagtacaagaactccgtcatctctcaggtgaccacccatttcacagaggacttctcactgaattctgcaatttctcagctgatgggactcagcaatgccctctcgcaagcctctcagagcgtcattctccacagccccgagtttgaggatgctttgtgtgccctgatggtgatggctgctccactggcccctcatgtaacctcagagatctgggcaggcctggcgctggtgccgaggaagctctgtgcccactacacttgggatgccagtgtgctgctccaggcatggcctgctgtggacccggagttcctgcagcagcctgaggttgtccagatggcagttctgatcaacaataaagcttgtggcaaaattcctgtgccccaacaagttgcccgggaccaggacaaagtccacgaatttgttcttcaaagcgagctgggtgtcaggcttttgcaaggacgaagcatcaagaagtccttcctttccccgagaactgccctcatcaacttcctggtgcaagattgacagccaggaggctgcagctaccacgagggcctctgaggaacctccttccaggcctgggatgagggggcgatgtctgctggcccaggggaagggaaaagacaaatgtcttgactgttgacctcggtcctgtggcagactgcagtcaacagtgtgcctctgtagtgtggcctggtgctggggtgaaggtgagctgggcaaaggagaaatatgagctactgaggagggggttggacatcctgcccctcaccccccacccacactgcaggtagaggaggccatctgatcccatgggaagccatcagagacactgctggtgggagcaggaaggagcagtgcccctcgagcagccaggaagcctgcggatctgggaaatggctctgccttaggcgcttctcgggaatttgaggccagcctgaggaactgcaggactcaggtgcaatgtgccagccacttggaactgctaactgagcctccagatggtagtgaatggtctctttgccttcaggctggatgaggaagtcatttaggaaatgttcaaataaccaatatgtggaaatggacacagggatcttctgaagttgctttgaatcaaaaggcaggcagtgctggttcctctgcctgtgtccccaccactccccagctctgtcatgcaggcctgtcctccccaaccccagctggacgtgcctcccaggcctgctgtggttctgacacacaggatcccaggcaaggcaccacttcctcacatgaatgaggagcagcaagtcataaccactcccttgggtatacaatttgctgtgtagtgaagtggaaccaggctcaggctgctggtcccaacctcagagccccaccgcagcccagtagggatgcagcacgccccagagggctcatgtgggccccagatggcaatgccaccattgttgatgtgactccagagccagttattaggaagagcaagctcaccacagaggagtggaactgaggccccccagatgttgcctccggtgtccaagccacagcggtctggctgttgggaagatggccaggaatggactcataccattggcacattaggctaatcctggttttatgtgaagtcagcaattaagtgttcccactagaactgacctaagccactgattaatatttaatgagggaaggtaggggagaatctagccattttataatgccagaaatctatatatgttatctgatgccatttttctgaagtagcctcacatgtggtccccctgcagttcagcagttaacagatgacttttttagtgtaataaaatgtttatcatctatgacttcaggacatatgtgtgatcctggaatacaccatattccaatttcagagttaattacaaacagattgaggtattccatcatcatcggaagcattggctgtgtgtctgactccacatggaatgctataaagtgggatacatgtggttcttcttgttccagaacttacagtccatggtagacaacactgatacaggcaaactagcaacagcaattaagtcactggttctcagacttaatactctgcctggtcctcatgcccagatattccaatttaattggtccatggtgtggcttgaacaccaggaatctttaaaactccacaagtgattctaatgggcagcaaagtttgagaatcactggacacattgatgcacttgagccatcatttctatctagttcttcctcttcctaatcttcaggttagcggggataagtttggtccaggaccaagagttggaccaaaagggaagacaggggccagaagtctagagtgctagagccgacttgaatgtactcagtctcattgcacatggcagtgaatatggattaaatataagcccatgaaaatatttggtaca

SEQ ID NO: 49810 - DNA, 3376 bp, Homo sapiens
gataaagttgctgttttgacaacatggcggcgcccatggtccgtggcccggcagtgctcgcctaaaggtggagaacgaggagtagaggagccgcaggccagagcctgtgagcagatccagacctacagataaaaaacattatttaatctatctgggatttactccggcttatgatttgagggccttctcaccttctgaagaatggcttctgtttggcagagattgggtttttatgcctctcttctgaaaagacagctaaatggtgggccagatgtcatcaagtgggaaaggagagtaattcccggatgtaccagaagcatctacagtgccacgggaaagtggacaaaagagtatacattgcagacaagaaaggatgttgagaaatggtggcatcaacgaataaaagaacaggcctccaaaatttcagaagctgataaatcgaagccaaaattttacgtgctttccatgttcccttatccttctggtaagctgcacatgggccatgtgcgtgtctacaccatcagcgacaccatagcacggttccagaagatgagagggatgcaggtcatcaaccccatgggatgggatgcttttggattgcctgctgaaaatgccgcagtcgagaggaatctacatccacaaagttggacacaaagtaatattaaacacatgaggaaacagcttgatcgtctgggcctgtgtttcagctgggatagggaaataactacgtgtttgccagattactacaagtggactcagtatctctttattaaactgtatgaggctgggctggcctatcaaaaggaggccctggttaactgggacccagtggatcaaacagtgcttgccaatgagcaggtggatgaacatggctgttcatggcgttctggagcaaaggtggaacagaagtacctcagacaatggtttattaagacaaccgcttatgcaaaggccatgcaggacgcgttggcagaccttccagaatggtatggaataaaaggcatgcaagcccactggattggggactgtgtgggctgccacctggacttcacattaaaggttcatgggcaagccacgggcgaaaagctgactgcctatacggccacccctgaagccatttatggcacctcccacgtggccatctcgcccagccacagactcctacatgggcacagctctctgaaggaagccttgaggatggcccttgtccctggcaaagattgcctcacgcctgtaatggctgtgaacatgcttacccagcaggaggtccctgtcgttattttggccaaagctgacttggaaggctctctggattcaaaaataggaattcccagtactagctcagaggacaccatcttagcccaaaccctgggcctggcctactctgaagtcattgaaactttgccagatggcacagagagactgagcagctctgctgagttcacaggtatgacccggcaggatgcttttctagccctgactcagaaagcccgggggaagagagtgggtggagacgtgacaagtgataaactgaaagactggctgatttcacggcagcggtactggggcacaccaatccccattgtccactgcccagtctgtggccccacacctgtgcccctggaggacttgcctgtgaccctgcccaacatcgcatctttcactggcaagggaggccccccactggccatggcttcagagtgggtgaactgctcctgcccaaggtgcaagggagcagccaagagagagacagacacgatggatacctttgttgattctgcttggtactacttcagatacactgaccctcataatccacacagcccttttaacacagcagtggccgattactggatgcctgtggatttgtacattggagggaaagaacatgccgtcatgcacttgttctatgcaagattctttagtcatttttgccatgatcaaaaaatggttaaacatagggagccttttcataagctgctggcccaaggccttatcaaggggcagacattccgcctaccatctggacagtatctacagagagaggaagtggatctcacaggttccgttcctgttcatgcaaaaacgaaagagaagttagaggtgacgtgggagaagatgagtaagtccaaacacaacggggtggacccagaggaagttgtggagcagtatgggatcgacacgattcggctctacatcctttttgctgcccctcctgagaaggatatcttgtgggatgtgaaaactgatgctctccctggggtgctgagatggcaacaacgactgtggaccttgacaactcggtttattgaggccagggcttctgggaagtctccccagcctcagctgctgagtaacaaggagaaagccgaggccaggaagctctgggagtacaagaactccgtcatctctcaggtgaccacccatttcacagaggacttctcactgaattctgcaatttctcagctgatgggactcagcaatgccctctcgcaagcctctcagagcgtcattctccacagccccgagtttgaggatgctttgtgtgccctgatggtgatggctgctccactggcccctcatgtaacctcagagatctgggcaggcctggcgctggtgccgaggaagctctgtgcccactacacttgggatgccagtgtgctgctccaggcatggcctgctgtggacccggagttcctgcagcagcctgaggttgtccagatggcagttctgatcaacaataaagcttgtggcaaaattcctgtgccccaacaagttgcccgggaccaggacaaagtccacgaatttgttcttcaaagcgagctgggtgtcaggcttttgcaaggacgaagcatcaagaagtccttcctttccccgagaactgccctcatcaacttcctggtgcaagattgacagccaggaggctgcagctaccacgagggcctctgaggaacctccttccaggcctgggatgagggggcgatgtctgctggcccaggggaagggaaaagacaaatgtcttgactgttgacctcggtcctgtggcagactgcagtcaacagtgtgcctccggtgtccaagccacagcggtctggctgttgggaagatggccaggaatggactcataccattggcacattaggctaatcctggttttatgtgaagtcagcaattaagtgttcccactagaactgacctaagccactgattaatatttaatgagggaaggtaggggagaatctagccattttataatgccagaaatctatatatgttatctgatgccatttttctgaagtagcctcacatgtggtccccctgcagttcagcagttaacagatgacttttttagtgtaataaaatgtttatcatctat

SEQ ID NO: 49811 - DNA, 273 bp, Homo sapiens
ttgctgttgtaaacatcactgcagtgaacatccttgtacatgcatcttggggcatttctaagatttccttagaatcaaccccaagaaggattgacagtcaatggacatactgaattgaagatgctggatctccttggatgaactgccgtctccagaaaggaagggcatgtacatttacaagcccaggagagtgataggagagtgcccttcctcccagtttctgctccatagcacatttttaattccagattctgcaactttagtagccgtgta

SEQ ID NO: 49812 - DNA, 369 bp, Homo sapiens
gatttggaagtggaagggaaggaagctgaaggctaagttaaggtaagatcaattttaatgattagggaatatttgaggcatttgctgagagcattgcaggaggagggcagtgtggctacagaagcaaggccatgtgactgcaggagaagtccctgaagtgttgaaccaaacaagtgcttgacaatcactgtgaggcagtgatgatggatgctgaaccaaacagttgagtagaaggttgtcaagctaggagagggaagaagtgtctcctctccttatatggaagtttctgtatgttcaaaggtggcatagagagagatgtacattccatgatactccttggtcagccaagcagccattcaggaaaacttt

SEQ ID NO: 49813 - DNA, 341 bp, Homo sapiens
gcattagaaaattagaacatttacattcataatctgtttaatcttctgttgaatgcccttgtgcactctctttgccctgttttagttccctacttgctgtagattataagtgcccttaatatctccagtatctccacagagaattttgtcttcaagccttggcatcctgttttccactgtgccttcaacctgagacttcagtgatttcacaaatgctctgaacaatggagttttgaaatggttaccatttgtattagtttcctgtggctgctataacaaactaccacaagcctgggtgacttaaaccatcaggaaatctatttctctcacagttctggaag

SEQ ID NO: 49814 - DNA, 548 bp, Homo sapiens
gcaaagcaagattttgggtttgatgcaaatctaatattggaacatacaaataaattgtataagtcaatagttgccaggatgtaagtgaaaatattactttgcaaaacgacattttaaaaaacaaagcaggatctcatttctatggtttatgcaatttttaaatattgtgttttccattttctccattactttttgtgtattatgcaaataatatattattctatagagaaatgaaacctgataggtttcttagcaatcatagaacagaatatcagtccccagccccttggaaagaacactttgtagatgaagtggcaagatagatttgacatgaatcaaatgtgttttctttgagaacttaatgggcaaaaacttagagattaaaaatgtgaatattaggtcattccaggtgggtgcagtaagggccctggagtagtttatgcacatgtgttccttgcctgggagatcaggggttttacacagtccgactcatgagattgatgcccagttagacttctcttgaagactactctgcgatctaagtgctc

SEQ ID NO: 49815 - DNA, 320 bp, Homo sapiens
ctacttagaaatttagtaattgttgtacaaaaatgagagcagtctttttcacttcttgatatttccagagtccatcccttttctagatttaattcttaaataacacatagtactacttatatagttaggcaaatctaattatattcttgattaatcaataaatgaactttgctaattccagttatagtttagtatagctgattttttaagcacctgcaaatataacaagtgaaatcctgtgatacacttaagcaacccttgtaaatcaaataaattttacttataaatgtagtaaatcaccatcctgtttcaaaagactt

SEQ ID NO: 49816 - DNA, 419 bp, Homo sapiens
gaattgtctaactagaaatttgtgttgatttggatcaggagtggttcctgcgttttaaatttgagatgttcttaccagtattttgaggactcagaacggttaatgtctatagtttataactaatcattaaaatagggcgacaaaggctgggcacagtggttcatgcctgtaatcccaccactttgggaggctgaggcaggaggattacttgagctcaggagttcaagacccagcctgggcagtatagtgagacctcattgctacaaaaattgtaaaaaattagccaagtgtggcggcacccacctgtagtcccagccacttgggaggctgagatgggaggattgcttgagcccaggaagtggacgttgcagtgagctgagatcacgccactgcggtccagtgtagtgagactctgtctc

SEQ ID NO: 49817 - DNA, 329 bp, Homo sapiens
ataatcaccaccattcccagtaatatattcactgccaggcagcttggagtaatggagacattggaagaaaaataggcgaagttattgttagcagaactgcctcttactcaaggccactatctgaagtttggaagtggtcttttctccttcctgatgagaacaatacatgtacatttttctccacgaaaaaaagattttgaccagcccaggcaacatagacctcttctctacaaaagtaaaaaaaaaaaatagccaggtttactggtgcatgcctgtggtcttagctactcaggaggctgaggtgagagtatcacttaaggccaggagtt

SEQ ID NO: 49818 - DNA, 552 bp, Homo sapiens
  misc_feature (534)..(534): n is a, c, g, or t
  misc_feature (550)..(550): n is a, c, g, or t
gtcagaatgagatacatcaaaaaacaaattgttcacaaacctccaaagatccttgaaattcctccaggtttataataaacaccatgttaaagaaactgcaacaagcaaggagggtaagggtgatgaaggaagagacaaaggacacgagtggagggagcaagtgattagaacagctcgctcacaccacaggggccccacctcaactctctaaatcccgggtattgttagacaatcacgtatattatgcccagtcctcacaaaaacttctcagggcaagtattactctttttgttttctcatggtagaaaacacagctcagagaagttaagtaatttgcaaaagttgcacagctaataagcaacaaagcccagtgtttggtctgccttattatgctgcctttctcctattgtgtatatgatatagaaataaattactttatcctgttgtgtacacaggatacagaaaaattttcatccagctgtgagccaccacacccggccccctatagtgcttaatctaccaaggtgaactctnacccagaaaaaaaacnaa

SEQ ID NO: 49819 - DNA, 752 bp, Homo sapiens
tgcactccagtctgggtgatagggcgagactccatctcagaaacaaacaaacaaaaacaaataaaaagaagttttggtaacttttctgttttgtgtgtctttaagtcgtggtgtttatataatcgacacccatttatttcagtaattcagcaagccttttagagcagtgtctcaacttcagcactgttgacactttggataattatctttattgtgggggactgtcctgtacattgtagaatagccagcaccttgtcctctacccactagatgtcagtaacttccccttgtttgtgacaacagtgtgttcagacattgctaaatattccctggggagcaaaattgtcctcagttgagagccattgtttaagagcttactctgtgccagcctggtggataggtactgaagatagaaaaattcaaggaattaatgcagtgagggcagaacgggcttataaacacataattggaaatctgtaagataagtgtaccagaaaatagcaatcaagacacctcaaaggcttgggctggtgagctatctcagaatatctcaggagcatttagtagacagctatgcttagaacatgaaatgatagaatgggtattggtaggaaataaaagcagaaaagacaactttattttacataaccattaatgataagctcactgttagtcttgcagtttattttactgtgtggtagtgctttaagtttgatcctttctatgtcatttttttttaaatggcaaaactg

SEQ ID NO: 49820 - DNA, 655 bp, Homo sapiens
ttaccccccaggtgatggtggcaggaggtgaagcctttgggaagtgatgaggtcgtgaaggtggagcctcatgtgtgggattagtgcccttacaaaagtgactctggtcaggcgcggtggctcatgcctgtaatcccagcactttgggaggccaaggtgggtggatcgcttgaggccaggactttgagaccagcctgggcagcatggcgaaaccctgtctctacgaaaaagaaaaagaaagaaagaaaaggaacatcaacttaatgaaatatttggcatctcaaacaatgttctcgtagaccatgataaaaaaaaataagaaaaaatatattcttgcatcaaaaatttctgtaatgctacctatttttccccttggtgtgtatgaaaatgtctttactagatttagtacctccctgtcagcttccataactaacatggttatttttctacaagtcaacaaacatgtcatgtattggatgaaaaataaaattaatgacaacagttccttgagaggagaccaagttgccattatcattattgtgttatagtaatgattgttatcaacagttccatttattgataacaaacaacatgactagtggatacaatgagtataaaattcaataaactatatttctaaaaattaaaaattata

SEQ ID NO: 49821 - DNA, 934 bp, Homo sapiens
actggacaattttatggcatttctctacagtaaaatttaaactatacatgtttttgcctgtaagcttgaaaacatttggctgtgagcttgtgttcttttatcacattcgtaagtaatagaggacgtttgtaggactgcccagtagagtttattagtttatagaaattttgttttaagcaattatctcaactgttttctcaattttatctgatcatatacatgctttatcactgatatacagctacctgtttctattttcatttcagatgttttcttgtctattatcacactttctatcttaaaactttatatactatagtagcctaacataaaagtctaagaaggcttttctcaaaagttgcctgactacttttctcctggatatgtctggttttccacgcattttagctctcaccattccaatttatttttccttccctatgtgtacagacatattggagttagggggtcctaagtctttcagtattgcagtctgcatttgagagaccaaaaagtttaattctctgtaagcagttcttctgtgcttttctgtcaactaggaatctctctcaagctttatatcactctttgcccatccattaccacttacaggaataaggaaatttaactgaaatatggtgaataggcagtctaccaaatttccagagatcttagtctagaaatggtcagtttaccagttttcaggtaggcttataagtaaaatccacagctttcaaatttaaaacgttctcttaaatacattaaattatctctggattacttacaatacctaataccatgtaagtgctatataaatggttgttaagctgtactgagttttgcactatattttctattctccaccgccccacccccccatttttttttttgcccaggctggggtgcagtggcgcaatctcgactcactgtctcc

SEQ ID NO: 49822 - DNA, 570 bp, Homo sapiens
atataattccataaagagctgtgtctgaagaaatcctctgataattcagaaatttttaaaatcaataggcatggtacagacatgcagaaaatcataattagggttttaatgttgcaagactacagaagatttgcttcattattaaccaaaaaagggttacacaatgatgagcacatttggttgaattgagaaatataaatgaatctatgtttggggcattttacacttctgccaaagaatttatcggcacaatctttcagccaacactgaactaataacatttgatttacatccaaaagccaaaatacattcccaaaagccagccaaatacaaagcttcagacttcactaaaggtccacagtgaatgctgaaacgtccaagctcaggaccggctataaactcggcagtactacattaaccatgtgcaaaccaaacaacagcctcctaaggagacaactattaaatatttccagaaggggttacggatagtagagtcaacatttagaataagatcagatagacatccatttcctttaaaagacagggtctcactctgttgcccaggctgga

SEQ ID NO: 49823 - DNA, 608 bp, Homo sapiens
gatggagaaagactgcagagattcaaacccaggcctgctgacatgcagagccaatgagaatatattatcttgcagtgcagtttatgggatatatgtgtccctttgggaattcctgggtgtctgctggtggcctgttaacttggttcttgaatatgcactttgcttataactgtgcagtttgaaaagtgactcatccccaaactaggcagggttgagtgtctgtcctgtttatcttccacatgccacctgcactaacttctgaagataatctataataaaagcactgtgattaaaaaacagaaaaacacacaccaaaaatgtataggtttgtctgttggtgcttctgacaagaaaataaactcatgaatctcattaactttaaaaaaatcacatctacttaaggtttaatgactaaagccaactttctaacatatctgtaccgttctctgaacatactgttttcacacttaactacgatgttgtcacttgtttctgtctgattctgcaagggcagagaccttgaaatattcaaatctggattcccccatggtttgacccagctgaagtcaggcagtgttcgctgaaagaaataaaggtgtttccataat

SEQ ID NO: 49824 - DNA, 283 bp, Homo sapiens
gatagagaaggaggggaatcactccagatcctgctgtgaaggttgctgctgtaggcaagagacgctggcctcctgggactctaaggagcactcagagagcccacagagtctgtggcaaagaagaactcacaacttccttcacccatgtcgggttgccaagaaagctcccatggcctcttttgctggcagcttagagactggttcccattgtttttcaccccacacacacctgctgatcatcagtggtatcaaacaacactggctacttggccttgggctaatg

SEQ ID NO: 49825 - DNA, 781 bp, Homo sapiens
ctagttcagatagcattatcacatgtctatatcaaaatcacaaatagtatagaagatctcttagacttttgtattttaagaacattctgaaaaatcataaaatatctgttctgtcacttttaccattggctctcaaaataacccatgagtagttttggaacagtctcctgaggcatgaacacttctctgaacacactgttaaaaatatattcatttggaccaggaaagaaaactgaagttaaaatttcacaagtgagcccttcatttttttttccttcccctttatcttttcctgttatttggggggttttgaattacataggtggcttgaaaacaaaggcaattcttgatggagatgtttgatatgggaatgtgaaagaaaattggttgcaatagtgtttctaacactgacagtgctgtacgaagcttattttagaactaaaaggcactttaaatactgtgtattctaattactgagattgtaactggtcagtagtttcaaagattgtagtgaatgagcctcaactggaaatttataaaagcattctttctagtgtatcattttgcctgtctaaataattgactaattgactcttaactgtgaagtgcactatagaatgaaagattaggagttcctaagctttttaggtgtgacttttatcacttaactcctaggttatttcttttaacctataaaatgaggatctgagtaattttctttattctttgttctgttttgttttgtttttttttgtttgttttttgttttgtttgtttttgt

SEQ ID NO: 49826 - DNA, 366 bp, Homo sapiens
aacaaagtgctaacttaagcttttatttaaagcaaatcacaatcaccttgtttttgtttttcattttttaatttatataatttaatttttgtttgtttttcattttttatatatatatattttaaagacagagtctctctctgtcacccaggctgggttcagtggcgcagtcataactcactgcagccttcaactcctaggctcaagtgatcctcctgcctcagcctcttgagtagctgggactacaggtgtgtgccaccatgcctggcttgttttttaattttatttgtagagacgaggtcttgctgtgttgcccaagctgatctgaaactcctgggctcaagtgatcttcctgactccatcttg

SEQ ID NO: 49827 - DNA, 452 bp, Homo sapiens
ggttcacttctcagttcccctttcttcagcagttcactgggttgccttaggaaaagccacatcacctggcagcccacttgctgagtcatctgtcagattgtctcagaatggttatttgtcacttttgacatggggggaggaaaaacaagttggctaagtcactgagcctgtgaggaactgcaaaaatgaaagagaatttactctgaagcttctgagatgacaagaaatgatggctggatgcagggcagggcaggcaggaggacagaaaagcctgccgtgtgctggagactgtaaacaataggagaaacacagcctctcagtggaggcagagatcaggtcagccccacctcccttgcaacaagatcaggaattccgggccctcttgctccagcagtagtgacagcctccataaaaatgacttacctggagggaagaaaagggtgatggattta

SEQ ID NO: 49828 - DNA, 927 bp, Homo sapiens
aagattattagctgtttcttcacatagccctttcacagtgctttccatataaaaaatactccatttatactaggcagcttaggtattataaaaaatacgagctttggaatctcagctctgccatttatttggtctatggcaaattctttagacttaggatttgtttaaaatgggggttattaacattttcctcacaaataagagggattaaaatgaggaaaatacgtaaacattccaacagagtaagtactcagtgtcttttcttcccttctttgatttgattgtttcacacccttaaaaattgttattacagcattggttcttaaccctagctgcacattagaatcatccagagatatttgaataaaacacgaatggctcagccccaccccacatcagttgaatcagtctttgagggtgaggcccaagcatctggagttttgtttgtttttaagcttcccaggtaattctgataccgcataggtattgagaaccactagtctagagggaaagacttcacacataacctttcaagaaagctttcctgaggtatttctaataactttcaaagttaaaaataaggatgggggagggccagtgggatcactttaacctattactcttacctagcttttttttttttgaaacagtctcaagctggagtgcaatggcgccatcataactcactgtagcctccatctcctgggttcaagcagtcctcctacttcagcctcccaagtagggactacaggcgtccaccaccacacctgattttttaaatttttagtagagacgaggtctcactatgttactaggctggtcttgaacccctgagctcaagtgatctcctgccttgggctcccaaagtactgggattatatgcataagccacagcgcccagcctgtcgctttcttttctttcttctt

SEQ ID NO: 49829 - DNA, 676 bp, Homo sapiens
gctcctgcaagtttcttatatttatgtatttctattctgatttctgaaatgataacctagtagtgtctgatgaagttttttcatgcttattttattctttgtcacagatgaaagaagaataggactaattggggctaagatgaattaatgtaagtgtcagatactaggcaggtgttagggatgaaatgatgaatgaggcatggacctgttcctcagagtttatggcccagtagacataattgtattaggactttctgcagttgacatttgcataaagctgactgactgaaggaacagaaagtgagacagacagatatgaccaaatttatacaaaccatgtaccaacacttgaaagatgggtggatattttccaggaaacagattttgggcaggacattccatgcactggaaatagcatgaacaaatgcatgaaaattgcctacaacatgcctggcacatagctgtgaggtaccctatgagttgttgacttgaaaacatggaactgcacagggcattcaggcaagtgcaagtggttcaggggccagcgcagagcagagtgctgagtaaagatgtcagaaaaggaaagcaatggtctggtacaagtcttgtatagaacaagaagtttagacttttgaacaggcaatcgagatttggggttcagaaagataaatcccaa

SEQ ID NO: 49830 - DNA, 359 bp, Homo sapiens
ctaatgctgtactttcgaagatgatgttgaaaagcctgaagcctcaagataaatgtggagagttctcctactgttcctgttttctttgttctgttttgcttttgtaagcatatgcttgtcagttagggctgaaaccaaacaaaacagctgctaaatatggttctaaaagaaataacattttggtcttcttaaggcccgtaagtttagagtaagcacagtcgtttggcagatgtcaatagggaatccgggggtagcagtcattctgggagcactatcagccatccgtattctgttgggtgtattttaccctgccagaggactggtggcctcaagtaaaagattctgtcacagaacggctg

SEQ ID NO: 49831 - DNA, 382 bp, Homo sapiens
cctcccgggttcacgccattcttctgcctcagcctcccgaaattttttgtatttttagtagagatggggttttactatgttagccaggatggtctcgatctcttgaccttgtgatctacccgccttggcctcccaaagtgaaacttttctttaaaatagagatgggatcttgctgtattgcccaggctggtctcagactccttgccttaagcagtcctcccacctcagcctcctaaagtgctgggattacaagcgtgaagcattacatccaagtgaaacttcttgagatggttacataatgtctaaatctcccgagtctacgaacgtttataaacgacagcacctgtaccacgtattcatacctagcatgctcgtctctcag

SEQ ID NO: 49832 - DNA, 452 bp, Homo sapiens
cctcccgggttcacgccattcttctgcctcagcctcccgaaattttttgtatttttagtagagatggggttttactatgttagccaggatggtctcgatctcttgaccttgtgatctacccgccttggcctcccaaagtgaaacttttctttaaaatagagatgggatcttgctgtattgcccaggctggtctcagactccttgccttaagcagtcctcccacctcagcctcctaaagtgctgggattacaagcgtgaagcattacatccaagtgaaacttcttgagatggttacataatgtctaaatctgctggtgtagaagttaataaagtgtagaactgaataactattaaatattagatcaagtttctcatgtttatcttaacgtataacgatttatcttaaagcactgattttcacaaaataacatcagtgtgaaattggaaaagaa

SEQ ID NO: 49833 - DNA, 443 bp, Homo sapiens
gtagctgggactacaggcgcccaccgccacgcccggctaattttttgtatttttagtagagatggggttttactatgttagccaggatggtctcgatctcttgaccttgtgatctacccgccttggcctcccaaagtgaaacttttctttaaaatagagatgggatcttgctgtattgcccaggctggtctcagactccttgccttaagcagtcctcccacctcagcctcctaaagtgctgggattacaagcgtgaagcattacatccaagtgaaacttcttgagatggttacataatgtctaaatctgctggtgtagaagttaataaagtgtagaactgaataactattaaatattagatcaagtttctcatgtttatcttaacgtataacgatttatcttaaagcactgattttcacaaaataacatcagtgtgaaattgg

SEQ ID NO: 49834 - DNA, 347 bp, Homo sapiens
ctcctccaccttcacctcttagaggcctcctggagatgtggcgctctgggttgcttttgataagtaccaattctaaatgctgcagtcgctttttcttccttctctgctgccatagagccacatcttcctgagccacgtgtggctcttgggttcattttcttttcattttttccaccatggtgttctgaatggacaagtcagaattcagaggttggtattaagacctatcttcataacaagcccacttcatcggaccataggccacctgctatttgtactaacacttggggtcatttcatgtgtgaggaataatgaagttgcactgtatattcagaactttaatattt

SEQ ID NO: 49835 - DNA, 695 bp, Homo sapiens
ggcgagaggacagctaccatgtccgttctcgaagcagttatgatgatcgttcgtccgaccggagggtgtatgaccggcgatactgtggcagctacagacgcaacgattatagccgggatcggggagatgcctactatgacacagactatcggcattcctatgaatatcagcgggagaacagcagttaccgcagccagcgcagcagccggaggaagcacagacggcggaggaggcgcagccggacatttagccgctcatcttcggtgagtgccagcccaggcccttcctctccccactcttctgcaggccctctaggactctggtaagtgagcagtatccttgttctcagctgaacattggggcatgaacactgaggtgggcactgagtttgcctactttcttggaagctctccgactcttgaagggccctggatctgctttggagatggatgggcacggagcatttgtgacccccagtgctctccctggcatgttgggcttattgtgttgggagcagcttcttcgccccagcggcctccactctttaatggggaccttgcttgtgaactgcctttttcccccaagccctgggctctgtagcccccttggcaggcgggcttgggtgggggcaaggggagatctgtgtctgcccggaagggcattgtgtagagcatggggttgtgggtgacattggc

SEQ ID NO: 49836 - DNA, 364 bp, Homo sapiens
tgtagaagtagaatggatgggtcatataataactctgttaaaattttttgaggatctgccacattgtttcccaaagcagctatgccaagcttgtccgacctgtgacttgctggctgcatatggcccaggatggctttgattgcggcccagcacaaattcacaaactttcttaaaacattatgagattttttttttttaaaaaaaagctcatcagctatcgttagcattagtgtattttatgtgcagcgtgataattcttcttccgatgtgcccagggaagccaaaagattggacacccctgaactacatcattttacattccatcaacaatgtatggaaggttgcagtttcttcacatcctctc

SEQ ID NO: 49837 - DNA, 225 bp, Homo sapiens
tggctcccattttgcatatggtaattacccagattgtccaggtaggaagagtttgagcctggctttggacccatgaaggtcaacgccttacccacctgctttgtggctatagctatagtggagagtgagtcaggagaatcccttgaacccaggaggcagaggttgcagtgagccaagattgtgccactgcattccagcctgggcaacagagcgagactctatctc

SEQ ID NO: 49838 - DNA, 325 bp, Homo sapiens
agaggtttaattggctcacagttctgcaggctgtataggaagcatggtactggcatcagcccggcttctggggaggcctcagggagcttttacccatggcagaaaacaaacaggaagcaggcaagtcacaggcgaaaacaggcacaagagcacttgtggggcaggggccacacttttaaacatccagatcccatgagaacttactcagtatcaccgggacagaaccaagccatgagggacctgccccatgacccaaacacccctcaccaggccccacctccaatactgggaattacaattcaacatgagatttgatggggacaca

SEQ ID NO: 49839 - DNA, 507 bp, Homo sapiens
gggtaaggattatataattacaagcatcagtcatgtttttaattgcacggttgttagaggaaagggcaatgatttgagtttatagaaacagaattttattgttctattggtaatacttctcttctgaggcctgataattgctgtatctttctcactaagttactttaaaaagttctgcatatatgaaattgtggcaaatgcataaactgtgccttattgatttttgttgacattttacatgtttcttacgcatttttaccctccatttggaaactgtcagcttggcacatggtgctggataataagagcaaatgaagtgaatacagcaatcttcttgactattaaaaacagaattagcccaggctccgcttggtttcaaatctatctccaatagatgatttgccttttcctcccttgtagtttcaagataagaagtggaaaaataaaaatctcttagtgttatttcctctgttaataatgccagggatgatgaaaatgcttctgaag

SEQ ID NO: 49840 - DNA, 680 bp, Homo sapiens
atacatacgtgtatatgtgtgagtgtgtgtatatataaaattaaaaggtgaatgaggtaaatatatgaaggggaaattcagccttgaacttcccttgggtcacagagatggatcctctgagctgtggggtgttagtgagtgtgtatgcgtaagcatgtctgcatctgcctggtctgtctgggtcagagtatgtccatgaactttacgagcgttcagttcaataccactcagtgcagaatccgcgttcctgttttacagcccagcagccgccagccggcccatctgttaaaacataacatgtacacttcagtccgaccactggggtggagcctgggtagggggcaactcttagcagaaacaacatgctacaaacaaagcctgcctctcaagttctattttcattcaatatttggcctgaacttgaagttttggtgagggagaaggaagtgtttgtctctagaaatggcaaactgcattttgtgaaataattatagccacggcttggggagggggagcttgtaggagagaaaaaaaaatccctccagaaatgtggtgcttgtcacatcaccatgcaacacgggtttacagctttgcagtatggcatgtatatcagaaactgtttgcttttgcttgttaaaataatgcattaaaactgaatcattttgcaccaaaaaaaaaaa

SEQ ID NO: 49841 - DNA, 267 bp, Homo sapiens
ctgtggcccttggtctctgtttcctcagtccactgcagagtgtgctacaggttgtgggtactccatttgttgcagtcactgaatgcattgaacacaaattcaggtttattttctcattatcgaatgctgtggcctgcaagcagtgacccaaagcactcaaaggctgaaagtcgacggtggctcacaaaacaaacacacatataaagtcatcatcacacggccctaaagaatgtacttcccactgctgactggggctgctttgggctt

SEQ ID NO: 49842 - DNA, 267 bp, Homo sapiens
gcacaggagacatataactctcaagaaaacaccattcgagagaaagccagaagcccacaccaacattttgcattcaagactgtggggcttatggaaggccagtggacagagccctcccaaacatcgagagcctgctggatcgtaaatatcagttgcacccaagtttctgcaaaagtcagagggcaagaggtgttgcagggaagggcccaggttaaacaaaggctgcacattgtgggtgatggacactccacaaccaagctcaagaca

SEQ ID NO: 49843 - DNA, 834 bp, Homo sapiens
ggcagagataaacactgattcgtaattacctcctcccctccttccatatctaagtcatttcatagggtaatgtcaagggccacataaataagtaaagtactaagttagttttaataaaatgcatccagaattcccaagcaaaagaaaggaagggaagtcttagctaatgaggtcagtgtttctgtggacatcggtagcatatgtgttcagggcctactgttccaaaatggaagtacagagaagagtacaccagatgtctatctgcttccagggaaaacctgaaccatgaggagaattgggttggtttgctataatttggtcaccattgtttaataatctggatgtctaaatgtcttgcgattttaatttttgaacattcactaacatctaaataagagtagagatctcgatcctcttctcagttcagcttctgaatcacctggcaccatcatttaactttactgagcctctataaaattaagatacaataatgccctatttctactctccacttgatagtgatattcccagtactcaggcaagaacatgttaattaataagagctctttgaatttctttgaagctgctgagatgtctgaggtggcatgacaacacatggcaggattaatatcatttgcacttattttggtatttatattaaatataatgcagtatttaaattcgcagacaagtcagctccccattatctatgttttaatatttatttgtgtccactttcgaggtgaaactgactgtattcagcatttcagcccgtgtttaaggtggcttgtccctgaaaggtggagtgttggggattcatgcaaacatttgagg

SEQ ID NO: 49844 - DNA, 192 bp, Homo sapiens
ctaagaaataacactgaaatttcttctatgggcctggttagcaattttgtaatatttcttgtgtttgtgagtgactttctctttaaaaacaaagtcttatctgagtgttttgatttcccagtaactacaaagtttttgtaagacagttttgagttattttccctcaaatgcaatattgtgttgcatatattt

SEQ ID NO: 49845 - DNA, 335 bp, Homo sapiens
ccatgagctgtgatgacgccactgcactccagcctaggcaacagagtgagatcccatctcaaacaaacaaacaaacaaacaaaaaagagagataggaagcttaagtgatgtgtcctgtgtcacacagctaagaagtcacgtagagatcatctatctggctccaaaatattcaataagtatttgttgagcacctactatgtacttggtactatttttgggtctggaatacattcgtgaaccaaacaaactgtcctgccctcaaagagctcatattctagtttggaggcacacagtgacaaagatgagcaggagatgtgtgtcaggcagtgagaagt

SEQ ID NO: 49846 - DNA, 336 bp, Homo sapiens
gaataataattaataataatacctatgagtatgagtgtcatgttattttaaaattcaataaagatctaaaagcaattgttaggtaagcattgtccagttatgtaggataatgctaaaaaatagttactgtatattttcatgaccacgtttgccaaagtactccaaggactctcttgcaagagaaaataacagatgccatccaggtattatagctggaaactctactgctatgaattctgatagcacattcaaataatgaatttgtaagtggaaacaaaacagactgagtattgtaattgattttttgaggcaacttcaacatttcttgcaataatt

SEQ ID NO: 49847 - DNA, 289 bp, Homo sapiens
gtttcttcattggaaaaaatgtaaataggctccttggcctttgaaaatgatgtgtacagttcagaaattgtaattttagtatctcagtcttctattaactaggaagagttaatcagaaagcctagtaataaagtgagttcacaagagtccccaaatcccaaaacatttgaaaaatacaagtgtgagcttgctcctcttctcttcatatccaaatctctaatcaatcttttcctcctatgtcagaagcatcctctctcctttccaaagccaatgctcttattcatgatct

SEQ ID NO: 49848 - DNA, 180 bp, Homo sapiens
ctcaaccccagagctactataactctacacacacctgtgctcccattctcagctacctggttgctacacaaacctccttactcttactaacatggcagtgggaatgtctgccccctgagcaccagtgccattgctgccctagataacagagccacaggccctccacacatgatcatgctt

SEQ ID NO: 49849 - DNA, 390 bp, Homo sapiens
  misc_feature (16)..(16): n is a, c, g, or t
  misc_feature (62)..(62): n is a, c, g, or t
tcacagatgggaaagncattgggtggagggtcaagtggggaaacccgggactggtcccctgnaagcctcccaggagtgaaagcttacactcagctcattggcttctcgcccccagaagcctccccctgaatccccccggctgggctgcactccagcctgggtgacagagtgagaccctgtctcaaaacaaaacaaaacaaaacaaaacaaaaaaacactctgtgccaagcgctgcctaccctggtgcatgggactgcaggagaggctgtctggtaaacgtgtcaagggtaatccctgccttccaggctcttccactctgcagtggagcagatgctgaacaagcaaacttggaaccatggggcagtgatcagggacagagtctccagaaaa

SEQ ID NO: 49850 - DNA, 381 bp, Homo sapiens
tacccaccccagtgtgtgccaccctcaggagcccctggcaggaccaagactcagggtcctcattgtgggcctctgcagcttgtggaagccaccatataaagaagtccaggctatactcctagaggccacatgcaagagaactgaggcatcccagctgacagccagcaccaactgccgggcatgtgagtgaactttcctagaatacgaccctccagctcccatcaatcaagactgaagatgatatagccctggacagtgcggcttgactgcagcctcatgagacacccagagtcagaccacccagctaagctgctcctggatttctgaccctcagaaactatgatacaataaatatttgttgcaagccactaagtttggggg

SEQ ID NO: 49851 - DNA, 1268 bp, Homo sapiens
tgggctctgctggcagaaagggggtccatcctaggcatgggtactgacacaggtgacagcatctgcataccagccagcttctgtggtgtttatggcctctggaccacaggttcccgcctcagctacactggaattgcctctgccatcaaggggaaaaaaatcggtgaccacggtggctggccccatggcccaggacgtggagagcctggcgctgtgcctgcaagccctgctgagtgaagacatgtaccgactggaccccactgtgctccagatgccctttagggaggaggtgaagaccccctttcccaccccaggctgcagtgagtgagaagcccacatgctcagtccagtttgtttccttcccctgctggacaccagctgctttggcttcttggctatctggagccatagcttcccccctctaggatccccaaactagccagcatcttgaagagattcgtggagtggggacacccaagaaactgtgggaacagcacacagcagtggaggaatatgagcaagagttcatagccaagtggaggtccctggacctggatgtgctgctggtgccagttctgggctctgccttctatataggctcttcctccctagcatcagaaagtcagtcttatgtgaccctgtacaacctcctggactttcccgcgggcgtggtgcctgtcactatcgtgacactacaggacgaggaggaactggccttctacaaggggtgctacggagatagttctgacaaaaatttctcagaggcggtaagaggatccgtcggagttctggtgactgtgcagtgcattgctttgccatgggaagaggagctgtgtctccggttcatgaaggaggtggacaccttggtcaagaatcagagggggcccaagtgataggctcctggaatggagtaacagctcatgaaacacggggctggttgtggtggctcatacttgtaatcccagcagttcaggaggcagaggctggcagatcgcttgaggccacgagtttgagaccaacctgggcaacatagtgagaccctgcttctaaagcattttcttggtgttactcctgtagatcctcacccaagtgtgctcctgatgccccttccttctcatgaataccatgtccaccttatgtctcctccttctggaaccccaccaggttccttttctttgttggtccctctgtgtgggtgctcaatattcctcagatgggcccaggatggggagcagggtgaggagctcaataaacattttctgactggc

SEQ ID NO: 49852 - DNA, 629 bp, Homo sapiens
tgggctctgctggcagaaagggggtccatcctaggcatgggtactgacacaggtgacagcatctgcataccagccagcttctgtggtgtttatggcctctggaccacaggttcccgcctcagctacactggaattgcctctgccatcaaggggaaaaaaatcggtgaccacggtggctggccccatggcccaggacgtggagagcctggcgctgtgcctgcaagccctgctgagtgaagacatgtaccgactggaccccactgtgctccagatgccctttagggaggaggtgaagaccccctttcccaccccaggctgcagtgagtgagaagcccacatgctcagtccagtttgtttccttcccctgctggacaccagctgctttggcttcttggctatctggagccatagcttgtaagtgcccccaaagagggcctccagtgccatatacccaacccatgcagttagaatactcagcaagtgtggttgagagggtgtggcatccagttaagctgggtttttaaccctctaggtaaccctggccaagtcacatctcttctttcagccttagcctccccatcaatacaataaagaggttaggctgggagattactccacacccttctgtc

SEQ ID NO: 49853 - DNA, 1057 bp, Homo sapiens
tgggctctgctggcagaaagggggtccatcctaggcatgggtactgacacaggtgacagcatctgcataccagccagcttctgtggtgtttatggcctctggaccacaggttcccgcctcagctacactggaattgcctctgccatcaaggggaaaaaaatcggtgaccacggtggctggccccatggcccaggacgtggagagcctggcgctgtgcctgcaagccctgctgagtgaagacatgtaccgactggaccccactgtgctccagatgccctttagggaggaggtgaagaccccctttcccaccccaggctgcagtgagtgagaagcccacatgctcagtccagtttgtttccttcccctgctggacaccagctgctttggcttcttggctatctggagccatagcttcccccctctaggatccccaaactagccagcatcttgaagagattcgtggagtggggacacccaagaaactgtgggaacagcacacagcagtggaggaatatgagcaagagttcatagccaagtggaggtccctggacctggatgtgctgctggtgccagttctgggctctgccttctatataggctcttcctccctagcatcagaaagtcagtcttatgtgaccctgtacaacctcctggactttcccgcgggcgtggtgcctgtcactatcgtgacactacaggacgaggaggaactggccttctacaaggggtgctacggagatagttctgacaaaaatttctcagagccaccatataaagaagtccaggctatactcctagaggccacatgcaagagaactgaggcatcccagctgacagccagcaccaactgccgggcatgtgagtgaactttcctagaatacgaccctccagctcccatcaatcaagactgaagatgatatagccctggacagtgcggcttgactgcagcctcatgagacacccagagtcagaccacccagctaagctgctcctggatttctgaccctcagaaactatgatacaataaatatttgttgcaagccactaagtttggggg

SEQ ID NO: 49854 - DNA, 284 bp, Homo sapiens
catacgcagaaatggttaaattctgacttggaattccatgggaattagcaggctgtagacgaggttctggccgagaatgtcatggttggaccaagacttcccatggggctgctgtttgtggccagtttcttgtttttatttatccaatgtgtacatatgcccagaagctatttgtaatgggagtgttttaagaaattcataaatttaaaacactccacacatacaaaactctttctgaaatgtgacatcttaaaattattttctcaaagtgacataaaataaaa

SEQ ID NO: 49855 - DNA, 720 bp, Homo sapiens
ctaaagcgttttaaaaaatagtgatctcttaagtggtttagtcttagaattgaagagtattcatatctagaatttatttttgtttttttgtagttaaaagcaggtatttttgcagaaatgacatacccttactgtattccttaaataaccacatggttcggcataactaaaagatgttgaaaactacgaaagcaaagaaagttaatagtttatacccttagattatcatattattattctgtaattgctttgtataaactgatttttttttaacttaaaaagtcttacatcttctaagagcaagcttagggctaagttacatttattaacagcccagttgattgacttgactttttgccagttctagaacctcatttaattctaagacagtggaaaactgggttatatctcctcttggataacttttgtggaatttatttataatttcaacttctattttaattaagaacataagctacatgaggccaaacattttgtccatcttgttcactatatctagcacctagaatggtgcttggcacattactttgcttaaatttgttaaatgaatgagggaagtaaatattgcagtatttttctacctgttatgtaaatctgtagtttttttgaggaatattttaattttactttttatttctaattttttcaaatgttttaatagtttatatttctcctgccaagggttatggctgccccctt

SEQ ID NO: 49856 - DNA, 440 bp, Homo sapiens
tgactctcaatccttagggtagggtctctcattctaaagatgatcataccccatccttgatctttgggggacttaagcaacttcctaaattcataatatttagaggtgatgtttaaaatcagcacttagtccagattctggggagaagtttgatgatggtccttgaatatttagcacttagaagtgctaggaggatgcctcactaagttacgtaagaagcagaagaggacgagtaccgcctgatggattgaccccgaaaactagctgtgtccaagtagaataggtgtctcgctctgttaagcggtctttaaactatgatagttcgctgtactacaaatatgcataggtgctttacaaagacttttcacttagtgaggtcaagaggctaatgctggtctcatgtataatttaggtacctttttacatagaaccctcattag

SEQ ID NO: 49857 - DNA, 307 bp, Homo sapiens
tctatataataagcttttcatgaaggcttaaagagaaagtacaaattattattgtttttctttgacatttacatccacttactgttcctaaggacaattcagtccctcctcccatgcgtaaacctttctatctgattagatccaggttgttactgatagacataaaattattttataaaaagaaattatgttcaatgtaaaaatagtaatccattttaaattcccttcatttctgcagcctgtttctccagacaactcaaaattgtctgaatcccataagacagtttctctgagcatattgtttaat

SEQ ID NO: 49858 - DNA, 506 bp, Homo sapiens
ctgttcatttccaagggtcatccatttacaggatgaatgctcaagcctcttcctcccggtgccatggagtctgcctgtcagtcccctccttgcccagcatctcccgcctgcctccttgttcccctatgccttcaccaagccatgtctcccaccctgttcacccgagcctctcctctcctttcctctagtgccgcctggctgggacagtgcagaaacactgctcctggcagggcgccctgtgcctgtcccctttcctgctgctctctctgactgtgtgtgtgcagtgagtggggcagcctggccaatcctacctgcctcaggtggatggtggccccaggtgctgctgccactgtctctgtgttctatccatttcccctttccatgggcgttgttcattcacctggtcactcatggccttcagttctcatctcagtctgaggaccccctttggcctcatcagtgtgtcctgcccacactggtgtctcaaactccaggcattaaaaacc

SEQ ID NO: 49859 - DNA, 469 bp, Homo sapiens
atgacaaattcataggttttctaatactactgtagttgttactaatattcttgattgaaggaattgttaatttttgtatagaggttagtgaaaaggttcccatccatattcacagatccctgaattctctatggactccccatattaagaacctcagttagtgaaaattcagctagacctttctccatcatacttcagtaagcgtagtttttcacattctatatgactaatcttaagtagttacaggccgggcacggtgggctcatgcctgtaatcctcccaaagtgctgggattacagatgtgaggccaccacgccgggcctgcttttcaagtgatggtacagtttcttagaagccgttcaataagcagacttcgggcaatatttgatgagggtggtgccttgaatattttcagaagggttactgagattattgatacgatttatgtctaaaaaacagtgtatatacc

SEQ ID NO: 49860 - DNA, 388 bp, Homo sapiens
gtatgtgagtgactctcagcctggttcacagtgtttctatgaactttattgatagatgacaggaaaaggatatcctttccccagcttgcagacactggtatcattggatgaattgagctgtcaaaatgtcaaaccagatgctgatgggaaccacataggttgtcaaacacagtatcattttatactaaattattttaagtgcttgcagttctcaatttcataaaggagaaagggtaggagtcctatctatttataaatagtttacccttttttttttttttgagacagacacactgtcacccaggctggagtgcagtagcgcaatcttggctctctgcaacctgcacttcccaggttcaagcgattctcctgcctcagcctcccaagt

SEQ ID NO: 49861 - DNA, 364 bp, Homo sapiens
cagtctattaggcattcagaaagggcagtaaatgttcagataagaaagcaggttacttatgggtaaaatgctttccttttaccatcttaattttaaaagtagagcccctaaatgagcagaatgagatagctaaacaagtttcttctagtctctgccttttcagaaatccatgaaaaataggaagaactgtaaaaagaaaataggtgttttgtttttacttatcttggcataattttagacttacagaaaagatacaagaacctttcacccagatattccaaatgtccatttttactatatttgctttctccttctctttctcattctgagtactggttttttttggttttttgttttgtttttt

SEQ ID NO: 49862 - DNA, 4928 bp, Homo sapiens
  misc_feature (83)..(83): n is a, c, g, or t
  misc_feature (3209)..(3209): n is a, c, g, or t
  misc_feature (3481)..(3481): n is a, c, g, or t
aagcagcaccagaacaccacctacttcatggccgacatcatctctgacatgtctgtgagctctgaagagttggtttcatgacntgaagcagcaccagaacaccacctacttcctggcccagcacctcaacaaggacagcctccttgcccgcaaggacctgcccttccggatccagagctgtgcagcccaggccgttcttacggccccttactctcttgggcgcccggatcccaacccatctctccaacccattgccacaggccagagtcctggcccccctggcgctcggaggaagctgccccagtcagagggccaggtacagggagaacgaacatactccttggcagtgcacccagcactgtccccacagcttagtgaacagaagaatctgagtctgctgtccccagttcctgaggacaaagggcctggccacactagggcaggcctagaaatgtcactgagggcagccacatcatccctcagtgaagagcaggtctctgagctgagggacaacctgcccaaggaggtcaggttgagccccaagcttatcctcgacccaaagagcagtgtgacccctgccatcatctcggccgccctacagcaagtggttcacaataagagtctagtcactgctggtggggctttggggaacccccccagcaggggtgagagaaggctggaggccagcatggggaggccagaggttagcatgatgagcagcagtgccagtaagaatctgaagttcaaaattagccccagtgctccagagacctcatggaattctcaacatcagctgggtgcagaggtctcttccagccccagagcacccacaggcagccgggctgacagcctgcacctctcccaacaagaggacagtctgcctgttcaaaatttccctcccaaaagctatcttttgcgaacaagccgagagtcagtgggcaagcaagctacaggggaggtggcaggcaaaggcgggccagtgggtggtaagcccaccctgcagaagcagggcaccatctccagccaaggggagaaggcgcagctggagagcacacccaaaagaagcaagctcgaagagaccagcctggttccccgagctacctaccccatggctctgcagagccccagctgccagtcaagaagccacagccccagctgccagcctcatggccacagccccagcagccagtctcgaggtcagagccccagctgccaacctcgaggccagagcccactgaggtctcaggctgccagccggcaggtgagcaccatgccctctaggaagcttgaaacaactctcaatggagcccactcgacctctgaaggccctgccaaacccaagtcatcccgaggtcctttccggctacgcaatttattctctgccaccttcccaacccgccagaagaaggagacagatgagcggcaggcccaactgcagaaggtaaagcagtatgaactggagttccttgaggaacttctaaagccaccaagccagggggagctgccaggcaccgagtacctgcaacctccagcacctggccgctgcagctgccagctccgcagcagccctgtgcagcaggggcctggcatgtcccgtgagcagaggcgcagctgtgactgcaagcgcatctgccgggggggccggccacaagccacccagacaccagtgcccagcctccgggggagggaaagggacagagtcctccctagccagaggcagccagaggctggcccaggcgtgagcctcagcagccccatcaatgtccagcgcattcgttctaccagcctggagtcccgagagtgccgatcggaccctgagagtggtgtttcgtgcctgaccacgtgtgcctcggggggcgagtgtctgggagctcccaattacaggaaactgatgcgccgctacagtatcagtgagctggaccagggtgacagggcctcgctgacctcggatgtctacccacatcctcccctgggcatgctgcccagggaggccaaggaggtagaggcaagcctccccatagccttgggtcccaaaagcaggtctctggagtcaccgacgctgggagacccctcctacgtccaggttgccccagagaccaaaggccccagacagatggccgtgttctcactgcccgaggaggtgtaccggaagcctgccgagctagacgaggacagtgagagcagcaagtgctgctccatccgctactgcttctactaccgcaagtgtgacatggcagatgatgccagtgatggcaaggatgagctctcctactctatccccatgaagatcctgcctggcatgaagctggacgagcaggtggtgcctgtggtgagcaggaccctgcaggtgctggatgctgctacctgcagcagcagcagccctgaggcctcccgcactcaggagattgacctccgtgtgtccaccttcgaggggagcctggccaagatcaatgccctgcgggcccatgcctatggcctccctgatggcttcctggctgcccggctggacaccaacgagctgctgacagtcctgcggcagtgtgtggccagccccgaggcccgtgcccccaagccctatgtgtctcagatctccgagtataagcttgagctagctctcaagttcaaggagctccgggcctcctgccgccgtgtggccaatgtggacaagagcccaactcacatgctggcagccatcacgggcagcttccaggtgctgagcagcctcattgagaccttcgtgcggctggtgttcattgtgcgctccgaggcccagcgccaagagctgctggccaaggtagaagaggtggtgaggaactacaccttcctgctgcgtgcagctgaggagtccacagcccgtaaccttaaccagcagcagcagcaacaacaacagcagcagcagcaacaacaacagcagcagcaacaacaacagcagcagcagcagcagcaggtggcagcagctgcaggggcagccacagagcatccaccaggctccccaacttcggcgactgttatgagcacattcacccactccttaaaaacccttattaagtagggcatctgcccacacctgtcccccttccccaaccatggccccaggtttgagctttgtggtccttgcatcttgtggtgagtgtgtgtgtgtctgctgggccagtcagggtccaagagcccatcagtctccggggagtggaaactctcttgattgaggntctctcttaagggctgcaggcttagctgccgccctgggtgtcctcaccccttccctggcctctgggcctcactgtgagggcaaaggcccctcttcactctgctcacagcagagctgtattttatctcttctctggggctgagaggtgacatcaggctcacttcctgctcaatccgtgttgggcgctgggggagccagggcctgaagcaagcggaccctcaggctttgagctcctcgtggcatcggctcccctgctgggagcagtggcagtancagcaggccacattgccgtgccgaggggagagggcgctcagtccagatgtccccatccaccttgggctcacactcacctggtagatgccaccctgagggcctgtgcctgggtgagatgtctgcagaaaacagccacactaggctgtttgcagcggcccaactggccggcagcctggtgagccctcacctccaggtccagtagctccacaccagccatccccaaagtgccctgcccctcactgatgggcagggcagctcagtccactagggagcaagcatctgggatcaccccactcattttgggtaaggtacctgatgaaaacgtctgcctggggagacccagtgcaggcctaggagcccgcctagcccggcccagcccagctcaggggctgttgctgcaggcatgaggcttctctctcaacatctctctaccagacagactgtccttgggagtttgacttagctgtggatcggggaggggggtggggggaggggggaaaggggtaggggtggggggtgttgatgactatatcttaaacttctggaagctagcgtgatatgttaatcctgagtatatgcttttggctgtgtattgaccctgtggatttgtctctctaagaaaagaagctgagcgccttacccggtgcagtcctgcacctttctccctctctggagccatctggaagggaattcacactgtttaacatccaccttgacacacacctcctattgccaccaccgctgccaccaccaccgccaccaccgctgccaaccctccccccacgccccccacccccgcaaccttcctgggagtgaagacacggagtccctaccaactgtcccactgtagggaacaaagaaagccaatgtttcttctgtatagattgcttctcgtccgcctctccatatctccccatttcccacacccttgtgccctgtgtctgcctctgtttcatcactgtgtcagaggcccatgtgaaatctttcattctgatgtgagttttataaagatgtacactgtgcttaatccctgcccatccttggtagcccctagtgcaataaagtctccctgagtggtgagttctcccggcaaggaggaggggagtttcttctgcagaatccagcccctcacttccttgcttctcctcccccaggaccaagttgttgaatgggccagagatgcagccagtggggaatccttttcccctcagccactgcaagctggagtgctgatatggtcttctttttctcccaacttcgccactcagcccctgcctgtgtcattccaccgccatccttcacctctccctcagcctcatggagaggaaacattttctaatgtctgtatatagtatatatactacataaaatatataaattatatatatactaatttatgtcttgtttttcaaacaagaatgattaaatctattcatcttactatccc

SEQ ID NO: 49863 - DNA, 4333 bp, Homo sapiens
  misc_feature (83)..(83): n is a, c, g, or t
  misc_feature (3209)..(3209): n is a, c, g, or t
  misc_feature (3481)..(3481): n is a, c, g, or t
aagcagcaccagaacaccacctacttcatggccgacatcatctctgacatgtctgtgagctctgaagagttggtttcatgacntgaagcagcaccagaacaccacctacttcctggcccagcacctcaacaaggacagcctccttgcccgcaaggacctgcccttccggatccagagctgtgcagcccaggccgttcttacggccccttactctcttgggcgcccggatcccaacccatctctccaacccattgccacaggccagagtcctggcccccctggcgctcggaggaagctgccccagtcagagggccaggtacagggagaacgaacatactccttggcagtgcacccagcactgtccccacagcttagtgaacagaagaatctgagtctgctgtccccagttcctgaggacaaagggcctggccacactagggcaggcctagaaatgtcactgagggcagccacatcatccctcagtgaagagcaggtctctgagctgagggacaacctgcccaaggaggtcaggttgagccccaagcttatcctcgacccaaagagcagtgtgacccctgccatcatctcggccgccctacagcaagtggttcacaataagagtctagtcactgctggtggggctttggggaacccccccagcaggggtgagagaaggctggaggccagcatggggaggccagaggttagcatgatgagcagcagtgccagtaagaatctgaagttcaaaattagccccagtgctccagagacctcatggaattctcaacatcagctgggtgcagaggtctcttccagccccagagcacccacaggcagccgggctgacagcctgcacctctcccaacaagaggacagtctgcctgttcaaaatttccctcccaaaagctatcttttgcgaacaagccgagagtcagtgggcaagcaagctacaggggaggtggcaggcaaaggcgggccagtgggtggtaagcccaccctgcagaagcagggcaccatctccagccaaggggagaaggcgcagctggagagcacacccaaaagaagcaagctcgaagagaccagcctggttccccgagctacctaccccatggctctgcagagccccagctgccagtcaagaagccacagccccagctgccagcctcatggccacagccccagcagccagtctcgaggtcagagccccagctgccaacctcgaggccagagcccactgaggtctcaggctgccagccggcaggtgagcaccatgccctctaggaagcttgaaacaactctcaatggagcccactcgacctctgaaggccctgccaaacccaagtcatcccgaggtcctttccggctacgcaatttattctctgccaccttcccaacccgccagaagaaggagacagatgagcggcaggcccaactgcagaaggtaaagcagtatgaactggagttccttgaggaacttctaaagccaccaagccagggggagctgccaggcaccgagtacctgcaacctccagcacctggccgctgcagctgccagctccgcagcagccctgtgcagcaggggcctggcatgtcccgtgagcagaggcgcagctgtgactgcaagcgcatctgccgggggggccggccacaagccacccagacaccagtgcccagcctccgggggagggaaagggacagagtcctccctagccagaggcagccagaggctggcccaggcgtgagcctcagcagccccatcaatgtccagcgcattcgttctaccagcctggagtcccgagagtgccgatcggaccctgagagtggtgtttcgtgcctgaccacgtgtgcctcggggggcgagtgtctgggagctcccaattacaggaaactgatgcgccgctacagtatcagtgagctggaccagggtgacagggcctcgctgacctcggatgtctacccacatcctcccctgggcatgctgcccagggaggccaaggaggtagaggcaagcctccccatagccttgggtcccaaaagcaggtctctggagtcaccgacgctgggagacccctcctacgtccaggttgccccagagaccaaaggccccagacagatggccgtgttctcactgcccgaggaggtgtaccggaagcctgccgagctagacgaggacagtgagagcagcaagtgctgctccatccgctactgcttctactaccgcaagtgtgacatggcagatgatgccagtgatggcaaggatgagctctcctactctatccccatgaagatcctgcctggcatgaagctggacgagcaggtggtgcctgtggtgagcaggaccctgcaggtgctggatgctgctacctgcagcagcagcagccctgaggcctcccgcactcaggagattgacctccgtgtgtccaccttcgaggggagcctggccaagatcaatgccctgcgggcccatgcctatggcctccctgatggcttcctggctgcccggctggacaccaacgagctgctgacagtcctgcggcagtgtgtggccagccccgaggcccgtgcccccaagccctatgtgtctcagatctccgagtataagcttgagctagctctcaagttcaaggagctccgggcctcctgccgccgtgtggccaatgtggacaagagcccaactcacatgctggcagccatcacgggcagcttccaggtgctgagcagcctcattgagaccttcgtgcggctggtgttcattgtgcgctccgaggcccagcgccaagagctgctggccaaggtagaagaggtggtgaggaactacaccttcctgctgcgtgcagctgaggagtccacagcccgtaaccttaaccagcagcagcagcaacaacaacagcagcagcagcaacaacaacagcagcagcaacaacaacagcagcagcagcagcagcaggtggcagcagctgcaggggcagccacagagcatccaccaggctccccaacttcggcgactgttatgagcacattcacccactccttaaaaacccttattaagtagggcatctgcccacacctgtcccccttccccaaccatggccccaggtttgagctttgtggtccttgcatcttgtggtgagtgtgtgtgtgtctgctgggccagtcagggtccaagagcccatcagtctccggggagtggaaactctcttgattgaggntctctcttaagggctgcaggcttagctgccgccctgggtgtcctcaccccttccctggcctctgggcctcactgtgagggcaaaggcccctcttcactctgctcacagcagagctgtattttatctcttctctggggctgagaggtgacatcaggctcacttcctgctcaatccgtgttgggcgctgggggagccagggcctgaagcaagcggaccctcaggctttgagctcctcgtggcatcggctcccctgctgggagcagtggcagtancagcaggccacattgccgtgccgaggggagagggcgctcagtccagatgtccccatccaccttgggctcacactcacctggtagatgccaccctgagggcctgtgcctgggtgagatgtctgcagaaaacagccacactaggctgtttgcagcggcccaactggccggcagcctggtgagccctcacctccaggtccagtagctccacaccagccatccccaaagtgccctgcccctcactgatgggcagggcagctcagtccactagggagcaagcatctgggatcaccccactcattttgggtaaggtacctgatgaaaacgtctgcctggggagacccagtgcaggcctaggagcccgcctagcccggcccagcccagctcaggggctgttgctgcaggcatgaggcttctctctcaacatctctctaccagacagactgtccttgggagtttgacttagctgtggatcggggaggggggtggggggaggggggaaaggggtaggggtggggggtgttgatgactatatcttaaacttctggaagctagcgtgatatgttaatcctgagtatatgcttttggctgtgtattgaccctgtggatttgtctctctaagaaaagaagctgagcgccttacccggtgcagtcctgcacctttctccctctctggagccatctggaagggaattcacactgtttaacatccaccttgacacacacctcctattgccaccaccgctgccaccaccaccgccaccaccgctgccaatgctttaaacgcgagaaacaccactcatcaactgaacagcacccctcgcctgcagttgaacctcaagatccagcttcgac
